(19) United States
(12) Patent Application Publication
(10) Pub. No.: US 2024/0066114 A1
(43) Pub. Date: Feb. 29, 2024

(54) MULTIVALENT NUCLEIC ACID BASED CORONAVIRUS VACCINES

(71) Applicant: CureVac SE, Tübingen (DE)

(72) Inventors: Susanne RAUCH, Tübingen (DE); Nicole ROTH, Tübingen (DE); Benjamin PETSCH, Tübingen (DE); Wolfgang GROSSE, Tübingen (DE)

(73) Assignee: CureVac SE, Tübingen (DE)

(21) Appl. No.: 18/043,317

(22) PCT Filed: Aug. 30, 2021
(86) PCT No.: PCT/EP2021/073885

§ 371 Date: Feb. 27, 2023

(30) Foreign Application Priority Data
Aug. 31, 2020 (WO) PCT/EP2020/000145
Aug. 31, 2020 (WO) PCT/EP2020/074251
Feb. 3, 2021 (WO) PCT/EP2021/052555

(51) Int. Cl. A61K 39/215; A61K 9/127; A61K 9/19; A61P 31/14

(52) U.S. Cl. CPC A61K 39/215; A61K 9/1272; A61K 9/19; A61P 31/14; A61K 2039/53

(57) ABSTRACT

The present invention is inter alia directed to compositions comprising at least one nucleic acid encoding at least one antigenic peptide or protein selected or derived from a Coronavirus membrane protein (M), nucleocapsid protein (N), non-structural protein, and/or accessory protein or an immunogenic fragment or immunogenic variant thereof. The composition may additionally comprise at least one nucleic acid encoding at least one antigenic peptide or protein selected or derived from a Coronavirus spike protein (S). The nucleic acid sequences of the compositions are preferably in association with a polymeric carrier, a polycationic protein or peptide, or a lipid nanoparticle (LNP). The compositions provided herein are for use in treatment or prophylaxis of an infection with at least one Coronavirus, and may therefore be comprised in a vaccine, preferably a multivalent vaccine. The invention is also directed to first and second and further medical uses and to methods of treating or preventing Coronavirus infections.

### INTRODUCTION

[0001] The present invention is inter alia directed to compositions comprising at least one nucleic acid encoding at least one antigenic peptide or protein selected or derived from a Coronavirus membrane protein (M), nucleocapsid protein (N), non-structural protein, and/or accessory protein. The composition may additionally comprise at least one nucleic acid encoding at least one antigenic peptide or protein selected or derived from a Coronavirus spike protein (S). Nucleic acid sequences of the compositions are preferably in association with a polymeric carrier, a polycationic protein or peptide, or a lipid nanoparticle (LNP). The compositions provided herein are for use in treatment or prophylaxis of an infection with at least one Coronavirus, and may therefore be comprised in a vaccine, preferably a multivalent vaccine. Also provided are medical uses and methods of treating or preventing Coronavirus infections.

[0002] Coronaviruses are highly contagious, enveloped, positive single stranded RNA viruses of the Coronaviridae family. Coronaviruses (CoV) are genetically highly variable, and individual virus species can also infect several host species by overcoming the species barrier. Such transfers have resulted in infections in humans with the SARS-associated coronavirus (SARS-CoV-1), with the Middle East respiratory syndrome coronavirus (MERS-CoV), and with SARS-CoV-2 (causing COVID-19 disease).

[0003] SARS-CoV-1, which causes severe acute respiratory syndrome (SARS), infected 8422 humans and resulted in 916 deaths in 37 countries between 2002 and 2003. MERS-CoV was first identified in the Middle East in 2012. A report confirmed 1791 MERS-CoV infection cases, including at least 640 deaths in 27 countries, as of July 2016.

[0004] The Coronavirus pandemic that presumably started in the Chinese city of Wuhan at the turn of 2019/2020 has been attributed to a previously unknown coronavirus (SARS-CoV-2) which causes a severe respiratory disease (COVID-19). By end of August 2020, there were about 25,000,000 confirmed cases of a SARS-CoV-2 infection, spreading across almost every country in the world, with more than 850,000 COVID-19 associated deaths.

[0005] These current outbreaks shows the substantial risk of a severe global pandemic that can be caused by Coronaviruses. It would be fundamentally important for the global health to provide a vaccine that provides protection against (a pandemic) Coronavirus. It would be advantageous to provide a vaccine that protects against a Coronavirus infection by inducing strong Coronavirus specific neutralizing antibody responses including T-cell responses.

[0006] Further, as the elderly population is strongly affected by such viruses, it would be advantageous to provide a vaccine that is efficient in the elderly population.

[0007] Nucleic acid based vaccination, including DNA or RNA, represents a promising technique for novel vaccines against emerging viruses. Nucleic acids can be genetically engineered and administered to a human subject. Transfected cells directly produce the encoded antigen (e.g. provided by a DNA or an RNA, in particular an mRNA), which results in protective immunological responses.

[0008] A pivotal role for virus-specific memory T-cells in broad and long-term protection against SARS-CoV infection has been elucidated (see e.g. Channappanavar, Rudragouda, et al. “Virus-specific memory CD8 T cells provide substantial protection from lethal severe acute respiratory syndrome coronavirus infection.” Journal of virology 88.19 (2014): 11034-11044). Virus-specific CD8 T cells are e.g. required for pathogen clearance and for mediating protection after viral challenge. An effective SARS-CoV-2 vaccine should therefore not only induce strong functional humoral immune responses against SARS-CoV-2, but also induce SARS-CoV-2 specific CD8+ T-cell and CD4+ T-cell responses.

[0009] During the pandemic, new SARS-CoV-2 variant strains were emerging that are often more contagious or more pathogenic then the original SARS-CoV-2 strain. Such new emerging SARS-CoV-2 strains may potentially lead to a reduced efficiency of first generation vaccines that were developed against the original SARS-CoV-2 strain.

[0010] It is the object of the underlying invention to provide a nucleic acid based vaccine that provides protection against Coronavirus infections, preferably against a SARS-CoV-2 infection.

### Definitions

[0011] For the sake of clarity and readability the following definitions are provided. Any technical feature mentioned for these definitions may be read on each and every embodiment of the invention. Additional definitions and explanations may be specifically provided in the context of these embodiments.

[0012] Percentages in the context of numbers should be understood as relative to the total number of the respective items. In other cases, and unless the context dictates otherwise, percentages should be understood as percentages by weight (wt.-%).

[0013] About: The term “about” is used when determinants or values do not need to be identical, i.e. 100% the same. Accordingly, “about” means, that a determinant or values may diverge by 0.1% to 20%, preferably by 0.1% to 10%; in particular, by 0.5%, 1%, 2%, 3%, 4%, 5%, 6%, 7%, 8%, 9%, 10%, 11%, 12%, 13%, 14%, 15%, 16%, 17%, 18%, 19%, 20%. The skilled person will know that e.g. certain parameters or determinants may slightly vary based on the method how the parameter was determined. For example, if a certain determinants or value is defined herein to have e.g. a length of “about 1000 nucleotides”, the length may diverge by 0.1% to 20%, preferably by 0.1% to 10%; in particular, by 0.5%, 1%, 2%, 3%, 4%, 5%, 6%, 7%, 8%, 9%, 10%, 11%, 12%, 13%, 14%, 15%, 16%, 17%, 18%, 19%, 20%. Accordingly, the skilled person will know that in that specific example, the length may diverge by 1 to 200 nucleotides, preferably by 1 to 200 nucleotides; in particular, by 5, 10, 20, 30, 40, 50, 60, 70, 80, 90, 100, 110, 120, 130, 140, 150, 160, 170, 180, 190, 200 nucleotides.

[0014] Adaptive immune response: The term “adaptive immune response” as used herein will be recognized and understood by the person of ordinary skill in the art, and is e.g. intended to refer to an antigen-specific response of the immune system (the adaptive immune system). Antigen specificity allows for the generation of responses that are tailored to specific pathogens or pathogen-infected cells. The ability to mount these tailored responses is usually maintained in the body by “memory cells” (B-cells). In the context of the invention, the antigen is provided by the nucleic acid (e.g. an RNA or a DNA) encoding at least one antigenic peptide or protein derived from a Coronavirus, e.g. from SARS-CoV-2

[0015] Antigen: The term “antigen” as used herein will be recognized and understood by the person of ordinary skill in the art, and is e.g. intended to refer to a substance which may be recognized by the immune system, preferably by the adaptive immune system, and is capable of triggering an antigen-specific immune response, e.g. by formation of antibodies and/or antigen-specific T cells as part of an adaptive immune response. Typically, an antigen may be or may comprise a peptide or protein which may be presented by the MHC to T-cells. Also fragments, variants and derivatives of peptides or proteins comprising at least one epitope are understood as antigens in the context of the invention. In the context of the present invention, an antigen may be the product of translation of a provided nucleic acid as specified herein.

[0016] Antigenic peptide or protein: The term “antigenic peptide or protein” or “immunogenic peptide or protein” will be recognized and understood by the person of ordinary skill in the art, and is e.g. intended to refer to a peptide, protein derived from a (antigenic or immunogenic) protein which stimulates the body's adaptive immune system to provide an adaptive immune response. Therefore an antigenic/immunogenic peptide or protein comprises at least one epitope (as defined herein) or antigen (as defined herein) of the protein it is derived from (e.g., Coronavirus M, N, S, etc.)

[0017] Cationic: Unless a different meaning is clear from the specific context, the term “cationic” means that the respective structure bears a positive charge, either permanently or not permanently, but in response to certain conditions such as pH. Thus, the term “cationic” covers both “permanently cationic” and “cationisable”.

[0018] Cationisable: The term “cationisable” as used herein means that a compound, or group or atom, is positively charged at a lower pH and uncharged at a higher pH of its environment. Also in non-aqueous environments where no pH value can be determined, a cationisable compound, group or atom is positively charged at a high hydrogen ion concentration and uncharged at a low concentration or activity of hydrogen ions. It depends on the individual properties of the cationisable or polycationisable compound, in particular the pKa of the respective cationisable group or atom, at which pH or hydrogen ion concentration it is charged or uncharged. In diluted aqueous environments, the fraction of cationisable compounds, groups or atoms bearing a positive charge may be estimated using the so-called Henderson-Hasselbalch equation which is well-known to a person skilled in the art. E.g., in some embodiments, if a compound or moiety is cationisable, it is preferred that it is positively charged at a pH value of about 1 to 9, preferably 4 to 9, 5 to 8 or even 6 to 8, more preferably of a pH value of or below 9, of or below 8, of or below 7, most preferably at physiological pH values, e.g. about 7.3 to 7.4, i.e. under physiological conditions, particularly under physiological salt conditions of the cell in vivo. In other embodiments, it is preferred that the cationisable compound or moiety is predominantly neutral at physiological pH values, e.g. about 7.0-7.4, but becomes positively charged at lower pH values. In some embodiments, the preferred range of pKa for the cationisable compound or moiety is about 5 to about 7.

[0019] Coding sequence/coding region: The terms “coding sequence” or “coding region” and the corresponding abbreviation “cds” as used herein will be recognized and understood by the person of ordinary skill in the art, and are e.g. intended to refer to a sequence of several nucleotide triplets, which may be translated into a peptide or protein. A coding sequence in the context of the present invention may be a DNA sequence, preferably an RNA sequence, consisting of a number of nucleotides that may be divided by three, which starts with a start codon and which preferably terminates with a stop codon.

[0020] Derived from: The term “derived from” as used throughout the present specification in the context of a nucleic acid, i.e. for a nucleic acid “derived from” (another) nucleic acid, means that the nucleic acid, which is derived from (another) nucleic acid, shares e.g. at least 60%, 70%, 80%, 81%, 82%, 83%, 84%, 85%, 86%, 87%, 88%, 89%, 90%, 91%, 92%, 93%, 94%, 95%, 96%, 97%, 98%, or 99% sequence identity with the nucleic acid from which it is derived. The skilled person is aware that sequence identity is typically calculated for the same types of nucleic acids, i.e. for DNA sequences or for RNA sequences. Thus, it is understood, if a DNA is “derived from” an RNA or if an RNA is “derived from” a DNA, in a first step the RNA sequence is converted into the corresponding DNA sequence (in particular by replacing the uracils (U) by thymidines (T) throughout the sequence) or, vice versa, the DNA sequence is converted into the corresponding RNA sequence (in particular by replacing the T by U throughout the sequence). Thereafter, the sequence identity of the DNA sequences or the sequence identity of the RNA sequences is determined. Preferably, a nucleic acid “derived from” a nucleic acid also refers to nucleic acid, which is modified in comparison to the nucleic acid from which it is derived, e.g. in order to increase RNA stability even further and/or to prolong and/or increase protein production. In the context of amino acid sequences (e.g. antigenic peptides or proteins) the term “derived from” means that the amino acid sequence, which is derived from (another) amino acid sequence, shares e.g. at least 60%, 70%, 75%, 80%, 81%, 82%, 83%, 84%, 85%, 86%, 87%, 88%, 89%, 90%, 91%, 92%, 93%, 94%, 95%, 96%, 97%, 98%, or 99% sequence identity with the amino acid sequence from which it is derived.

[0021] Epitope: The term “epitope” (also called “antigen determinant” in the art) as used herein will be recognized and understood by the person of ordinary skill in the art, and is e.g. intended to refer to T cell epitopes and B cell epitopes. T cell epitopes or parts of the antigenic peptides or proteins and may comprise fragments preferably having a length of about 6 to about 20 or even more amino acids, e.g. fragments as processed and presented by MHC class I molecules, preferably having a length of about 8 to about 10 amino acids, e.g. 8, 9, or 10, (or even 11, or 12 amino acids), or fragments as processed and presented by MHC class II molecules, preferably having a length of about 13 to about 20 or even more amino acids. These fragments are typically recognized by T cells in form of a complex consisting of the peptide fragment and an MHC molecule, i.e. the fragments are typically not recognized in their native form. B cell epitopes are typically fragments located on the outer surface of (native) protein or peptide antigens, preferably having 5 to 15 amino acids, more preferably having 5 to 12 amino acids, even more preferably having 6 to 9 amino acids, which may be recognized by antibodies, i.e. in their native form. Such epitopes of proteins or peptides may furthermore be selected from any of the herein mentioned variants of such proteins or peptides. In this context epitopes can be conformational or discontinuous epitopes which are composed of segments of the proteins or peptides as defined herein that are discontinuous in the amino acid sequence of the proteins or peptides as defined herein but are brought together in the three-dimensional structure or continuous or linear epitopes which are composed of a single polypeptide chain.

[0022] Fragment: The term “fragment” as used throughout the present specification in the context of a nucleic acid sequence (e.g. RNA or a DNA) or an amino acid sequence may typically be a shorter portion of a full-length sequence of e.g. a nucleic acid sequence or an amino acid sequence. Accordingly, a fragment, typically, consists of a sequence that is identical to the corresponding stretch within the full-length sequence. A preferred fragment of a sequence in the context of the present invention, consists of a continuous stretch of entities, such as nucleotides or amino acids corresponding to a continuous stretch of entities in the molecule the fragment is derived from, which represents at least 40%, 50%, 60%, 70%, 80%, 90%, 95% of the total (i.e. full-length) molecule from which the fragment is derived (e.g. Coronavirus M, N, S). The term “fragment” as used throughout the present specification in the context of proteins or peptides may, typically, comprise a sequence of a protein or peptide as defined herein, which is, with regard to its amino acid sequence, N-terminally and/or C-terminally truncated compared to the amino acid sequence of the original protein. Such truncation may thus occur either on the amino acid level or correspondingly on the nucleic acid level. A sequence identity with respect to such a fragment as defined herein may therefore preferably refer to the entire protein or peptide as defined herein or to the entire (coding) nucleic acid molecule of such a protein or peptide. Fragments of proteins or peptides may comprise at least one epitope of those proteins or peptides.

[0023] Heterologous: The terms “heterologous” or “heterologous sequence” as used throughout the present specification in the context of a nucleic acid sequence or an amino acid sequence refers to a sequence (e.g. RNA, DNA, amino acid) has to be understood as a sequence that is derived from another gene, another allele, or e.g. another species or virus. Two sequences are typically understood to be “heterologous” if they are not derivable from the same gene or from the same allele. I.e., although heterologous sequences may be derivable from the same organism or virus, in nature, they do not occur in the same nucleic acid or protein.

[0024] Humoral immune response: The terms “humoral immunity” or “humoral immune response” will be recognized and understood by the person of ordinary skill in the art, and are e.g. intended to refer to B-cell mediated antibody production and optionally to accessory processes accompanying antibody production. A humoral immune response may be typically characterized, e.g. by Th2 activation and cytokine production, germinal center formation and isotype switching, affinity maturation and memory cell generation. Humoral immunity may also refer to the effector functions of antibodies, which include pathogen and toxin neutralization, classical complement activation, and opsonin promotion of phagocytosis and pathogen elimination.

[0025] Identity (of a sequence): The term “identity” as used throughout the present specification in the context of a nucleic acid sequence or an amino acid sequence will be recognized and understood by the person of ordinary skill in the art, and is e.g. intended to refer to the percentage to which two sequences are identical. To determine the percentage to which two sequences are identical, e.g. nucleic acid sequences or amino acid (aa) sequences as defined herein, preferably the aa sequences encoded by the nucleic acid sequence as defined herein or the aa sequences themselves, the sequences can be aligned in order to be subsequently compared to one another. Therefore, e.g. a position of a first sequence may be compared with the corresponding position of the second sequence. If a position in the first sequence is occupied by the same residue as is the case at a position in the second sequence, the two sequences are identical at this position. If this is not the case, the sequences differ at this position. If insertions occur in the second sequence in comparison to the first sequence, gaps can be inserted into the first sequence to allow a further alignment. If deletions occur in the second sequence in comparison to the first sequence, gaps can be inserted into the second sequence to allow a further alignment. The percentage to which two sequences are identical is then a function of the number of identical positions divided by the total number of positions including those positions which are only occupied in one sequence. The percentage to which two sequences are identical can be determined using an algorithm, e.g. an algorithm integrated in the BLAST program.

[0026] Immunogen, immunogenic: The terms “immunogen” or “immunogenic” will be recognized and understood by the person of ordinary skill in the art, and are e.g. intended to refer to a compound that is able to stimulate/induce an immune response. Preferably, an immunogen is a peptide, polypeptide, or protein. An immunogen in the sense of the present invention is the product of translation of a provided nucleic acid, comprising at least one coding sequence encoding at least one antigenic peptide, protein derived from e.g. a coronavirus protein as defined herein. Typically, an immunogen elicits an adaptive immune response.

[0027] Immune response: The term “immune response” will be recognized and understood by the person of ordinary skill in the art, and is e.g. intended to refer to a specific reaction of the adaptive immune system to a particular antigen (so called specific or adaptive immune response) or an unspecific reaction of the innate immune system (so called unspecific or innate immune response), or a combination thereof.

[0028] Immune system: The term “immune system” will be recognized and understood by the person of ordinary skill in the art, and is e.g. intended to refer to a system of the organism that protects the organisms from infection. If a pathogen succeeds in passing a physical barrier of an organism and enters this organism, the innate immune system provides an immediate non-specific response. If pathogens evade this innate response, vertebrates possess a second layer of protection, the adaptive immune system. The immune system adapts its response during an infection to improve its recognition of the pathogen. This improved response is then retained after the pathogen has been eliminated, in the form of an immunological memory, and allows the adaptive immune system to mount faster and stronger attacks each time this pathogen is encountered. According to this, the immune system comprises the innate and the adaptive immune system. Each of these two parts typically contains so called humoral and cellular components.

[0029] Innate immune system: The term “innate immune system” (also known as non-specific or unspecific immune system) will be recognized and understood by the person of ordinary skill in the art, and is e.g. intended to refer to a system typically comprising the cells and mechanisms that defend the host from infection by other organisms in a non-specific manner. This means that the cells of the innate system may recognize and respond to pathogens in a generic way, but unlike the adaptive immune system, it does not confer long-lasting or protective immunity to the host. The innate immune system may be activated by ligands of pattern recognition receptor e.g. Toll-like receptors, NOD-like receptors, or RIG-1 like receptors etc.

[0030] Lipidoid compound: A lipidoid compound, also simply referred to as lipidoid, is a lipid-like compound, i.e. an amphiphilic compound with lipid-like physical properties. In the context of the present invention, the term lipid is considered to encompass lipidoid compounds.

[0031] Nucleic acid, nucleic acid molecule: The terms “nucleic acid” or “nucleic acid molecule” as used herein, will be recognized and understood by the person of ordinary skill in the art. The terms “nucleic acid” or “nucleic acid molecule” preferably refers to DNA (molecules) or RNA (molecules). The term is used synonymously with the term polynucleotide. Preferably, a nucleic acid or a nucleic acid molecule is a polymer comprising or consisting of nucleotide monomers that are covalently linked to each other by phosphodiester-bonds of a sugar/phosphate-backbone. The terms “nucleic acid” or “nucleic acid molecule” also encompasses modified nucleic acid (molecules), such as base-modified, sugar-modified or backbone-modified DNA or RNA (molecules) as defined herein.

[0032] Nucleic acid sequence, DNA sequence, RNA sequence: The terms “nucleic acid sequence”, “DNA sequence”, “RNA sequence” will be recognized and understood by the person of ordinary skill in the art, and e.g. refer to a particular and individual order of the succession of its nucleotides.

[0033] Nucleic acid species: In the context of the invention, the term “nucleic acid species” is not restricted to mean “one single nucleic acid molecule” but is understood to comprise an ensemble of essentially identical nucleic acid molecules. Accordingly, it may relate to a plurality of essentially identical nucleic acid molecules, e.g. DNA or RNA molecules.

[0034] Multivalent vaccine: A multivalent Coronavirus vaccine of the invention provides more than one valence (e.g. an antigen). These at least two antigen may be derived from two different Coronaviruses (e.g. one antigen derived from SARS-CoV-1, one antigen derived from SARS-CoV-2) or may be derived the same Coronavirus (e.g., two different antigens derived from SARS-CoV-2, e.g. M and N and S).

[0035] Permanently cationic: The term “permanently cationic” as used herein will be recognized and understood by the person of ordinary skill in the art, and means, e.g., that the respective compound, or group, or atom, is positively charged at any pH value or hydrogen ion activity of its environment. Typically, the positive charge results from the presence of a quaternary nitrogen atom. Where a compound carries a plurality of such positive charges, it may be referred to as permanently polycationic.

[0036] RNA sequence: The term “RNA sequence” will be recognized and understood by the person of ordinary skill in the art, and e.g. refer to a particular and individual order of the succession of its ribonucleotides.

[0037] Stabilized RNA: The term “stabilized RNA” refers to an RNA that is modified such, that it is more stable to disintegration or degradation, e.g., by environmental factors or enzymatic digest, such as by exo- or endonuclease degradation, compared to an RNA without such modification. Preferably, a stabilized RNA in the context of the present invention is stabilized in a cell, such as a prokaryotic or eukaryotic cell, preferably in a mammalian cell, such as a human cell. The stabilization effect may also be exerted outside of cells, e.g. in a buffer solution etc., e.g., for storage of a composition comprising the stabilized RNA.

[0038] T-cell responses: The terms “cellular immunity” or “cellular immune response” or “cellular T-cell responses” as used herein will be recognized and understood by the person of ordinary skill in the art, and are for example intended to refer to the activation of macrophages, natural killer cells (NK), antigen-specific cytotoxic T-lymphocytes, and the release of various cytokines in response to an antigen. In more general terms, cellular immunity is not based on antibodies, but on the activation of cells of the immune system. Typically, a cellular immune response may be characterized e.g. by activating antigen-specific cytotoxic T-lymphocytes that are able to induce apoptosis in cells, e.g. specific immune cells like dendritic cells or other cells, displaying epitopes of foreign antigens on their surface.

[0039] UTR: The term “untranslated region” or “UTR” or “UTR element” will be recognized and understood by the person of ordinary skill in the art, and are e.g. intended to refer to a part of a nucleic acid molecule typically located 5′ or 3′ located of a coding sequence. An UTR is not translated into protein. An UTR may be part of a nucleic acid, e.g. a DNA or an RNA. An UTR may comprise elements for controlling gene expression, also called regulatory elements. Such regulatory elements may be, e.g., ribosomal binding sites, miRNA binding sites etc.

[0040] 3′-UTR: The term “3-untranslated region” or “3-UTR” or “3′-UTR element” will be recognized and understood by the person of ordinary skill in the art, and are e.g. intended to refer to a part of a nucleic acid molecule located 3′ (i.e. downstream) of a coding sequence and which is not translated into protein. A 3′-UTR may be part of an RNA, located between a coding sequence and an (optional) poly(A) sequence. A 3′-UTR may comprise elements for controlling gene expression, also called regulatory elements. Such regulatory elements may be, e.g., ribosomal binding sites, miRNA binding sites etc.

[0041] 5′-UTR: The term “5′-untranslated region” or “5′-UTR” or “5′-UTR element” will be recognized and understood by the person of ordinary skill in the art, and are e.g. intended to refer to a part of a nucleic acid molecule located 5′ (i.e. upstream) of a coding sequence and which is not translated into protein. A 5′-UTR may be part of an RNA, located between a coding sequence and an (optional) 5′ cap. A 5′-UTR may comprise elements for controlling gene expression, also called regulatory elements. Such regulatory elements may be, e.g., ribosomal binding sites, miRNA binding sites etc.

[0042] Variant (of a sequence): The term “variant” as used throughout the present specification in the context of a nucleic acid sequence will be recognized and understood by the person of ordinary skill in the art, and is e.g. intended to refer to a variant of a nucleic acid sequence derived from another nucleic acid sequence. E.g., a variant of a nucleic acid sequence may exhibit one or more nucleotide deletions, insertions, additions and/or substitutions compared to the nucleic acid sequence from which the variant is derived. A variant of a nucleic acid sequence may at least 50%, 60%, 70%, 80%, 90%, or 95% identical to the nucleic acid sequence the variant is derived from. The variant is a functional variant in the sense that the variant has retained at least 50%, 60%, 70%, 80%, 90%, or 95% or more of the function of the sequence where it is derived from. A “variant” of a nucleic acid sequence may have at least 70%, 75%, 80%, 85%, 90%, 95%, 98% or 99% nucleotide identity over a stretch of at least 10, 20, 30, 50, 75 or 100 nucleotide of such nucleic acid sequence.

[0043] The term “variant” as used throughout the present specification in the context of proteins or peptides is e.g. intended to refer to a proteins or peptide variant having an amino acid sequence which differs from the original sequence in one or more mutation(s)/substitution(s), such as one or more substituted, inserted and/or deleted amino acid(s). Preferably, these fragments and/or variants have the same, or a comparable specific antigenic property (immunogenic variants, antigenic variants). Insertions and substitutions are possible, in particular, at those sequence positions which cause no modification to the three-dimensional structure or do not affect the binding region. Modifications to a three-dimensional structure by insertion(s) or deletion(s) can easily be determined e.g. using CD spectra (circular dichroism spectra). A “variant” of a protein or peptide may have at least 70%, 75%, 80%, 85%, 90%, 95%, 98% or 99% amino acid identity over a stretch of at least 10, 20, 30, 50, 75 or 100 amino acids of such protein or peptide. Preferably, a variant of a protein comprises a functional variant of the protein, which means, in the context of the invention, that the variant exerts essentially the same, or at least 40%, 50%, 60%, 70%, 80%, 90% of the immunogenicity as the protein it is derived from.

### SHORT DESCRIPTION OF THE INVENTION

[0044] As further defined in the claims and the underlying description, these objects of the invention are inter alia solved by providing a pharmaceutical composition comprising or consisting of a nucleic acid, e.g. an RNA or a DNA, comprising at least one coding sequence encoding at least one antigenic peptide or protein from a Coronavirus.

[0045] Suitably, the pharmaceutical composition or the vaccine of the invention has at least some of the following advantageous features:
[0046] Translation of the nucleic acid at the site of injection/vaccination (e.g. muscle);
[0047] Efficient induction of antigen-specific immune responses against all the encoded proteins, suitably at a very low dosage and dosing regimen;
[0048] Suitability for vaccination of infants and/or newborns or the elderly, in particular the elderly;
[0049] Suitability of the composition/vaccine for intramuscular administration;
[0050] Induction of specific and functional humoral immune response against Coronavirus, e.g. SARS-CoV-2;
[0051] Induction of specific and functional humoral immune response against Coronavirus variants, e.g. SARS-CoV-2 variants;
[0052] Induction of broad, functional cellular T-cell responses against Coronavirus, e.g. SARS-CoV-2;
[0053] Induction of broad, functional cellular T-cell responses against Coronavirus variants, e.g. SARS-CoV-2 variants;
[0054] Induction of specific B-cell memory against Coronavirus, e.g. SARS-CoV-2;
[0055] Induction of specific B-cell memory against Coronavirus variants, e.g. SARS-CoV-2 variants;
[0056] Induction of functional antibodies that can effectively neutralize the Coronavirus, e.g. SARS-CoV-2;
[0057] Induction of functional antibodies that can effectively neutralize emerging variants of a Coronavirus, e.g. SARS-CoV-2;
[0058] Eliciting of mucosal IgA immunity by inducing of mucosal IgA antibodies;
[0059] Induction of a well-balanced B cell and T cell responses;
[0060] Induction of protective immunity against coronavirus infection, e.g. against SARS-CoV-2 or emerging variants thereof;
[0061] Fast onset of immune protection against Coronavirus and Coronavirus variants, e.g. SARS-CoV-2 variants;
[0062] Longevity of the induced immune responses against Coronavirus;
[0063] Longevity of the induced immune responses against Coronavirus by induction broad, functional cellular T-cell responses against Coronavirus, targeting also variants of Coronavirus, e.g. SARS-CoV-2;
[0064] No enhancement of a virus infection due to vaccination or immunopathological effects;
[0065] No antibody dependent enhancement (ADE) caused by the nucleic acid based vaccine;
[0066] No excessive induction of systemic cytokine or chemokine response after application of the vaccine, which could lead to an undesired high reactogenicity upon vaccination;
[0067] Well tolerability, no side-effects, non-toxicity of the vaccine;
[0068] Advantageous stability characteristics of the nucleic acid-based vaccine;
[0069] Speed, adaptability, simplicity and scalability of vaccine production;
[0070] Advantageous vaccination regimen that only requires one or two vaccination for sufficient protection;
[0071] Advantageous vaccination regimen that only requires a low dose of the composition/vaccine for sufficient protection.
[0072] Boostability of an existing immunity against SARS-CoV-2, preferably inducing additional immune responses against SARS-CoV-2 variants;
[0073] Induction of different, SARS-CoV-2 strain specific immune responses in subjects that have been exposed to a different strain or that have been vaccinated with a vaccine against a different strain;
[0074] Induction of a broad immune response across various SARS-CoV-2 variants.

[0075] The present invention is based on the inventor's surprising finding that a pharmaceutical composition comprising at least one nucleic acid encoding at least one peptide or protein from a Coronavirus membrane protein (M), nucleocapsid protein (N), non-structural protein, and/or accessory protein or an immunogenic fragment or immunogenic variant thereof can efficiently be expressed in human cells. Even more surprising and unexpected, the administration of such a pharmaceutical compositions, optionally additionally comprising at least one nucleic acid sequence encoding a Coronavirus spike protein, induces antigen-specific immune responses against the encoded Coronavirus antigen, including T-cell responses.

[0076] Those findings are the basis for a nucleic acid based vaccine of the invention that provides protection against at least one Coronavirus, e.g. a pandemic Coronavirus, preferably SARS-CoV-2.

[0077] In a first aspect, the present invention provides pharmaceutical compositions comprising or consisting of at least one nucleic acid comprising at least one coding sequence encoding at least one antigenic peptide or protein from at least one Coronavirus, wherein the at least one antigenic peptide or protein is selected or derived from membrane protein (M), nucleocapsid protein (N), envelope protein (E), non-structural protein, and/or accessory protein or an immunogenic fragment or immunogenic variant thereof.

[0078] Suitably, the composition additionally comprises at least one nucleic acid comprising at least one coding sequence encoding at least one antigenic peptide or protein selected or derived from at least one Coronavirus spike protein (S), or an immunogenic fragment or immunogenic variant thereof

[0079] The at least one Coronavirus may suitably be selected from a pandemic Coronavirus, e.g. SARS-CoV-1, SARS-CoV-2, MERS-CoV. Preferably, the Coronavirus is selected from SARS-CoV-2.

[0080] In a second aspect, the present invention provides vaccines, preferably multivalent Coronavirus vaccines, wherein the vaccines comprise the pharmaceutical compositions as defined in the first aspect.

[0081] In a third aspect, the present invention provides kits or kits of parts comprising at least one pharmaceutical composition of first aspect, and/or at least one vaccine of the second aspect.

[0082] Further aspects of the invention concern methods of treating or preventing Coronavirus infections in a subject, and first and second medical uses of the pharmaceutical compositions, the vaccines, or the kits. Also provided are methods of manufacturing the pharmaceutical compositions, or the vaccines.

### DETAILED DESCRIPTION OF THE INVENTION

[0083] The present application is filed together with a sequence listing in electronic format, which is part of the description of the present application (WIPO standard ST.25). The information contained in the sequence listing is incorporated herein by reference in its entirety. Where reference is made herein to a “SEQ ID NO”, the corresponding nucleic acid sequence or amino acid (aa) sequence in the sequence listing having the respective identifier is referred to. For many sequences, the sequence listing also provides additional detailed information, e.g. regarding certain structural features, sequence optimizations, GenBank (NCBI) or GISAID (epi) identifiers, or additional detailed information regarding its coding capacity. In particular, such information is provided under numeric identifier <223> in the WIPO standard ST.25 sequence listing. Accordingly, information provided under said numeric identifier <223> is explicitly included herein in its entirety and has to be understood as integral part of the description of the underlying invention. Where reference is made to SEQ ID NOs of published patent applications, said nucleic acid or amino acid sequences are specifically included herein. Also for those referenced sequences, information provided under numeric identifier <223> in the WIPO standard ST.25 sequence listing of the referenced sequences is included herein.

[0084] Where reference is made to “SEQ ID NOs” of other published patent applications or patents, said sequences, e.g. amino acid sequences or nucleic acid sequences, are explicitly incorporated herein by reference. For “SEQ ID NOs” that are included by reference, information provided under numeric identifier <223> (of the respective sequence protocol) is also explicitly included herein in its entirety.

[0085] Pharmaceutical Composition:

[0086] In a first aspect, the invention relates to a pharmaceutical composition suitable fora Coronavirus vaccine.

[0087] It has to be noted that specific features and embodiments that are described in the context of the first aspect of the invention, that is the pharmaceutical composition of the invention, are likewise applicable to the second aspect (vaccine of the invention), the third aspect (kit or kit of parts of the invention), or further aspects including e.g. medical uses (first and second medical uses) and e.g. method of treatments.

[0088] A nucleic acid according to the invention, e.g. the DNA or the RNA, forms the basis for a nucleic acid based pharmaceutical composition or a nucleic acid based vaccine.

[0089] Such nucleic acid based pharmaceutical composition (first aspect) or nucleic acid based vaccines (second aspect) as provided herein have advantages over classical vaccine approaches: In general, protein-based vaccines, or live attenuated vaccines are suboptimal for use in developing countries due to their high production costs. In addition, protein-based vaccines, or live attenuated vaccines require long development times and are not suitable for rapid responses of pandemic virus outbreaks such as e.g. the Coronavirus SARS-CoV-2 outbreak in 2019/2020. Furthermore, using classical approaches it remains to be a challenge to provide a multivalent vaccine that is effective against a Coronavirus.

[0090] In contrast, the nucleic acid-based pharmaceutical compositions and vaccines according to the present invention allow very fast and cost-effective manufacturing. Therefore, in comparison with known vaccines, vaccine based on the inventive nucleic acid can be produced and manufactured significantly cheaper and faster, which is very advantageous particularly for use in developing countries or in the context of a global pandemic.

[0091] One further advantage of a pharmaceutical compositions or vaccines based on nucleic acid is that the nucleic acid components are temperature-stable in comparison to e.g. protein or peptide-based vaccines.

[0092] Moreover, the inventors found that respective nucleic acid sequences encoding Coronavirus antigens can be combined to improve specific immune responses, e.g. T-cell responses, B-cell responses, neutralizing immune responses.

[0093] Nucleic Acid Encoding a Coronavirus Antigenic Peptide or Protein

[0094] In various preferred embodiments, the pharmaceutical composition comprises at least one nucleic acid comprising at least one coding sequence encoding at least one antigenic peptide or protein selected or derived from at least one Coronavirus, or an immunogenic fragment or immunogenic variant thereof.

[0095] The term “antigenic peptide or protein of a Coronavirus” relates to any peptide or protein that is selected or is derived from the respective Coronavirus as defined herein, but also to fragments, variants or derivatives thereof, preferably to immunogenic fragments or immunogenic variants thereof.

[0096] The term “immunogenic fragment” or “immunogenic variant” has to be understood as any fragment/variant of the corresponding Coronavirus antigen that is capable of raising an immune response in a subject.

[0097] Coronaviruses can be classified into the genus Alphacoronavirus, Betacoronavirus, Deltacoronavirus, Gammacoronavirus, and unclassified Coronaviruses. Coronaviruses are genetically highly variable, and individual virus species can also infect several host species by overcoming the species barrier, to potentially become pandemic.

[0098] In preferred embodiments the at least one Coronavirus is selected or derived from at least one pandemic Coronavirus.

[0099] In embodiments the at least one Coronavirus, or the at least one pandemic Coronavirus, is selected from at least one Alphacoronavirus, at least one Betacoronavirus, at least one Gammacoronavirus, and/or at least one Deltacoronavirus, preferably a pandemic Alphacoronavirus, Betacoronavirus, Gammacoronavirus, Deltacoronavirus.

[0100] In embodiments, the at least one Coronavirus, or the at least one pandemic Coronavirus, is a Betacoronavirus. Suitably, the Betacoronavirus is selected from at least one Sarbecovirus, at least one Merbecovirus, at least one Embecovirus, at least one Nobecovirus, and/or at least one Hibecovirus.

[0101] In preferred embodiments, the at least one Coronavirus, or the at least one pandemic Coronavirus, is a Betacoronavirus, preferably a Sarbecovirus. In the context of the invention, a preferred Sarbecovirus may be selected from a SARS-associated Coronavirus.

[0102] Preferred SARS-associated Coronaviruses can be selected from SARS-CoV-2 and/or SARS-CoV-1.

[0103] SARS-CoV associated viruses belong to the Coronaviridae, in particular to Orthocoronaviruses, more specifically to the genus Betacoronavirus. SARS-CoV-1 (severe acute respiratory syndrome coronavirus, SARS-Coronavirus, SCV) causes a severe respiratory syndrome disease (SARS). An exemplary SARS-CoV-1 coronaviruses is identifiable by NCBI Taxonomy: 694009, NCBI Reference: DQ182595.1. Further suitable SARS-associated viruses in the context of the invention are SARS-CoV/Tor2, HCoV/OC43, HCoV/HKU1/N5, HCoV/229E/BN1/GER/2015, HCoV/NL63/RPTEC/2004, Bat SARS-like CoV/WIV1, BatCoV/HKU9-1 BF_005I, PDCoV/Swine/Thailand/S5011/2015, PEDV/NPL-PEDv/2013/P10, PEDV/NPL-PEDv/2013/P10, or MHV/S.

[0104] As used herein, the terms “SARS-CoV-2”, “Human coronavirus 2019”, “Wuhan Human coronavirus” (WHCV), “nCoV-2019 coronavirus”, “nCoV-2019”, “Wuhan seafood market pneumonia virus”, “Wuhan coronavirus”, “WHCV coronavirus”, “HCoV-19”, “SARS2”, “COVID-19 virus”, “hCoV-19”, or “coronavirus SARS-CoV-2” may be used interchangeable throughout the present invention, relating to a new pandemic coronavirus that has been emerged in the Chinese city of Wuhan at the turn of 2019/2020, causing the disease COVID-19. According to the WHO (February 2020), the virus is officially termed “SARS-CoV-2”, and the associated disease is officially termed “COVID-19”.

[0105] SARS-CoV-2 belongs to the Coronaviridae, in particular to Orthocoronaviruses, more specifically to the genus Betacoronavirus. Exemplary SARS-CoV-2 coronaviruses are isolates including but not limited to those provided in List A and List B below.

[0106] List A: Exemplary SARS-CoV-2 Coronavirus Isolates (EPI/GISAID):
[0107] EPI_ISL_402119, EPI_ISL_402120, EPI_ISL_402121, EPI_ISL_402123, EPI_ISL_402124 (hCoV-19/Wuhan_WIV04/2019), EPI_ISL_402125, EPI_ISL_402127, EPI_ISL_402128 (BetaCoV_Wuhan_WIV05_2019_EPI_ISL_402128), EPI_ISL_402129, EPI_ISL_402130, EPI_ISL_402131, EPI_ISL_402132, EPI_ISL_403928, EPI_ISL_403929, EPI_ISL_403930, EPI_ISL_403931, EPI_ISL_403932, EPI_ISL_403933, EPI_ISL_403934, EPI_ISL_403935, EPI_ISL_403936, EPI_ISL_403937, EPI_ISL_403962, EPI_ISL_403963, EPI_ISL_404227, EPI_ISL_404228, EPI_ISL_404253, EPI_ISL_404895, EPI_ISL_405839, EPI_ISL_406030, EPI_ISL_406031, EPI_ISL_406034, EPI_ISL_406036, EPI_ISL_406223, EPI_ISL_406531, EPI_ISL_406533, EPI_ISL_406534, EPI_ISL_406535, EPI_ISL_406536, EPI_ISL_406538, EPI_ISL_406592, EPI_ISL_406593, EPI_ISL_406594, EPI_ISL_406595, EPI_ISL_406596, EPI_ISL_406597, EPI_ISL_406798, EPI_ISL_406800, EPI_ISL_406801, EPI_ISL_406844, EPI_ISL_406862, EPI_ISL_406716, EPI_ISL_406717, EPI_ISL_406970, EPI_ISL_406973, EPI_ISL_407071, EPI_ISL_407073, EPI_ISL_407079, EPI_ISL_407084, EPI_ISL_407193, EPI_ISL_407214, EPI_ISL_407215, EPI_ISL_407313, EPI_ISL_407893, EPI_ISL_407894, EPI_ISL_407896, EPI_ISL_407976, EPI_ISL_407987, EPI_ISL_407988, EPI_ISL_408008, EPI_ISL_408009, EPI_ISL_408010, EPI_ISL_408430, EPI_ISL_408431, EPI_ISL_408478, EPI_ISL_408479, EPI_ISL_408480, EPI_ISL_408481, EPI_ISL_408482, EPI_ISL_408484, EPI_ISL_408486, EPI_ISL_408488, EPI_ISL_408489, EPI_ISL_408514, EPI_ISL_408515, EPI_ISL_408665, EPI_ISL_408666, EPI_ISL_408667, EPI_ISL_408668, EPI_ISL_408669, EPI_ISL_408670, EPI_ISL_408976, EPI_ISL_408977 EPI_ISL_409067, EPI_ISL_410044, EPI_ISL_410045, EPI_ISL_410218, EPI_ISL_410301, EPI_ISL_410486, EPI_ISL_410531, EPI_ISL_410532, EPI_ISL_410535, EPI_ISL_410536, EPI_ISL_410537, EPI_ISL_410538, EPI_ISL_410539, EPI_ISL_410540, EPI_ISL_410541, EPI_ISL_410542, EPI_ISL_410713, EPI_ISL_410714, EPI_ISL_410715, EPI_ISL_410716, EPI_ISL_410717, EPI_ISL_410718, EPI_ISL_410719, EPI_ISL_410720, EPI_ISL_410984, EPI_ISL_411060, EPI_ISL_411066, EPI_ISL_411218, EPI_ISL_411219, EPI_ISL_411220, EPI_ISL_411902, EPI_ISL_411915, EPI_ISL_411926, EPI_ISL_411927, EPI_ISL_411929, EPI_ISL_411950, EPI_ISL_411951, EPI_ISL_411952, EPI_ISL_411953, EPI_ISL_411954, EPI_ISL_411955, EPI_ISL_411956, EPI_ISL_411957, EPI_ISL_412026, EPI_ISL_412028, EPI_ISL_412029, EPI_ISL_412030, EPI_ISL_412459, EPI_ISL_412862, EPI_ISL_412869, EPI_ISL_412870, EPI_ISL_412871, EPI_ISL_412872, EPI_ISL_412873, EPI_ISL_412898, EPI_ISL_412899, EPI_ISL_412912, EPI_ISL_412966, EPI_ISL_412967, EPI_ISL_412968, EPI_ISL_412969, EPI_ISL_412970, EPI_ISL_412972, EPI_ISL_412973, EPI_ISL_412974, EPI_ISL_412975, EPI_ISL_412978, EPI_ISL_412979, EPI_ISL_412980, EPI_ISL_412981, EPI_ISL_412982, EPI_ISL_412983, EPI_ISL_413014, EPI_ISL_413015, EPI_ISL_413016, EPI_ISL_413017, EPI_ISL_413018, EPI_ISL_413021, EPI_ISL_413022, EPI_ISL_413023, EPI_ISL_413024, EPI_ISL_413213, EPI_ISL_413214, EPI_ISL_413455, EPI_ISL_413456, EPI_ISL_413457, EPI_ISL_413458, EPI_ISL_413459, EPI_ISL_413485, EPI_ISL_413486, EPI_ISL_413488, EPI_ISL_413489, EPI_ISL_413490, EPI_ISL_413513, EPI_ISL_413514, EPI_ISL_413515, EPI_ISL_413516, EPI_ISL_413518, EPI_ISL_413519, EPI_ISL_413520, EPI_ISL_413521, EPI_ISL_413522, EPI_ISL_413523, EPI_ISL_413555, EPI_ISL_413557, EPI_ISL_413558, EPI_ISL_413559, EPI_ISL_413560, EPI_ISL_413562, EPI_ISL_413563, EPI_ISL_413566, EPI_ISL_413572, EPI_ISL_413573, EPI_ISL_413577, EPI_ISL_413579, EPI_ISL_413580, EPI_ISL_413581, EPI_ISL_413582, EPI_ISL_413583, EPI_ISL_413584, EPI_ISL_413587, EPI_ISL_413589, EPI_ISL_413590, EPI_ISL_413591, EPI_ISL_413592, EPI_ISL_413593, EPI_ISL_413594, EPI_ISL_413595, EPI_ISL_413596, EPI_ISL_413597, EPI_ISL_413598, EPI_ISL_413599, EPI_ISL_413600, EPI_ISL_413602, EPI_ISL_413603, EPI_ISL_413604, EPI_ISL_413606, EPI_ISL_413607, EPI_ISL_413608, EPI_ISL_413609, EPI_ISL_413610, EPI_ISL_413611, EPI_ISL_413612, EPI_ISL_413613, EPI_ISL_413614, EPI_ISL_413615, EPI_ISL_413616, EPI_ISL_413617, EPI_ISL_413618, EPI_ISL_413619, EPI_ISL_413620, EPI_ISL_413621, EPI_ISL_413622, EPI_ISL_413647, EPI_ISL_413648, EPI_ISL_413691, EPI_ISL_413692, EPI_ISL_413693, EPI_ISL_413694, EPI_ISL_413697, EPI_ISL_413711, EPI_ISL_413729, EPI_ISL_413746, EPI_ISL_413748, EPI_ISL_413749, EPI_ISL_413750, EPI_ISL_413751, EPI_ISL_413761, EPI_ISL_413791, EPI_ISL_413809, EPI_ISL_413852, EPI_ISL_413853, EPI_ISL_413854, EPI_ISL_413856, EPI_ISL_413857, EPI_ISL_413858, EPI_ISL_413860, EPI_ISL_413861, EPI_ISL_413862, EPI_ISL_413863, EPI_ISL_413928, EPI_ISL_413931, EPI_ISL_413996, EPI_ISL_413997, EPI_ISL_413999, EPI_ISL_414005, EPI_ISL_414006, EPI_ISL_414007, EPI_ISL_414008, EPI_ISL_414009, EPI_ISL_414011, EPI_ISL_414012, EPI_ISL_414019, EPI_ISL_414020, EPI_ISL_414021, EPI_ISL_414022, EPI_ISL_414023, EPI_ISL_414027, EPI_ISL_414040, EPI_ISL_414041, EPI_ISL_414042, EPI_ISL_414043, EPI_ISL_414044, EPI_ISL_414045, EPI_ISL_414363, EPI_ISL_414366, EPI_ISL_414367, EPI_ISL_414368, EPI_ISL_414369, EPI_ISL_414414, EPI_ISL_414423, EPI_ISL_414428, EPI_ISL_414429, EPI_ISL_414433, EPI_ISL_414435, EPI_ISL_414439, EPI_ISL_414443, EPI_ISL_414445, EPI_ISL_414446, EPI_ISL_414451, EPI_ISL_414457, EPI_ISL_414468, EPI_ISL_414470, EPI_ISL_414476, EPI_ISL_414477, EPI_ISL_414479, EPI_ISL_414480, EPI_ISL_414481, EPI_ISL_414482, EPI_ISL_414483, EPI_ISL_414484, EPI_ISL_414485, EPI_ISL_414487, EPI_ISL_414500, EPI_ISL_414505, EPI_ISL_414509, EPI_ISL_414510, EPI_ISL_414511, EPI_ISL_414517, EPI_ISL_414519, EPI_ISL_414520, EPI_ISL_414521, EPI_ISL_414522, EPI_ISL_414523, EPI_ISL_414524, EPI_ISL_414525, EPI_ISL_414526, EPI_ISL_414527, EPI_ISL_414528, EPI_ISL_414529, EPI_ISL_414530, EPI_ISL_414531, EPI_ISL_414532, EPI_ISL_414534, EPI_ISL_414535, EPI_ISL_414545, EPI_ISL_414546, EPI_ISL_414547, EPI_ISL_414548, EPI_ISL_414549, EPI_ISL_414552, EPI_ISL_414554, EPI_ISL_414555, EPI_ISL_414556, EPI_ISL_414557, EPI_ISL_414558, EPI_ISL_414559, EPI_ISL_414560, EPI_ISL_414561, EPI_ISL_414562, EPI_ISL_414564, EPI_ISL_414565, EPI_ISL_414566, EPI_ISL_414569, EPI_ISL_414571, EPI_ISL_414574, EPI_ISL_414577, EPI_ISL_414578, EPI_ISL_414579, EPI_ISL_414580, EPI_ISL_414586, EPI_ISL_414587, EPI_ISL_414588, EPI_ISL_414589, EPI_ISL_414590, EPI_ISL_414591, EPI_ISL_414592, EPI_ISL_414593, EPI_ISL_414594, EPI_ISL_414595, EPI_ISL_414596, EPI_ISL_414597, EPI_ISL_414600, EPI_ISL_414601, EPI_ISL_414616, EPI_ISL_414617, EPI_ISL_414618, EPI_ISL_414619, EPI_ISL_414620, EPI_ISL_414621, EPI_ISL_414622, EPI_ISL_414623, EPI_ISL_414624, EPI_ISL_414625, EPI_ISL_414626, EPI_ISL_414627, EPI_ISL_414628, EPI_ISL_414629, EPI_ISL_414630, EPI_ISL_414631, EPI_ISL_414632, EPI_ISL_414633, EPI_ISL_414635, EPI_ISL_414637, EPI_ISL_414638, EPI_ISL_414641, EPI_ISL_414642, EPI_ISL_414643, EPI_ISL_414646, EPI_ISL_414648, EPI_ISL_414663, EPI_ISL_414684, EPI_ISL_414685, EPI_ISL_414686, EPI_ISL_414687, EPI_ISL_414688, EPI_ISL_414689, EPI_ISL_414690, EPI_ISL_414691, EPI_ISL_414692, EPI_ISL_414936, EPI_ISL_414937, EPI_ISL_414938, EPI_ISL_414940, EPI_ISL_414941, EPI_ISL_415105, EPI_ISL_415128, EPI_ISL_415129, EPI_ISL_415136, EPI_ISL_415141, EPI_ISL_415142, EPI_ISL_415147, EPI_ISL_415150, EPI_ISL_415151, EPI_ISL_415152, EPI_ISL_415153, EPI_ISL_415154, EPI_ISL_415155, EPI_ISL_415156, EPI_ISL_415157, EPI_ISL_415158, EPI_ISL_415159, EPI_ISL_415710, EPI_ISL_416426, EPI_ISL_416457, EPI_ISL_416481, EPI_ISL_416489, EPI_ISL_416491, EPI_ISL_416492, EPI_ISL_416514, EPI_ISL_416515, EPI_ISL_416516, EPI_ISL_416517, EPI_ISL_416518, EPI_ISL_416538, EPI_ISL_416539, EPI_ISL_416683, EPI_ISL_416685, EPI_ISL_416704, EPI_ISL_416711, EPI_ISL_416713, EPI_ISL_416715, EPI_ISL_416717, EPI_ISL_416744, EPI_ISL_416830, EPI_ISL_416831, EPI_ISL_416832, EPI_ISL_417020, EPI_ISL_417021, EPI_ISL_417022, EPI_ISL_417023, EPI_ISL_417024, EPI_ISL_417025, EPI_ISL_417026, EPI_ISL_417027, EPI_ISL_417028, EPI_ISL_417034, EPI_ISL_417200, EPI_ISL_417201, EPI_ISL_417202, EPI_ISL_417203, EPI_ISL_417204, EPI_ISL_417374, EPI_ISL_417375, EPI_ISL_417376, EPI_ISL_417377, EPI_ISL_417379, EPI_ISL_417382, EPI_ISL_417408, EPI_ISL_417409, EPI_ISL_417410, EPI_ISL_417411, EPI_ISL_417412, EPI_ISL_417413, EPI_ISL_417420, EPI_ISL_417435, EPI_ISL_417436, EPI_ISL_417437, EPI_ISL_417438, EPI_ISL_417439, EPI_ISL_417440, EPI_ISL_417441, EPI_ISL_417442, EPI_ISL_417467, EPI_ISL_417468, EPI_ISL_417504, EPI_ISL_417505, EPI_ISL_417506, EPI_ISL_417507, EPI_ISL_417508, EPI_ISL_417509, EPI_ISL_417510, EPI_ISL_417512, EPI_ISL_417513, EPI_ISL_417514, EPI_ISL_417515, EPI_ISL_417516, EPI_ISL_417517, EPI_ISL_417526, EPI_ISL_417527, EPI_ISL_417528, EPI_ISL_417529, EPI_ISL_417530, EPI_ISL_417531, EPI_ISL_417532, EPI_ISL_417533, EPI_ISL_417534, EPI_ISL_417536, EPI_ISL_417537, EPI_ISL_417538, EPI_ISL_417539, EPI_ISL_417540, EPI_ISL_417541, EPI_ISL_417542, EPI_ISL_417543, EPI_ISL_417544, EPI_ISL_417545, EPI_ISL_417546, EPI_ISL_417547, EPI_ISL_417548, EPI_ISL_417550, EPI_ISL_417551, EPI_ISL_417552, EPI_ISL_417553, EPI_ISL_417554, EPI_ISL_417555, EPI_ISL_417556, EPI_ISL_417557, EPI_ISL_417558, EPI_ISL_417559, EPI_ISL_417560, EPI_ISL_417561, EPI_ISL_417562, EPI_ISL_417563, EPI_ISL_417564, EPI_ISL_417565, EPI_ISL_417566, EPI_ISL_417567, EPI_ISL_417568, EPI_ISL_417569, EPI_ISL_417570, EPI_ISL_417571, EPI_ISL_417572, EPI_ISL_417573, EPI_ISL_417574, EPI_ISL_417575, EPI_ISL_417576, EPI_ISL_417577, EPI_ISL_417578, EPI_ISL_417579, EPI_ISL_417580, EPI_ISL_417581, EPI_ISL_417582, EPI_ISL_417583, EPI_ISL_417584, EPI_ISL_417585, EPI_ISL_417586, EPI_ISL_417587, EPI_ISL_417588, EPI_ISL_417589, EPI_ISL_417590, EPI_ISL_417591, EPI_ISL_417592, EPI_ISL_417593, EPI_ISL_417594, EPI_ISL_417595, EPI_ISL_417596, EPI_ISL_417597, EPI_ISL_417598, EPI_ISL_417599, EPI_ISL_417600, EPI_ISL_417601, EPI_ISL_417602, EPI_ISL_417603, EPI_ISL_417604, EPI_ISL_417605, EPI_ISL_417606, EPI_ISL_417607, EPI_ISL_417608, EPI_ISL_417609, EPI_ISL_417610, EPI_ISL_417611, EPI_ISL_417612, EPI_ISL_417613, EPI_ISL_417614, EPI_ISL_417615, EPI_ISL_417616, EPI_ISL_417617, EPI_ISL_417618, EPI_ISL_417619, EPI_ISL_417620, EPI_ISL_417621, EPI_ISL_417622, EPI_ISL_417623, EPI_ISL_417624, EPI_ISL_417625, EPI_ISL_417626, EPI_ISL_417627, EPI_ISL_417628, EPI_ISL_417629, EPI_ISL_417630, EPI_ISL_417631, EPI_ISL_417632, EPI_ISL_417633, EPI_ISL_417634, EPI_ISL_417635, EPI_ISL_417636, EPI_ISL_417637, EPI_ISL_417638, EPI_ISL_417639, EPI_ISL_417640, EPI_ISL_417641, EPI_ISL_417642, EPI_ISL_417643, EPI_ISL_417644, EPI_ISL_417645, EPI_ISL_417646, EPI_ISL_417647, EPI_ISL_417648, EPI_ISL_417649, EPI_ISL_417650, EPI_ISL_417651, EPI_ISL_417652, EPI_ISL_417653, EPI_ISL_417654, EPI_ISL_417666, EPI_ISL_417667, EPI_ISL_417668, EPI_ISL_417669, EPI_ISL_417670, EPI_ISL_417671, EPI_ISL_417672, EPI_ISL_417676, EPI_ISL_417678, EPI_ISL_417680, EPI_ISL_417685, EPI_ISL_417699, EPI_ISL_417700, EPI_ISL_417703, EPI_ISL_417706, EPI_ISL_417709, EPI_ISL_417712, EPI_ISL_417716, EPI_ISL_417717, EPI_ISL_417724, EPI_ISL_417733, EPI_ISL_417737, EPI_ISL_417740, EPI_ISL_417742, EPI_ISL_417743, EPI_ISL_417746, EPI_ISL_417750, EPI_ISL_417752, EPI_ISL_417753, EPI_ISL_417754, EPI_ISL_417762, EPI_ISL_417763, EPI_ISL_417764, EPI_ISL_417766, EPI_ISL_417774, EPI_ISL_417808, EPI_ISL_417809, EPI_ISL_417813, EPI_ISL_417814, EPI_ISL_417815, EPI_ISL_417816, EPI_ISL_417818, EPI_ISL_417819, EPI_ISL_417820, EPI_ISL_417821, EPI_ISL_417822, EPI_ISL_417823, EPI_ISL_417824, EPI_ISL_417825, EPI_ISL_417826, EPI_ISL_417827, EPI_ISL_417829, EPI_ISL_417830, EPI_ISL_417831, EPI_ISL_417832, EPI_ISL_417833, EPI_ISL_417834, EPI_ISL_417835, EPI_ISL_417836, EPI_ISL_417837, EPI_ISL_417838, EPI_ISL_417839, EPI_ISL_417864, EPI_ISL_417917, EPI_ISL_417918, EPI_ISL_417920, EPI_ISL_417925, EPI_ISL_417926, EPI_ISL_417931, EPI_ISL_417932, EPI_ISL_417933, EPI_ISL_417935, EPI_ISL_417936, EPI_ISL_417937, EPI_ISL_417938, EPI_ISL_417939, EPI_ISL_417940, EPI_ISL_417941, EPI_ISL_417942, EPI_ISL_417943, EPI_ISL_417944, EPI_ISL_417945, EPI_ISL_417946, EPI_ISL_417947, EPI_ISL_417948, EPI_ISL_417949, EPI_ISL_417950, EPI_ISL_417951, EPI_ISL_417953, EPI_ISL_417955, EPI_ISL_417958, EPI_ISL_417959, EPI_ISL_417960, EPI_ISL_417962, EPI_ISL_417964, EPI_ISL_417965, EPI_ISL_417966, EPI_ISL_417968, EPI_ISL_417970, EPI_ISL_417971, EPI_ISL_417973, EPI_ISL_417974, EPI_ISL_417976, EPI_ISL_417977, EPI_ISL_417982, EPI_ISL_417983, EPI_ISL_417984, EPI_ISL_417985, EPI_ISL_418009, EPI_ISL_418017, EPI_ISL_418018, EPI_ISL_418019, EPI_ISL_418020, EPI_ISL_418021, EPI_ISL_418022, EPI_ISL_418023, EPI_ISL_418024, EPI_ISL_418025, EPI_ISL_418026, EPI_ISL_418027, EPI_ISL_418029, EPI_ISL_418030, EPI_ISL_418031, EPI_ISL_418032, EPI_ISL_418033, EPI_ISL_418034, EPI_ISL_418037, EPI_ISL_418038, EPI_ISL_418040, EPI_ISL_418046, EPI_ISL_418047, EPI_ISL_418048, EPI_ISL_418050, EPI_ISL_418052, EPI_ISL_418053, EPI_ISL_418054, EPI_ISL_418063, EPI_ISL_418064, EPI_ISL_418067, EPI_ISL_418071, EPI_ISL_418072, EPI_ISL_418073, EPI_ISL_418074, EPI_ISL_418075, EPI_ISL_418076, EPI_ISL_418077, EPI_ISL_418078, EPI_ISL_418079, EPI_ISL_418080, EPI_ISL_418081, EPI_ISL_418082, EPI_ISL_418101, EPI_ISL_418102, EPI_ISL_418103, EPI_ISL_418104, EPI_ISL_418105, EPI_ISL_418126, EPI_ISL_418127, EPI_ISL_418128, EPI_ISL_418129, EPI_ISL_418130, EPI_ISL_418131, EPI_ISL_418132, EPI_ISL_418133, EPI_ISL_418134, EPI_ISL_418135, EPI_ISL_418136, EPI_ISL_418137, EPI_ISL_418138, EPI_ISL_418139, EPI_ISL_418140, EPI_ISL_418148, EPI_ISL_418149, EPI_ISL_418150, EPI_ISL_418151, EPI_ISL_418152, EPI_ISL_418153, EPI_ISL_418154, EPI_ISL_418155, EPI_ISL_418156, EPI_ISL_418157, EPI_ISL_418158, EPI_ISL_418159, EPI_ISL_418160, EPI_ISL_418161, EPI_ISL_418162, EPI_ISL_418163, EPI_ISL_418164, EPI_ISL_418165, EPI_ISL_418183, EPI_ISL_418184, EPI_ISL_418185, EPI_ISL_418186, EPI_ISL_418187, EPI_ISL_418188, EPI_ISL_418189, EPI_ISL_418190, EPI_ISL_418191, EPI_ISL_418192, EPI_ISL_418193, EPI_ISL_418194, EPI_ISL_418195, EPI_ISL_418197, EPI_ISL_418198, EPI_ISL_418199, EPI_ISL_418200, EPI_ISL_418201, EPI_ISL_418202, EPI_ISL_418203, EPI_ISL_418204, EPI_ISL_418231, EPI_ISL_418232, EPI_ISL_418233, EPI_ISL_418235, EPI_ISL_418236, EPI_ISL_418237, EPI_ISL_418238, EPI_ISL_418239, EPI_ISL_418240, EPI_ISL_418257, EPI_ISL_418260, EPI_ISL_418263, EPI_ISL_418264 or EPI_ISL_418265 or EPI_ISL_616802 (hCoV-19/Denmark/DCGC-3024/2020).

[0108] Exemplary SARS-CoV-2 coronaviruses can also be defined or identified by genetic information provided by GenBank Accession Numbers as provided in List B below.

[0109] List B: GenBank Accession Numbers of Different SARS-CoV-2 Isolates:
[0110] NC_045512, LC528232, LC528233, LC529905, MN908947, MN938384, MN938385, MN938386, MN938387, MN938388, MN938389, MN938390, MN970003, MN970004, MN975262, MN975263, MN975264, MN975265, MN975266, MN975267, MN975268, MN985325, MN988668, MN988669, MN994467, MN994468, MN996527, MN996528, MN996529, MN996530, MN996531, MN997409, MT007544, MT012098, MT019529, MT019530, MT019531, MT019532, MT019533, MT020880, MT020881, MT027062, MT027063, MT027064, MT039873, MT039887, MT039888, MT039890, MT044257, MT044258, MT049951, MT050493, MT066156, MT066175, MT066176, MT072688, MT093571, MT093631, MT106052, MT106053, MT106054, MT118835, MT121215, MT123290, MT123291, MT123292, MT123293, MT126808, MT135041, MT135042, MT135043, MT135044, MT152824, MT159705, MT159706, MT159707, MT159708, MT159709, MT159710, MT159711, MT159712, MT159713, MT159714, MT159715, MT159716, MT159717, MT159718, MT159719, MT159720, MT159721, MT159722, MT163716, MT163717, MT163718, MT163719, MT163720, MT163721, MT184907, MT184908, MT184909, MT184910, MT184911, MT184912, MT184913, MT188339, MT188340, MT188341, MT192759, MT192765, MT192772 or MT192773.

[0111] SARS-CoV-2 coronavirus has been attributed the NCBI Taxonomy ID (NCBR:txid or taxID): 2697049.

[0112] In preferred embodiments, the at least one SARS-CoV-2 is a SARS-Cov-2 SARS-CoV-2 isolate, SARS-CoV-2 variant or a SARS-CoV-2 variant strain or a SARS-CoV-2 lineage. In particularly preferred embodiments, the SARS-CoV-2 variant is selected from or is derived from the following SARS-CoV-2 lineages: B.1.351 (South Africa), B.1.1.7 (UK), P.1 (Brazil), B.1.429 (California), B.1.525 (Nigeria), B.1.258 (Czech republic), B.1.526 (New York), A.23.1 (Uganda), B.1.617.1 (India), B.1.617.2 (India), 8.1.617.3 (India), P.2 (Brazil), C37.1 (Peru).

[0113] In a preferred embodiments, the at least one Coronavirus, or the at least one pandemic Coronavirus, is a Betacoronavirus, preferably a Merbecovirus. In the context of the invention, a preferred Merbecovirus may be selected from a MERS-associated coronavirus. Preferred MERS-associated Coronaviruses can be selected from MERS-CoV.

[0114] MERS-CoV belongs to the Coronaviridae, in particular to Orthocoronaviruses, more specifically to the genus Betacoronavirus. MERS-CoV (Middle East respiratory syndrome coronavirus, MERS-Coronavirus, EMC/2012 (HCoV-EMC/2012)) causes a severe respiratory syndrome disease. An exemplary MERS-CoV coronaviruses is identifiable by NCBI Taxonomy: 1335626, NCBI Reference: NC_038294.1. Suitable MERS-CoV strains/isolates may be selected from MERS-CoV/MERS-CoV-Jeddah-human-1, MERS-CoV/AI-Hasa_4_2013, MERS-CoV/Riyadh_14_2013, MERS-CoV/Riyadh_14_2013, MERS-CoV/Riyadh_14_2013 spike protein, MERS-CoV/England 1 spike protein, MERS-CoV/England 1 spike protein (variant).

[0115] In the context of the invention, any protein, preferably any membrane protein (M), nucleocapsid protein (N), non-structural protein (NSP), accessory protein, envelope protein (E), or Spike protein (S), or an immunogenic fragment or immunogenic variant thereof selected or derived from a Coronavirus, preferably a pandemic Coronavirus, may be used in the context of the invention and may be suitably encoded by the coding sequence or the nucleic acid.

[0116] It is further in the scope of the underlying invention, that the at least one antigenic peptide or protein may comprise or consist of a synthetically engineered or an artificial Coronavirus peptide or protein. The term “synthetically engineered” Coronavirus peptide or protein, or the term “artificial Coronavirus peptide or protein” relates to a protein that does not occur in nature. Accordingly, an “artificial Coronavirus peptide or protein” or a “synthetically engineered Coronavirus peptide or protein” may for example differ in at least one amino acid compared to the naturally existing Coronavirus peptide or protein, and/or may comprise an additional peptide or protein element (e.g. a heterologous element), and/or may be N-terminally or C-terminally extended or truncated.

[0117] According to various preferred embodiments, the nucleic acid of encodes at least one antigenic peptide or protein from Coronavirus as defined herein, preferably of a pandemic Coronavirus, and, additionally, at least one heterologous peptide or protein element.

[0118] Suitably, the at least one heterologous peptide or protein element may promote or improve secretion of the encoded Coronavirus antigenic peptide or protein (e.g. via secretory signal sequences), promote or improve anchoring of the encoded antigenic peptide or protein of the invention in the plasma membrane (e.g. via transmembrane elements), promote or improve formation of antigen complexes (e.g. via multimerization domains or antigen clustering elements), or promote or improve virus-like particle formation (VLP forming sequence). In addition, the nucleic acid of additionally encode peptide linker elements, self-cleaving peptides, immunologic adjuvant sequences or dendritic cell targeting sequences.

[0119] Suitable multimerization domains may be selected from the list of amino acid sequences according to SEQ ID NOs: 1116-1167 of WO2017081082, or fragments or variants of these sequences. Suitable transmembrane elements may be selected from the list of amino acid sequences according to SEQ ID NOs: 1228-1343 of WO2017081082, or fragments or variants of these sequences. Suitable VLP forming sequences may be selected from the list of amino acid sequences according to SEQ ID NOs: 1168-1227 of the patent application WO2017081082, or fragments or variants of these sequences. Suitable peptide linkers may be selected from the list of amino acid sequences according to SEQ ID NOs: 1509-1565 of the patent application WO2017081082, or fragments or variants of these sequences. Suitable self-cleaving peptides may be selected from the list of amino acid sequences according to SEQ ID NOs: 1434-1508 of the patent application WO2017081082, or fragments or variants of these sequences. Suitable immunologic adjuvant sequences may be selected from the list of amino acid sequences according to SEQ ID NOs: 1360-1421 of the patent application WO2017081082, or fragments or variants of these sequences. Suitable dendritic cell (DCs) targeting sequences may be selected from the list of amino acid sequences according to SEQ ID NOs: 1344-1359 of the patent application WO2017081082, or fragments or variants of these sequences. Suitable secretory signal peptides may be selected from the list of amino acid sequences according to SEQ ID NOs: 1-1115 and SEQ ID NO: 1728 of published PCT patent application WO2017081082, or fragments or variants of these sequences

[0120] In preferred embodiments, the at least one coding sequence additionally encodes one or more heterologous peptide or protein elements selected from a signal peptide, a linker peptide, a helper epitope, an antigen clustering element, a trimerization or multimerization element, a transmembrane element, or a VLP forming sequence.

[0121] Nucleic Acid Encoding a Coronavirus M, N, NSP, Accessory Protein, and/or E

[0122] In preferred embodiments, the pharmaceutical composition comprises at least one nucleic acid comprising at least one coding sequence encoding at least one antigenic peptide or protein selected or derived from a Coronavirus, wherein the at least one antigenic peptide or protein is selected or derived from membrane protein (M), nucleocapsid protein (N), non-structural protein (NSP), accessory protein, and/or envelope protein (E), or an immunogenic fragment or immunogenic variant thereof.

[0123] Membrane protein M: The Coronavirus membrane (M) protein (ORF5 protein) is an integral membrane protein that plays an important role in viral assembly. In addition, the Coronavirus M protein has been shown to induce apoptosis. The M protein interacts with the nucleocapsid (N) protein to encapsulate the RNA genome. Exemplary Coronavirus membrane (M) proteins are e.g. SARS-CoV-1 M protein (NP_828855.1) and SARS-CoV-2 M protein (BCA87364.1 or YP_009724393.1, encoded by SARS-CoV-2 (NC_045512.2/MN908947.2/EPI_ISL_402128) according to reference SEQ ID NO:15235).

[0124] Nucleocapsid protein (N): The Coronavirus nucleocapsid (N) protein (ORF 9/9a protein) of coronaviruses is a structural protein that binds directly to viral RNA and providing stability. Furthermore, the Coronavirus nucleocapsid (N) has been found to antagonize antiviral RNAi. Exemplary Coronavirus nucleocapsid (N) proteins are e.g. SARS-CoV-1 N protein (ORF9a, NP_828858.1) and SARS-CoV-2 N protein (ORF9, BCA87368.1 or YP_009724397.2, expressed by SARS-CoV-2 (NC_045512.2/MN908947.2/EPI_ISL_402128) according to reference SEQ ID NO: 15310).

[0125] Non structural proteins (NSP): The first gene (ORF1) of Coronavirus expresses a polyprotein that is typically composed of 16 non-structural proteins (NSP) (NSPs). NSP1 (exemplary accession No of SARS-CoV-2: YP_009725297.1) is a protein (typically about 180 aa) that induces host mRNA (leader protein) cleavage. NSP2 (exemplary accession No of SARS-CoV-2: YP_009725298.1) is a protein (typically about 638 aa) that induces host mRNA (leader protein) cleavage. NSP3 (exemplary accession No of SARS-CoV-2: YP_009725299.1) is a protein (typically about 1945 aa) that has a Papain like proteinase function. NSP4 (exemplary accession No of SARS-CoV-2: YP_009725300.1) is a protein (typically about 500 aa) that is involved in Membrane rearrangement. NSP5 (exemplary accession No of SARS-CoV-2: YP_009725301.1) is a protein (typically about 306 aa) that cleaves at 11 sites of (3C-like proteinase) NSP polyprotein. NSP6 (exemplary accession No of SARS-CoV-2: YP_009725302.1) is a protein (typically about 290 aa) that generates autophagosomes. NSP7 (exemplary accession No of SARS-CoV-2: YP_009725303.1) is a protein (typically about 83 aa) that dimerizes with NSP8. NSP8 (exemplary accession No of SARS-CoV-2: YP_009725304.1) is a protein (typically about 198 aa) that stimulates the function of NSP12. NSP9 (exemplary accession No of SARS-CoV-2: YP_009725305.1) is a protein (typically about 113 aa) that binds to a helicase. NSP10 (exemplary accession No of SARS-CoV-2: YP_009725306.1) is a protein (typically about 139 aa) that stimulates the function of NSP16. NSP11 (exemplary accession No of SARS-CoV-2: YP_009725312.1) is a protein (typically about 13 aa) with unknown biological function. NSP12 (exemplary accession No of SARS-CoV-2: YP_009725307.1) is a protein (typically about 932 aa) that copies viral RNA (RNA polymerase) methylation (guanine). NSP13 (exemplary accession No of SARS-CoV-2: YP_009725308.1) is a protein (typically about 601 aa) that unwinds duplex RNA (Helicase). NSP14 (exemplary accession No of SARS-CoV-2: YP_009725309.1) is a protein (typically about 527 aa) that has a 5′-cap RNA (3′ to 5′ exonuclease, guanine N7-methyltransferase) activity. NSP15 (exemplary accession No of SARS-CoV-2: YP_009725310.1) is a protein (typically about 346 aa) that degrade RNA to (endoRNAse/endoribonuclease) to evade host defence. NSP16 (exemplary accession No of SARS-CoV-2: YP_009725311.1) is a protein (typically about 298 aa) that has a 5′-cap RNA (2-O-ribose-methyltransferase) methylation (adenine) function.

[0126] NSP3: Coronavirus NSP3 protein is a papain-like proteinase protein that possesses several conserved domains: ssRNA binding, ADPr binding, G-quadruplex binding, ssRNA binding, protease (papain-like protease), and NSP4 binding), and transmembrane domain. The papain like protease domain of NSP3 is responsible for the release of NSP1, NSP2, and NSP3 from the N-terminal region of polyproteins 1a and lab from Coronaviruses. Exemplary Coronavirus NSP3 proteins are e.g. SARS-CoV-1 NSP3 protein (NP_828862.2) and SARS-CoV-2 NSP3 protein (YP_009725299.1, encoded by SARS-CoV-2 (NC_045512.2/MN908947.2/EPI_ISL_402128) according to reference SEQ ID NO: 15733).

[0127] NSP4: Coronavirus NSP4 protein interacts with e.g. NSP3 and possibly host proteins to confer a role related to membrane rearrangement in Coronaviruses. Moreover, the interaction between NSP4 and NSP3 is essential for viral replication. Typically, NSP4 has a transmembrane domain. Exemplary Coronavirus NSP4 proteins are e.g. SARS-CoV-1 NSP4 protein (NP_904322.1) and SARS-CoV-2 NSP4 protein (YP_009725300.1, encoded by SARS-CoV-2 (NC_045512.2/MN908947.2/EPI_ISL_402128) according to reference SEQ ID NO: 16415).

[0128] NSP6: Coronavirus NSP6 protein is involved in autophagosome formation from the endoplasmic reticulum (ER). Autophagosomes facilitate assembly of replicase proteins. Furthermore, Coronavirus NSP6 may play a role in inducing membrane vesicles. Typically, NSP6 has a transmembrane domain. Exemplary Coronavirus NSP6 proteins are e.g. SARS-CoV-1 NSP6 protein (NP_828864.1) and SARS-CoV-2 NSP6 protein (YP_009725302.1, encoded by SARS-CoV-2 (NC_045512.2/MN908947.2/EPI_ISL_402128) according to reference SEQ ID NO: 16582).

[0129] NSP13: Coronavirus NSP13 protein is a multifunctional superfamily 1 helicase capable of using both dsDNA and dsRNA as substrates, in addition to working with NSP12 in viral genome replication, it is also involved in viral mRNA capping, it associates with nucleoprotein in membranous complexes. Exemplary Coronavirus NSP13 proteins are e.g. SARS-CoV-1 NSP13 protein (NP_828870.1) and SARS-CoV-2 NSP13 protein (YP_009725308.1, encoded by SARS-CoV-2 (NC_045512.2/MN908947.2/EPI_ISL_402128) according to reference SEQ ID NO: 27908).

[0130] NSP14: Coronavirus NSP14 protein has both 3′-5′ exoribonuclease (proofreading during RNA replication) and N7-guanine methyltransferase (viral mRNA capping) activities. Exemplary Coronavirus NSP13 proteins are e.g. SARS-CoV-1 NSP14 protein (NP_828871.1) and SARS-CoV-2 NSP14 protein (YP_009725309.1, encoded by SARS-CoV-2 (NC_045512.2/MN908947.2/EPI_ISL_402128) according to reference SEQ ID NO: 27909). Accessory proteins: Coronavirus accessory proteins can be selected from ORF3a, ORF3b, ORF6, ORF7a, ORF7b, ORF8, ORF8a, ORF8b, ORF9b, and/or ORF10. Coronavirus ORF3a (exemplary accession No of SARS-CoV-2: BCA87362.1) is a protein (typically about 275 aa) that is an ion channel protein. Coronavirus ORF3b (exemplary accession No of SARS-CoV-1: NP_828853.1) is a protein with as yet undescribed function. Coronavirus ORF6 (exemplary accession No of SARS-CoV-1: NP_828856.1; accession No of SARS-CoV-2: BCA87365.1) is a protein (typically about 63 aa) that plays a role in Coronavirus pathogenesis. Coronavirus ORF7a (exemplary accession No of SARS-CoV-1: NP_828857.1; accession No of SARS-CoV-2: BCA87366.1) is a type I transmembrane protein (typically about 122 aa). Coronavirus ORF7b (exemplary accession No of SARS-CoV-1: NP_849175.1; accession No of SARS-CoV-2: BCB15096.1) is a protein (typically about 44 aa) localized in the Golgi compartment. Coronavirus ORF8 (exemplary accession No of SARS-CoV-2: QJA17759.1) is a protein (typically about 121 aa) that is involved in interferon signalling. Coronavirus ORF8a (exemplary accession No of SARS-CoV-1: NP_849176.1) is a protein (typically about 39 aa) with unknown function.

[0131] Coronavirus ORF8b (exemplary accession No of SARS-CoV-1: NP_849177.1) is a protein (typically about 121 aa) that is involved in interferon signalling. Coronavirus ORF9b (exemplary accession No of SARS-CoV-1: NP_828859.1) is a protein (typically about 98 aa) with unknown function. Coronavirus ORF10 (exemplary accession No of SARS-CoV-2: BCA87369.1) is a protein (typically about 38 aa) with unknown function.

[0132] ORF3a accessory protein: Coronavirus ORF3a protein is an ion channel related to NLRP3 inflammasome activation. ORF3a interacts with TRAF3, which in turn activates ASC ubiquitination, and as a result, leads to activation of caspase 1 and IL-1R maturation. Exemplary Coronavirus ORF3a proteins are e.g. SARS-CoV-1 ORF3a protein (NP_828852.2) and SARS-CoV-2 ORF3a protein (BCA87362.1 or YP_009724391.1, encoded by SARS-CoV-2 (NC_045512.2/MN908947.2/EPI_ISL_402128) according to reference SEQ ID NO: 16684).

[0133] ORF8 accessory protein: Coronavirus ORF8 protein binds to the IRF association domain (IAD) region of interferon regulatory factor 3 (IRF3), which in turn inactivates interferon signalling. Some Coronaviruses have a single ORF8 protein while others have two ORF8 proteins (ORF8a and ORE8b). The term “Coronavirus ORF8” encompasses all Coronavirus ORF8 proteins including ORF8a proteins and ORF8b proteins. Exemplary Coronavirus ORF8 proteins are e.g. SARS-CoV-1 ORF8a (NP_849176.1) and ORF8b (NP_849177.1) and SARS-CoV-2 ORF8 protein (QJA17759.1 or YP_009724396.1, encoded by SARS-CoV-2 (NC_045512.2/MN908947.2/EPI_ISL_402128) according to reference SEQ ID NO: 16997).

[0134] Envelope protein (E): Coronavirus E envelope protein is a small integral membrane protein in coronaviruses, which can oligomerize and create an ion channel. Exemplary Coronavirus envelope (E) protein are e.g. SARS-CoV-1 E protein (NP_828854.1) and SARS-CoV-2 E protein (BCA87363.1 or YP_009724392.1, encoded by SARS-CoV-2 (NC_045512.2/MN908947.2/EPI_ISL_402128) according to reference SEQ ID NO: 15689).

[0135] In embodiments, the membrane protein (M), nucleocapsid protein (N), non-structural protein (NSP), accessory protein, and/or envelope protein (E), or an immunogenic fragment or immunogenic variant thereof, is selected or derived from a SARS-associated virus. In preferred embodiments, the membrane protein (M), nucleocapsid protein (N), non-structural protein (NSP), accessory protein, and/or envelope protein (E), or an immunogenic fragment or immunogenic variant thereof, is selected or derived from SARS-CoV-1 or SARS-CoV2, most preferably SARS-CoV2.

[0136] In further preferred embodiments, the membrane protein (M), nucleocapsid protein (N), non-structural protein (NSP), accessory protein, and/or envelope protein (E), or an immunogenic fragment or immunogenic variant thereof, is selected or derived from a SARS-CoV-2 variant.

[0137] Variant Membrane protein (M): The SARS-CoV-2 membrane (M) protein comprises at least one of the following amino acid variations (amino acid positions according to reference according to reference SEQ ID NO:15235): A2S; A2T; A2V; D3G; V10A; L17F; L17I; V23L; F28L; L29F; L34F; R44K; I48V; I52T; A63T; A63S; A69S; V70L; V70F; I76V; A81S; I82T; I82S; A85S; C86F; L87F; G89S; A98S; A104V; M109I; N121K; H125Y; L138I; H148Y; H155Y; R158L; K162N; T175M; K180R; S197N; I201V; or D209Y. In preferred embodiments the SARS-CoV-2 membrane (M) protein comprises the following amino acid variations (amino acid positions according to reference according to reference SEQ ID NO:15235): I82T; A2S_F28L_V70L; A2T_I201V; N121K_H125Y_H148Y_H155Y_K162N; A63T_H125Y; A2S_M109I_H125Y; A2V_M109I_H125Y: L17F_M109I; F28L; H125Y: A2T A104V_H125Y_H155Y R158L: R44K L138I_H155Y; I82S; A2V_L17F_H125Y_D209Y; D3G; D3G_I82T; L17I; F28L_V70F_T175M; F28L_I82T; I48V; I52T_L87F_H125Y_H155Y; A63S_V70L_A98S; V70F; or A85S_H125Y_D209Y; or C86F_A104V.

[0138] Variant Nucleocapsid protein (N): The SARS-CoV-2 nucleocapsid (N) protein comprises at least one of the following amino acid variations (amino acid positions according to reference according to reference SEQ ID NO: 15310): S2Y; D3L; D3del; P6L; Q9H; A12G; P13L; P13S; P13T; D63G; P67S; P80R; A90T; A119S; T135I; L139F; P151L; I157V; S187L; S194L; P199L; S201I; S202N; S202R; R203K; R203M; R203G; G204R; G204P; T205I; A208G; R209del; G212V; G214C; G215C; A220V; T325I; S327L; M234I; S235F; T325I; T362I; P365S; T366I; D371Y; A376T; D377Y; E378Q; R385K; T391I; A398V; D401Y; or Q418H.

[0139] In preferred embodiments the SARS-CoV-2 nucleocapsid (N) protein comprises the following amino acid variations (amino acid positions according to reference according to reference SEQ ID NO: 15310): D3L_R203K_G204R_S235F; T205I; P80R; P80R_R203K_G204R; D63G_R203M_G215C_D377Y; D63G_R203M_D377Y; T205I_T362I; S2Y_D3del_A12G_T205I; P13L_R203K_G204R_G214C; P67S_R203M_D377Y; I157V_R203K_G204R; A119S_R203K_G204R_M234I; R203K_G204R; R203K_G204R_G212V; R203K_G204R_A208G_R209del; R203M_D377Y; T205I_M234I; M234I; A12G_T205I; P13L_P199L_S202R_T205I_M234I; P13L_R203K_G204R_G214C_T366I; R203K_G204R_A208G_R209del_M234I; D3L_T205I; P13L_S201I_T205I; S187L_R203K_G204R_Q418H; S202N; R203M; R203G; T325I; D3L_P199L_R203K_G204R_T205I_S235F; P6L_M234I_D401Y; P67S_P199L_D377Y; P67S_P199L_E378Q; A90T_R203K_G204R_M234I; P151L_R203K_G204R; S194L; S194L_T205I_M234I; S194L_D371Y_T391I; P199L; R203K_G204R_A398V; A220V; A220V_P365S; or M234I_A376T_R385K.

[0140] Variant non-structural protein 3 (NSP3): The SARS-CoV-2 non-structural protein 3 (NSP3) comprises at least one of the following amino acid variations (amino acid positions according to reference according to reference SEQ ID NO: 15733): A42V; A86V; E96D; S127L; D136N; P142S; P154L; T184I; L199F; D219E; T238A; H296Y; G308C; D310Y; A329T; H343Y; S371L; E379V; T429I; K430N; I442V; V474F; A489S; N507S; S544P; I581V; A656V; T721I; D737G; T750I; S795L; D808E; T820I; T821I; D822N; P823L; K838N; A862S; A891D; K928I; K978Q; A995D; I1022V; T1064I; K1078R; G1129S; V1174I; T1190I; L1222F; P1229L; K1242R; H1275Y; A1280V; G1301D; A1306V; T1307I; N1330D; T1364I; I1413T; M1442I; S1444Y; P1470S; A1527V; A1528V; F1570V; N1588S; S1589L; I1684T; K1694N; N1706T; A1712V; A1737V; K1772R; N1779S; V1787A; M1789I; E1790K; S1808F; T1831I; E1847D; or Q1885H.

[0141] In preferred embodiments the SARS-CoV-2 non-structural protein 3 (NSP3) protein comprises the following amino acid variations (amino acid positions according to reference according to reference SEQ ID NO: 15733): T184I_A891D_I1413T; A329T_P823L; S371L_K978Q; A489S_P1229L_P1470S; K838N; K838N_P1229L_N1779S; K838N_N1779S; A489S_P1229L_P1470S_A1712V; S795L_K838N; A42V_T429I_D822N_P1470S; T238A_T721I_N1330D; H343Y_P823L_K928I_N1588S; E379V_K1694N; T429I_P1470S_F1570V; D737G_S1808F; T750I; T1190I; A1527V_T1831I; A86V_A656V_I1022V_E1847D; D136N_E379V_K1694N; A862S_G1129S; T1190I_K1772R; P142S; D310Y_A489S_P1229L_P1470S; N507S_T821I_S1444Y; I581V_T1064I; A995D; V1174I; A1306V_E1790K; I1684T; S1808F; A489S_P823L_P1229L_P1470S_A1712V; T820I_I1684T; D219E_Q1885H; L199F_K1078R_A1280V; H296Y_I442V; K430N; S544P_V1787A; D808E_G1301 D_N1706T; L1222F_T1307I_Q1885H; K1242R; T1364I_A1737V; S1589L; or M1789I.

[0142] Variant non-structural protein 4 (NSP4): The SARS-CoV-2 non-structural protein 4 (NSP4) comprises at least one of the following amino acid variations (amino acid positions according to reference according to reference SEQ ID NO: 16415): N6S; F18L; I24T; M34L; T115I; S138L; S164F; V168L; T174I; G179S; S185N; T190I; Y206H; D218N; D218G; S219F; S239N; D260N; L265F; D280N; T296I; F309Y; M325V; M325I; I346S; L354F; T355A; A381V; S396T; Y398H; K400E; R4n1S; L439P; L439F; T440M; Y442H; A447V; L448F; M459I; D460N; A473S; S482L; or T493I.

[0143] In preferred embodiments the SARS-CoV-2 non-structural protein 4 (NSP4) protein comprises the following amino acid variations (amino acid positions according to reference according to reference SEQ ID NO: 16415): V168L_T493I; F18L; 124T_G179S_S185N_A447V; V168L_A447V_T493I; Y206H_L265F_T296I_A473S; T174I_A447V; T190I_T493I; D218N_L439P: D218N_D460N; S396T; L439P; A447V; L439P_T493I; T115I_S396T; K400E_L439P_A447V; L448F; Y398H; T493I; D218G_M325V_A381V_L439F; N6S_S138L_S219F_L439P; S164F_I346S_L354F_S482L; V168L_M325I_L439P_A447V_T493I; T190I_D260N_T440M_T493I; D218G_Y442H: S219F_D280N_T493I; M34L; S239N; F309Y; F309Y_T493I; M325I; T355A_A381V_R401S; A381V; K400E_L439P_A447V_T493I; or M459I. Variant non-structural protein 6 (NSP6): The SARS-CoV-2 non-structural protein 6 (NSP6) comprises at least one of the following amino acid variations (amino acid positions according to reference according to reference SEQ ID NO: 16582): V27G; L38F; M48I; I50V; A55S; P78L; T78A; V85F; M87I; L99F; L106C; S107del; G108del; G108S; F109del; F109L; L126F; L143F; M144I; V150A; V150F; Q161R; I163V; S164A; M165T; V180I; T182I; M184I; L186F; E196D; Q209R; F221L; C222F; L261F; K271R; or V279I.

[0144] In preferred embodiments the SARS-CoV-2 non-structural protein 6 (NSP6) protein comprises the following amino acid variations (amino acid positions according to reference according to reference SEQ ID NO: 16582): T78A_V150A_I163V_T182I; S107del_G108del_F109del; S107del_G108del_F109del_M165T; V27G_L38F_F221L_C222F; L38F_L126F; S107del_G108del_F109del_L126F; S107del_G108del_F109del_V279I; L38F_S164A_E196D; I50V; T78A; T78A_V150A_T182I; M87I_L99F_M184I_L186F; S107del_G108del_F109del_M184I; L38F_I50V_S107del_G108del_F109del; L38F_A55S_L143F; L38F_T78A_T182I; L38F_V85F_S107del_G108del_F109del; L38F_V150F; M48I_Q161R; M87I_M144I; L106C_S107del_G108del; Q209R; or K271R.

[0145] Variant non-structural protein 13 (NSP13): The SARS-CoV-2 non-structural protein 13 (NSP13) comprises at least one of the following amino acid variations (amino acid positions according to reference according to reference SEQ ID NO: 27908): P48S; P54L; S75L; P78L; P79S; Q89H; V99F; D106Y; T128I; H165Y; V170F; K172R; P173H; V188L; I196T; G207C; K219R; M234I; T251I; D261Y; E262D; H291Y; A297S; L298F; E342D; T352I; P420S; M430I; T432I; G440R; R443Q; A447S; K461R; T482M; P492S; P505L; P530L; Y542C; M577I; R580G; L582F; T589I; R596K; or A599S. In preferred embodiments the SARS-CoV-2 non-structural protein 13 (NSP13) protein comprises the following amino acid variations (amino acid positions according to reference according to reference SEQ ID NO: 27908): P78L; P79S_K461R; E342D; T589I; P54L_D261Y; Q89H_H165Y; D106Y_P530L; P173H_E262D_P420S_P492S; D261Y; P54L_H291Y_A599S; G207C_M430I; H291Y_A599S; G440R_M577I; R580G_R596K; P48S_P78L; S75L_V170F_L298F_T352I_L582F; P78L_D261Y_K461R; V99F_M234I_T432I; T128I_G440R_K461R_T482M; K172R_T482M; V188L; I196T_T251I_R443Q; K219R; K219R_E262D_A447S; E262D; or A297S.

[0146] Variant non-structural protein 14 (NSP14): The SARS-CoV-2 non-structural protein 14 (NSP14) comprises at least one of the following amino acid variations (amino acid positions according to reference according to reference SEQ ID NO: 27909): T17I; T22A; T32I; P44L; P44S; P47L; M50I; G60S; M73I; A97V; N117D; N130D; S138I; P141L; P143S; D145E; D145G; I151T; P204L; F218Y; S219A; T251I; S256I; A275S; K305N; M316I; A321V; D325E; P328Q; D346Y; E348G; A354V; Q355H; A361V; A372T; V382L; A395V; P413H; P413S; A431T; N439S; P444S; P452S; E454D; H456Y; H487Y; or M502I.

[0147] In preferred embodiments the SARS-CoV-2 non-structural protein 14 (NSP14) protein comprises the following amino acid variations (amino acid positions according to reference according to reference SEQ ID NO: 27909): T32I_P143S_P444S; P204L_F218Y_P328Q; E348G_P452S; A395V; D145E_A275S; D145G_Q355H; S256I_A361V_A372T: T22A_M316I_A372T-P47L_E454D; M50I_D346Y_H487Y: G60S_P141L; M73I; P413H; T17I; T32I_N130D: P44L; P44L_P413H_N439S; P44S_D325E; A97V_A431T; N117D_S256I_K305N_P413S; N130D; N130D_A321V; N130D_A395V; S138I_S219A_H456Y; I151T; T251I; A354V_M502I; V382L; or M502I.

[0148] Variant ORF3a accessory protein: The SARS-CoV-2 ORF3a protein comprises at least one of the following amino acid variations (amino acid positions according to reference according to reference SEQ ID NO: 16684): L15F; E19del; I20del; K21del; D22del; A23del; T24del; P25del; S26L; S26del; D27del; F28del; Q38L; Q38R; P42L; A54V; Q57H; W69L; A72S; H78Y; L83F; L95F; G100C; A103T; P104L; A110S; R122I; W131C; W131L; T151I; D155Y; S165F; S166L; S171L; G172C; G172V; G172R; D173G; Q185H; V202L; T223I; G224C; P240S; S253P; N257del; or V259L.

[0149] In preferred embodiments the SARS-CoV-2 ORF3a protein comprises the following amino acid variations (amino acid positions according to reference according to reference SEQ ID NO: 16684): Q57H_S171L; D155Y_S253P; S253P; L15F_W131C_T151I; P42L_Q57H; Q57H_N257del; N257del; P42L_Q57H_P104L; S26L; Q57H; Q57H_N257del_V259L; E19del_l20del_K21del_D22del_A23del_T24del_P25del_S26del_D27del_F28del_G172C; Q38L_A54V_W69L_A103T_T151I_G172C A72S_H78Y_S171L; Q185H; S26L_Q57H_G172V; Q38R_G172R_V202L; Q57H_L83F_S171L; Q57H_L95F; Q57H_G172V; Q57H_T223I; Q57H_G224C; A110S; R122I; T223I; W131L_T151I_S165F; S166L; or D173G.

[0150] Variant ORF8 accessory protein: The SARS-CoV-2 ORF8 protein comprises at least one of the following amino acid variations (amino acid positions according to reference according to reference SEQ ID NO: 16997): K2Q; F3Y; L4P; I10T; T11I; T11K; H17Y; S24L; C25F; T26I; P30L; V32L; P38S; H40Y; K44R; W45L; A51S; R52I; S54L; C61F; V62L; A65V; A65S; S67F; S69L; Y73C; Y79F; L84S; T87S; F86del; E92K; V100L; L118V; D119I; F120V; F120S; F120L; F120del; I121L; I121V; I121del; Q27stop; E64stop; K68stop; or E106stop.

[0151] In preferred embodiments the SARS-CoV-2 ORF8 protein comprises the following amino acid variations (amino acid positions according to reference according to reference SEQ ID NO: 16997): R52I_Y73C; E92K; D119I_F120del_I121del; K44R_F120V_I121L; K2Q; T11I; T11K_P38S_S67F; T26I; F3Y; T11I_A51S; V32L_V100L; A65V; L84S_E92K; L4P_A65V; I10T_S69L; C25F; R52I_F120S_I121V; A65S_S67F_F86del_T87S_F120L; T11I_S24L; H17Y_W45L_A65S; S24L; S24L_S54L; P30L_H40Y; V32L; R52I_V62L_Y73C V62L_L84S_E92K; S67F_Y79F; or L84S.

[0152] Variant envelope protein (E): The SARS-CoV-2 E envelope protein comprises at least one of the following amino acid variations (amino acid positions according to reference according to reference SEQ ID NO: 15689): V5I; T9I; F20L; L21F; L21V; F23L; V24A; T30I; A32V; C43F; I46V; V49L; S55F; V58F; V58I; V62F; N64T; S68A; S68F; S68C; R69G; R69I; V70F; P71L; P71S; D72Y; D72G; L73F; L73J; or L73I.

[0153] In preferred embodiments the SARS-CoV-2 E envelope protein comprises the following amino acid variations (amino acid positions according to reference according to reference SEQ ID NO: 15689): P71L; T9I_C43F_V49L_V58F_V62F_L73F; T9I_V58F_V62F_S68F_L73F; T9I_V58F_S68A_R69G_P71S; L21F; T9I_L21F_S55F_V58F_S68F_L73F; T9I_S55F_V58F_S68F_P71L_D72Y_L73F; T9I_S55F_V58F_S68F_D72Y_L73F; F20L_T30I; T9I_L21V_T30I_S68F_V70F; T9I_L21F_V49L_N64T_S68F_P71S_L73F; V24A_S68F_L73F; V58F_V62F_L73J; L21F_S68F_P71L_L73F; L21V; L21V_P71L; L73F; P71S; T30I_V62F_S68F_P71L_L73F; T9I; T9I_F23L_T30I_A32V_S55F_V58F_V62F_S68F; T9I_L21F_V62F_S68F_R69I_P71L_L73F; V49L_S68F_D72G_L73F; V58F; V58I_S68C_L73F; V5I_I46V_S55F_V62F_S68F_L73F; or V62F_S68F_L73I_L73F.

[0154] In the context of the invention, any protein that is selected from or is derived from SARS-CoV-2 comprising at least one amino acid substitution selected from a SARS-CoV-2 variant may be used and may be suitably encoded by the coding sequence or the nucleic acid may be used in the context of the invention. It is further in the scope of the underlying invention, that the at least one antigenic peptide or protein may comprise or consist of a synthetically engineered or an artificial SARS-CoV-2 protein. The term “synthetically engineered” SARS-CoV-2 protein, or the term “artificial SARS-CoV-2 protein” relates to a protein that does not occur in nature. Accordingly, an “artificial SARS-CoV-2 protein” or a “synthetically engineered SARS-CoV-2 protein” may for example differ in at least one amino acid compared to the natural SARS-CoV-2 protein, and/or may comprise an additional heterologous peptide or protein element, and/or may be N-terminally or C-terminally extended or truncated.

[0155] In embodiments, the membrane protein (M), nucleocapsid protein (N), non-structural protein (NSP), accessory protein, and/or envelope protein (E), or an immunogenic fragment or immunogenic variant thereof, is selected or derived from a MERS-associated virus. In preferred embodiments, the membrane protein (M), nucleocapsid protein (N), non-structural protein (NSP), accessory protein, and/or envelope protein (E), or an immunogenic fragment or immunogenic variant thereof, is selected or derived from a MERS-CoV.

[0156] In embodiments, the encoded at least one antigenic peptide or protein comprises a membrane protein (M) fragment, nucleocapsid protein (N) fragment, non-structural protein (NSP) fragment, accessory protein fragment, and/or envelope protein (E) fragment, e.g. a fragment that lacks at least 20%, 30%, 40% of the membrane protein (M), nucleocapsid protein (N), non-structural protein (NSP), accessory protein, and/or envelope protein (E).

[0157] In embodiments, the encoded at least one antigenic peptide or protein comprises a Coronavirus membrane protein (M) fragment, nucleocapsid protein (N) fragment, non-structural protein (NSP) fragment, accessory protein fragment, and/or envelope protein (E) fragment is N-terminally or C-terminally truncated.

[0158] In particularly preferred embodiments, the encoded at least one antigenic peptide or protein comprises or consists of a full-length a Coronavirus membrane protein (M), nucleocapsid protein (N), non-structural protein (NSP), accessory protein, and/or envelope protein (E), or an immunogenic variant of any of these. The term “full-length protein” has to be understood as a protein having an amino acid sequence corresponding to essentially the respective full protein sequence.

[0159] Nucleic Acid Encoding a Coronavirus M:

[0160] In preferred embodiments, the pharmaceutical composition comprises at least one nucleic acid comprising at least one coding sequence encoding at least one antigenic peptide or protein selected or derived from at least one membrane protein (M), or an immunogenic fragment or immunogenic variant thereof.

[0161] Preferred antigenic peptide or proteins selected or derived from a Coronavirus membrane (M) protein as defined above are provided in Table 1 (rows 1 to 16, 119 to 126). Further provided in Table 1 are preferred nucleic acid sequences (coding sequences, mRNA sequences) encoding said antigenic peptide or proteins.

[0162] In embodiments, the Coronavirus membrane protein (M) comprises or consists of at least one of the amino acid sequences being identical or at least 70%, 80%, 85%, 86%, 87%, 88%, 89%, 90%, 91%, 92%, 93%, 94%, 95%, 96%, 97%, 98%, or 99% identical to any one of SEQ ID NOs: 15221-15295, or 27910-27917, or an immunogenic fragment or immunogenic variant of any of these. Further information regarding respective amino acid sequences is provided under <223> identifier of the respective SEQ ID NO in the sequence listing, and in Table 1, rows 1 to 16. 119 to 126, see in particular Column A).

[0163] In preferred embodiments, the Coronavirus membrane protein (M) is selected or derived from SARS-CoV-2 and comprises or consists of at least one of the amino acid sequences being identical or at least 70%, 80%, 85%, 86%, 87%, 88%, 89%, 90%, 91%, 92%, 93%, 94%, 95%, 96%, 97%, 98%, or 99% identical to any one of SEQ ID NOs: 15235-15295, or an immunogenic fragment or immunogenic variant of any of these. Particularly preferred amino acid sequences in the context of the invention are provided in Table 9.

[0164] In further embodiments, the Coronavirus membrane protein (M) selected or derived from SARS-CoV-2 is a variant membrane protein (M) and comprises or consists of at least one of the amino acid sequences being identical or at least 70%, 80%, 85%, 86%, 87%, 88%, 89%, 90%, 91%, 92%, 93%, 94%, 95%, 96%, 97%, 98%, or 99% identical to any one of SEQ ID NOs: 27910-27917, or an immunogenic fragment or immunogenic variant of any of these.

[0165] According to preferred embodiments, the at least one nucleic acid of the composition comprises at least one coding sequence encoding at least one antigenic peptide or protein derived from a Coronavirus membrane protein (M) as defined above, or fragments and variants thereof. In that context, any coding sequence encoding at least one Coronavirus membrane protein (M) as defined herein, or fragments and variants thereof may be understood as suitable coding sequence and may therefore be comprised in the nucleic acid of the composition.

[0166] In preferred embodiments, the at least one nucleic acid comprises or consists of at least one coding sequence encoding at least one antigenic peptide or protein selected or derived from Coronavirus membrane protein (M) as defined herein, preferably encoding any one of SEQ ID NOs: 15221-15295, 27910-27917, or fragments of variants thereof. It has to be understood that, on nucleic acid level, any sequence (DNA or RNA sequence) which encodes an amino acid sequences being identical or at least 70%, 80%, 85%, 86%, 87%, 88%, 89%, 90%, 91%, 92%, 93%, 94%, 95%, 96%, 97%, 98%, or 99% identical to any one of SEQ ID NOs: 15221-15295, 27910-27917, or fragments or variants thereof, may be selected and may accordingly be understood as suitable coding sequence of the invention. Further information regarding said amino acid sequences is also provided in Table 1 and under <223> identifier of the ST25 sequence listing of respective sequence SEQ ID NOs.

[0167] In preferred embodiments, the at least one coding sequence of the nucleic acid is a codon modified coding sequence as defined herein, wherein the amino acid sequence, that is Coronavirus membrane protein (M), encoded by the at least one codon modified coding sequence, is preferably not being modified compared to the amino acid sequence encoded by the corresponding wild type or reference coding sequence.

[0168] In particularly preferred embodiments, the at least one coding sequence of the nucleic acid is a codon modified coding sequence, wherein the codon modified coding sequence is selected a G/C optimized coding sequence, a human codon usage adapted coding sequence, or a G/C modified coding sequence.

[0169] In embodiments, the at least one coding sequence comprises or consists at least one nucleic acid sequence encoding a Coronavirus membrane protein (M) being identical or at least 70%, 80%, 85%, 86%, 87%, 88%, 89%, 90%, 91%, 92%, 93%, 94%, 95%, 96%, 97%, 98%, or 99% identical to any one of the nucleic acid sequences selected from SEQ ID NOs: 17098-17172, 18975-19049, 20852-20926, 28271, or a fragment or variant of any of these sequences. Further information regarding respective nucleic acid sequences is provided under <223> identifier of the respective SEQ ID NO in the sequence listing, and in Table 1, rows 1 to 16, see in particular Column C).

[0170] In preferred embodiments, the at least one coding sequence comprises or consists at least one nucleic acid sequence encoding a SARS-CoV-2 membrane protein (M) being identical or at least 70%, 80%, 85%, 86%, 87%, 88%, 89%, 90%, 91%, 92%, 93%, 94%, 95%, 96%, 97%, 98%, or 99% identical to any one of the nucleic acid sequences selected from SEQ ID NOs: 17112-17172, 18989-19049, 20866-20926, or a fragment or variant of any of these sequences. Particularly preferred nucleic acid sequences encoding SARS-CoV-2 M in the context of the invention are provided in Table 9.

[0171] In further embodiments, the at least one coding sequence comprises or consists at least one nucleic acid sequence encoding a SARS-CoV-2 variant membrane protein (M) being identical or at least 70%, 80%, 85%, 86%, 87%, 88%, 89%, 90%, 91%, 92%, 93%, 94%, 95%, 96%, 97%, 98%, or 99% identical to any one of the nucleic acid sequences selected from SEQ ID NOs: 27910-27917, 28031-28038, 28152-28159, 28282-28289, 28403-28410, or a fragment or variant of any of these sequences. Further information regarding respective nucleic acid sequences is provided under <223> identifier of the respective SEQ ID NO in the sequence listing, and in Table 1, rows 119 to 126).

[0172] In embodiments, the at least one nucleic acid comprises or consists of a nucleic acid sequence encoding a Coronavirus membrane protein (M) which is identical or at least 70%, 80%, 85%, 86%, 87%, 88%, 89%, 90%, 91%, 92%, 93%, 94%, 95%, 96%, 97%, 98%, or 99% identical to a nucleic acid sequence selected from SEQ ID NOs: 18975-19049, 20852-20926, 28152-28159, 28271, 28282-28289, 28403-28410, or a fragment or variant of any of these sequences. Optionally, said nucleic acid sequences comprise a cap1 structure as defined herein, and/or at least one, preferably all uracil nucleotides in said RNA sequences are replaced by pseudouridine (ψ) nucleotides and/or N1-methylpseudouridine (m1ψ) nucleotides. Further information regarding respective nucleic acid (mRNA) sequences is provided under <223> identifier of the respective SEQ ID NO in the sequence listing, and in Table 1, rows 1 to 16, 119 to 126 (see in particular Column D).

[0173] In embodiments, the at least one nucleic acid comprises or consists of a nucleic acid sequence encoding a SARS-CoV-2 membrane protein (M) which is identical or at least 70%, 80%, 85%, 86%, 87%, 88%, 89%, 90%, 91%, 92%, 93%, 94%, 95%, 96%, 97%, 98%, or 99% identical to a nucleic acid sequence selected from SEQ ID NOs: 18989-19049, 20866-20926 or a fragment or variant of any of these sequences. Optionally, said nucleic acid sequences comprise a cap1 structure as defined herein, and/or at least one, preferably all uracil nucleotides in said RNA sequences are replaced by pseudouridine (ψ) nucleotides and/or N1-methylpseudouridine (m1ψ) nucleotides. Particularly preferred mRNA sequences in the context of the invention encoding SARS-CoV-2 M are provided in Table 9.

[0174] In further embodiments, the at least one nucleic acid comprises or consists of a nucleic acid sequence encoding a SARS-CoV-2 variant membrane protein (M) which is identical or at least 70%, 80%, 85%, 86%, 87%, 88%, 89%, 90%, 91%, 92%, 93%, 94%, 95%, 96%, 97%, 98%, or 99% identical to a nucleic acid sequence selected from SEQ ID NOs: 28152-28159, 28282-28289, 28403-28410 or a fragment or variant of any of these sequences. Optionally, said nucleic acid sequences comprise a cap1 structure as defined herein, and/or at least one, preferably all uracil nucleotides in said RNA sequences are replaced by pseudouridine (ψ) nucleotides and/or N1-methylpseudouridine (m1ψ) nucleotides.

[0175] Nucleic Acid Encoding a Coronavirus N:

[0176] In preferred embodiments, the pharmaceutical composition comprises at least one nucleic acid comprising at least one coding sequence encoding at least one antigenic peptide or protein selected or derived from at least one nucleocapsid protein (N), or an immunogenic fragment or immunogenic variant thereof.

[0177] Preferred antigenic peptide or proteins selected or derived from a Coronavirus nucleocapsid protein (N) as defined herein are provided in Table 1 (rows 17-32, 127-148). Further provided in Table 1 are preferred nucleic acid sequences (coding sequences, mRNA sequences) encoding said antigenic peptide or proteins.

[0178] In embodiments, the Coronavirus nucleocapsid protein (N) comprises or consists of at least one of the amino acid sequences being identical or at least 70%, 80%, 85%, 86%, 87%, 88%, 89%, 90%, 91%, 92%, 93%, 94%, 95%, 96%, 97%, 98%, or 99% identical to any one of SEQ ID NOs: 15296-15674, 27918-27939, or an immunogenic fragment or immunogenic variant of any of these. Further information regarding respective amino acid sequences is provided under <223> identifier of the respective SEQ ID NO in the sequence listing, and in Table 1, row 17-32, 127-148, see in particular Column B).

[0179] In preferred embodiments, the Coronavirus nucleocapsid protein (N) is selected or derived from SARS-CoV-2 and comprises or consists of at least one of the amino acid sequences being identical or at least 70%, 80%, 85%, 86%, 87%, 88%, 89%, 90%, 91%, 92%, 93%, 94%, 95%, 96%, 97%, 98%, or 99% identical to any one of SEQ ID NOs: 15310-15674, or an immunogenic fragment or immunogenic variant of any of these. Particularly preferred amino acid sequences in the context of the invention are provided in Table 9.

[0180] In further embodiments, the Coronavirus nucleocapsid protein (N) selected or derived from SARS-CoV-2 is a variant nucleocapsid protein (N) and comprises or consists of at least one of the amino acid sequences being identical or at least 70%, 80%, 85%, 86%, 87%, 88%, 89%, 90%, 91%, 92%, 93%, 94%, 95%, 96%, 97%, 98%, or 99% identical to any one of SEQ ID NOs: 27918-27939, or an immunogenic fragment or immunogenic variant of any of these.

[0181] According to preferred embodiments, the at least one nucleic acid of the composition comprises at least one coding sequence encoding at least one antigenic peptide or protein derived from a Coronavirus nucleocapsid protein (N) as defined above, or fragments and variants thereof. In that context, any coding sequence encoding at least one Coronavirus nucleocapsid protein (N) as defined herein, or fragments and variants thereof may be understood as suitable coding sequence and may therefore be comprised in the nucleic acid of the composition.

[0182] In preferred embodiments, the at least one nucleic acid comprises or consists of at least one coding sequence encoding at least one antigenic peptide or protein selected or derived from Coronavirus nucleocapsid protein (N) as defined herein, preferably encoding any one of SEQ ID NOs: 15296-15674, 27918-27939, or fragments of variants thereof. It has to be understood that, on nucleic acid level, any sequence (DNA or RNA sequence) which encodes an amino acid sequences being identical or at least 70%, 80%, 85%, 86%, 87%, 88%, 89%, 90%, 91%, 92%, 93%, 94%, 95%, 96%, 97%, 98%, or 99% identical to any one of SEQ ID NOs: 15296-15674, 27918-27939, or fragments or variants thereof, may be selected and may accordingly be understood as suitable coding sequence of the invention. Further information regarding said amino acid sequences is also provided in Table 1, and under <223> identifier of the ST25 sequence listing of respective sequence SEQ ID NOs.

[0183] In preferred embodiments, the at least one coding sequence of the nucleic acid is a codon modified coding sequence as defined herein, wherein the amino acid sequence, that is Coronavirus nucleocapsid protein (N), encoded by the at least one codon modified coding sequence, is preferably not being modified compared to the amino acid sequence encoded by the corresponding wild type or reference coding sequence.

[0184] In particularly preferred embodiments, the at least one coding sequence of the nucleic acid is a codon modified coding sequence, wherein the codon modified coding sequence is selected a G/C optimized coding sequence, a human codon usage adapted coding sequence, or a G/C modified coding sequence.

[0185] In embodiments, the at least one coding sequence comprises or consists at least one nucleic acid sequence encoding a Coronavirus nucleocapsid protein (N) being identical or at least 70%, 80%, 85%, 86%, 87%, 88%, 89%, 90%, 91%, 92%, 93%, 94%, 95%, 96%, 97%, 98%, or 99% identical to any one of the nucleic acid sequences selected from SEQ ID NOs: 17173-17551, 19050-19428, 20927-21305, 28039-28060, 28160-28181, 28272, 28290-28311, 28411-28432, or a fragment or variant of any of these sequences. Further information regarding respective nucleic acid sequences is provided under <223> identifier of the respective SEQ ID NO in the sequence listing, and in Table 1, row 17-32, 127-148, see in particular Column C).

[0186] In preferred embodiments, the at least one coding sequence comprises or consists at least one nucleic acid sequence encoding a SARS-CoV-2 nucleocapsid protein (N) being identical or at least 70%, 80%, 85%, 86%, 87%, 88%, 89%, 90%, 91%, 92%, 93%, 94%, 95%, 96%, 97%, 98%, or 99% identical to any one of the nucleic acid sequences selected from SEQ ID NOs: 17187-17551, 19064-19428, 20941-21305, or a fragment or variant of any of these sequences. Particularly preferred nucleic acid sequences encoding SARS-CoV-2 N in the context of the invention are provided in Table 9.

[0187] In further embodiments, the at least one coding sequence comprises or consists at least one nucleic acid sequence encoding a SARS-CoV-2 variant nucleocapsid protein (N) being identical or at least 70%, 80%, 85%, 86%, 87%, 88%, 89%, 90%, 91%, 92%, 93%, 94%, 95%, 96%, 97%, 98%, or 99% identical to any one of the nucleic acid sequences selected from SEQ ID NOs: 28039-28060, 28160-28181, 28272, 28290-28311, 28411-28432 or a fragment or variant of any of these sequences. Further information regarding respective nucleic acid sequences is provided under <223> identifier of the respective SEQ ID NO in the sequence listing, and in Table 1, rows 127-148).

[0188] In embodiments, the at least one nucleic acid comprises or consists of a nucleic acid sequence encoding a Coronavirus nucleocapsid protein (N) which is identical or at least 70%, 80%, 85%, 86%, 87%, 88%, 89%, 90%, 91%, 92%, 93%, 94%, 95%, 96%, 97%, 98%, or 99% identical to a nucleic acid sequence selected from SEQ ID NOs: 19050-19428, 20927-21305, 28160-28181, 28272, 28290-28311, 28411-28432, or a fragment or variant of any of these sequences. Optionally, said nucleic acid sequences comprise a cap1 structure as defined herein, and/or at least one, preferably all uracil nucleotides in said RNA sequences are replaced by pseudouridine (ψ) nucleotides and/or N1-methylpseudouridine (m1ψ) nucleotides. Further information regarding respective nucleic acid sequences is provided under <223> identifier of the respective SEQ ID NO in the sequence listing, and in Table 1, row 17-32, 127-148, see in particular Column D).

[0189] In embodiments, the at least one nucleic acid comprises or consists of a nucleic acid sequence encoding a SARS-CoV-2 nucleocapsid protein (N) which is identical or at least 70%, 80%, 85%, 86%, 87%, 88%, 89%, 90%, 91%, 92%, 93%, 94%, 95%, 96%, 97%, 98%, or 99% identical to a nucleic acid sequence selected from SEQ ID NOs: 19064-19428, 20941-21305, 28272, or a fragment or variant of any of these sequences. Optionally, said nucleic acid sequences comprise a cap1 structure as defined herein, and/or at least one, preferably all uracil nucleotides in said RNA sequences are replaced by pseudouridine (ψ) nucleotides and/or N1-methylpseudouridine (m1ψ) nucleotides. Particularly preferred mRNA sequences encoding SARS-CoV-2 N in the context of the invention are provided in Table 9.

[0190] In further embodiments, the at least one nucleic acid comprises or consists of a nucleic acid sequence encoding a SARS-CoV-2 variant nucleocapsid protein (N) which is identical or at least 70%, 80%, 85%, 86%, 87%, 88%, 89%, 90%, 91%, 92%, 93%, 94%, 95%, 96%, 97%, 98%, or 99% identical to a nucleic acid sequence selected from SEQ ID NOs: 28160-28181, 28290-28311, 28411-28432, or a fragment or variant of any of these sequences. Optionally, said nucleic acid sequences comprise a cap1 structure as defined herein, and/or at least one, preferably all uracil nucleotides in said RNA sequences are replaced by pseudouridine (ψ) nucleotides and/or N1-methylpseudouridine (m1ψ) nucleotides.

[0191] Nucleic Acid Encoding a Coronavirus NSPs:

[0192] In embodiments, the pharmaceutical composition comprises the at least one nucleic acid comprising at least one coding sequence encoding at least one antigenic peptide or protein selected or derived from at least one non-structural protein selected from NSP1, NSP2, NSP3, NSP4, NSP5, NSP6, NSP7, NSP8, NSP9, NSP10, NSP11, NSP12, NSP13, NSP14, NSP15, and/or NSP16 or an immunogenic fragment or immunogenic variant of any of these.

[0193] In preferred embodiments, the pharmaceutical composition comprises the at least one nucleic acid comprising at least one coding sequence encoding at least one antigenic peptide or protein selected or derived from at least one non-structural protein selected from NSP3, NSP4, and/or NSP6 or an immunogenic fragment or immunogenic variant of any of these.

[0194] In preferred embodiments, the pharmaceutical composition comprises at least one nucleic acid comprising at least one coding sequence encoding at least one antigenic peptide or protein selected or derived from at least one Coronavirus NSP3 protein, or an immunogenic fragment or immunogenic variant thereof.

[0195] Preferred antigenic peptide or proteins selected or derived from a Coronavirus NSP3 as defined herein are provided in Table 1 (rows 49-64, 157-178). Further provided in Table 1 are preferred nucleic acid sequences (coding sequences, mRNA sequences) encoding said antigenic peptide or proteins.

[0196] In embodiments, the Coronavirus NSP3 protein comprises or consists of at least one of the amino acid sequences being identical or at least 70%, 80%, 85%, 86%, 87%, 88%, 89%, 90%, 91%, 92%, 93%, 94%, 95%, 96%, 97%, 98%, or 99% identical to any one of SEQ ID NOs: 15720-16401, 27948-27969, or an immunogenic fragment or immunogenic variant of any of these. Further information regarding respective amino acid sequences is provided under <223> identifier of the respective SEQ ID NO in the sequence listing, and in Table 1, row 49-64, 157-178, see in particular Column B).

[0197] In preferred embodiments, the Coronavirus NSP3 protein is selected or derived from SARS-CoV-2 and comprises or consists of at least one of the amino acid sequences being identical or at least 70%, 80%, 85%, 86%, 87%, 88%, 89%, 90%, 91%, 92%, 93%, 94%, 95%, 96%, 97%, 98%, or 99% identical to any one of SEQ ID NOs: 15734-16401 or an immunogenic fragment or immunogenic variant of any of these. Particularly preferred amino acid sequences in the context of the invention are provided in Table 9.

[0198] In further embodiments, the Coronavirus NSP3 protein selected or derived from SARS-CoV-2 is a variant membrane protein (M) and comprises or consists of at least one of the amino acid sequences being identical or at least 70%, 80%, 85%, 86%, 87%, 88%, 89%, 90%, 91%, 92%, 93%, 94%, 95%, 96%, 97%, 98%, or 99% identical to any one of SEQ ID NOs: 27948-27969, or an immunogenic fragment or immunogenic variant of any of these.

[0199] According to preferred embodiments, the at least one nucleic acid of the composition comprises at least one coding sequence encoding at least one antigenic peptide or protein derived from a Coronavirus NSP3 protein as defined above, or fragments and variants thereof. In that context, any coding sequence encoding at least one Coronavirus NSP3 protein as defined herein, or fragments and variants thereof may be understood as suitable coding sequence and may therefore be comprised in the nucleic acid of the composition.

[0200] In preferred embodiments, the at least one nucleic acid comprises or consists of at least one coding sequence encoding at least one antigenic peptide or protein selected or derived from Coronavirus NSP3 protein as defined herein, preferably encoding any one of SEQ ID NOs: 15720-16401, 27948-27969, or fragments of variants thereof. It has to be understood that, on nucleic acid level, any sequence (DNA or RNA sequence) which encodes an amino acid sequences being identical or at least 70%0, 80%, 85%, 86%, 87%, 88%, 89%, 90%, 91%, 92%, 93%, 94%, 95%, 96%, 97%, 98%, or 99% identical to any one of SEQ ID NOs: 15720-16401, 27948-27969, or fragments or variants thereof, may be selected and may accordingly be understood as suitable coding sequence of the invention. Further information regarding said amino acid sequences is also provided in Table 1, and under <223> identifier of the ST25 sequence listing of respective sequence SEQ ID NOs.

[0201] In preferred embodiments, the at least one coding sequence of the nucleic acid is a codon modified coding sequence as defined herein, wherein the amino acid sequence, that is Coronavirus NSP3 protein, encoded by the at least one codon modified coding sequence, is preferably not being modified compared to the amino acid sequence encoded by the corresponding wild type or reference coding sequence.

[0202] In particularly preferred embodiments, the at least one coding sequence of the nucleic acid is a codon modified coding sequence, wherein the codon modified coding sequence is selected a G/C optimized coding sequence, a human codon usage adapted coding sequence, or a G/C modified coding sequence.

[0203] In embodiments, the at least one coding sequence comprises or consists at least one nucleic acid sequence encoding a Coronavirus NSP3 protein being identical or at least 70%, 80%, 85%, 86%, 87%, 88%, 89%, 90%, 91%, 92%, 93%, 94%, 95%, 96%, 97%, 98%, or 99% identical to any one of the nucleic acid sequences selected from SEQ ID NOs: 17597-18278, 19474-20155, 21351-22032, 28069-28090, 28190-28211, 28320-28341, 28441-28462, 28274, 28275, or a fragment or variant of any of these sequences. Further information regarding respective nucleic acid sequences is provided under <223> identifier of the respective SEQ ID NO in the sequence listing, and in Table 1, row 49-64, 157-178, see in particular Column C).

[0204] In preferred embodiments, the at least one coding sequence comprises or consists at least one nucleic acid sequence encoding a SARS-CoV-2 NSP3 protein being identical or at least 70%, 80%, 85%, 86%, 87%, 88%, 89%, 90%, 91%, 92%, 93%, 94%, 95%, 96%, 97%, 98%, or 99% identical to any one of the nucleic acid sequences selected from SEQ ID NOs: 17611-18278, 19488-20155, 21365-22032, or a fragment or variant of any of these sequences. Particularly preferred nucleic acid sequences encoding SARS-CoV-2 NSP3 in the context of the invention are provided in Table 9.

[0205] In further embodiments, the at least one coding sequence comprises or consists at least one nucleic acid sequence encoding a SARS-CoV-2 variant NSP3 protein being identical or at least 70%, 80%, 85%, 86%, 87%, 88%, 89%, 90%, 91%, 92%, 93%, 94%, 95%, 96%, 97%, 98%, or 99% identical to any one of the nucleic acid sequences selected from SEQ ID NOs: 28069-28090, 28190-28211, 28320-28341, 28441-28462, or a fragment or variant of any of these sequences. Further information regarding respective nucleic acid sequences is provided under <223> identifier of the respective SEQ ID NO in the sequence listing, and in Table 1, rows 157-178).

[0206] In embodiments, the at least one nucleic acid comprises or consists of a nucleic acid sequence encoding a Coronavirus NSP3 protein which is identical or at least 70%, 80%, 85%, 86%, 87%, 88%, 89%, 90%, 91%, 92%, 93%, 94%, 95%, 96%, 97%, 98%, or 99% identical to a nucleic acid sequence selected from SEQ ID NOs: 19474-20155, 21351-22032, 28190-28211, 28320-28341, 28441-28462, 28274, 28275, or a fragment or variant of any of these sequences. Optionally, said nucleic acid sequences comprise a cap1 structure as defined herein, and/or at least one, preferably all uracil nucleotides in said RNA sequences are replaced by pseudouridine (ψ) nucleotides and/or N1-methylpseudouridine (m1ψ) nucleotides. Further information regarding respective nucleic acid sequences is provided under <223> identifier of the respective SEQ ID NO in the sequence listing, and in Table 1, row 49-64, 157-178, see in particular Column D).

[0207] In embodiments, the at least one nucleic acid comprises or consists of a nucleic acid sequence encoding a SARS-CoV-2 NSP3 protein which is identical or at least 70%, 80%, 85%, 86%, 87%, 88%, 89%, 90%, 91%, 92%, 93%, 94%, 95%, 96%, 97%, 98%, or 99% identical to a nucleic acid sequence selected from SEQ ID NOs: 19488-20155, 21365-22032 or a fragment or variant of any of these sequences. Optionally, said nucleic acid sequences comprise a cap1 structure as defined herein, and/or at least one, preferably all uracil nucleotides in said RNA sequences are replaced by pseudouridine (ψ) nucleotides and/or N1-methylpseudouridine (m1ψ) nucleotides. Particularly preferred mRNA sequences encoding SARS-CoV-2 NSP3 in the context of the invention are provided in Table 9.

[0208] In further embodiments, the at least one nucleic acid comprises or consists of a nucleic acid sequence encoding a SARS-CoV-2 variant NSP3 protein which is identical or at least 70%, 80%, 85%, 86%, 87%, 88%, 89%, 90%, 91%, 92%, 93%, 94%, 95%, 96%, 97%, 98%, or 99% identical to a nucleic acid sequence selected from SEQ ID NOs: 28190-28211, 28320-28341, 28441-28462 or a fragment or variant of any of these sequences. Optionally, said nucleic acid sequences comprise a cap1 structure as defined herein, and/or at least one, preferably all uracil nucleotides in said RNA sequences are replaced by pseudouridine (ψ) nucleotides and/or N1-methylpseudouridine (m1ψ) nucleotides.

[0209] In preferred embodiments, the pharmaceutical composition comprises at least one nucleic acid comprising at least one coding sequence encoding at least one antigenic peptide or protein selected or derived from at least one Coronavirus NSP4 protein, or an immunogenic fragment or immunogenic variant thereof.

[0210] Preferred antigenic peptide or proteins selected or derived from a Coronavirus NSP4 as defined herein are provided in Table 1 (rows 65-79, 179-194). Further provided in Table 1 are preferred nucleic acid sequences (coding sequences, mRNA sequences) encoding said antigenic peptide or proteins.

[0211] In embodiments, the Coronavirus NSP4 protein comprises or consists of at least one of the amino acid sequences being identical or at least 70%, 80%, 85%, 86%, 87%, 88%, 89%, 90%, 91%, 92%, 93%, 94%, 95%, 96%, 97%, 98%, or 99% identical to any one of SEQ ID NOs: 16402-16568, 27970-27985, or an immunogenic fragment or immunogenic variant of any of these. Further information regarding respective amino acid sequences is provided under <223> identifier of the respective SEQ ID NO in the sequence listing, and in Table 1, row 65-79, 179-194, see in particular Column B).

[0212] In preferred embodiments, the Coronavirus NSP4 protein is selected or derived from SARS-CoV-2 and comprises or consists of at least one of the amino acid sequences being identical or at least 70%, 80%, 85%, 86%, 87%, 88%, 89%, 90%, 91%, 92%, 93%, 94%, 95%, 96%, 97%, 98%, or 99% identical to any one of SEQ ID NOs: 16415-16568 or an immunogenic fragment or immunogenic variant of any of these. Particularly preferred amino acid sequences in the context of the invention are provided in Table 9.

[0213] In further embodiments, the Coronavirus NSP4 protein selected or derived from SARS-CoV-2 is a variant membrane protein (M) and comprises or consists of at least one of the amino acid sequences being identical or at least 70%, 80%, 85%, 86%, 87%, 88%, 89%, 90%, 91%, 92%, 93%, 94%, 95%, 96%, 97%, 98%, or 99% identical to any one of SEQ ID NOs: 27970-27985, or an immunogenic fragment or immunogenic variant of any of these.

[0214] According to preferred embodiments, the at least one nucleic acid of the composition comprises at least one coding sequence encoding at least one antigenic peptide or protein derived from a Coronavirus NSP4 protein as defined above, or fragments and variants thereof. In that context, any coding sequence encoding at least one Coronavirus NSP4 protein as defined herein, or fragments and variants thereof may be understood as suitable coding sequence and may therefore be comprised in the nucleic acid of the composition.

[0215] In preferred embodiments, the at least one nucleic acid comprises or consists of at least one coding sequence encoding at least one antigenic peptide or protein selected or derived from Coronavirus NSP4 protein as defined herein, preferably encoding any one of SEQ ID NOs: 16402-16568, 27970-27985, or fragments of variants thereof. It has to be understood that, on nucleic acid level, any sequence (DNA or RNA sequence) which encodes an amino acid sequences being identical or at least 70%, 80%, 85%, 86%, 87%, 88%, 89%, 90%, 91%, 92%, 93%, 94%, 95%, 96%, 97%, 98%, or 99% identical to any one of SEQ ID NOs: 16402-16568, 27970-27985, or fragments or variants thereof, may be selected and may accordingly be understood as suitable coding sequence of the invention. Further information regarding said amino acid sequences is also provided in Table 1, and under <223> identifier of the ST25 sequence listing of respective sequence SEQ ID NOs.

[0216] In preferred embodiments, the at least one coding sequence of the nucleic acid is a codon modified coding sequence as defined herein, wherein the amino acid sequence, that is Coronavirus NSP4 protein, encoded by the at least one codon modified coding sequence, is preferably not being modified compared to the amino acid sequence encoded by the corresponding wild type or reference coding sequence.

[0217] In particularly preferred embodiments, the at least one coding sequence of the nucleic acid is a codon modified coding sequence, wherein the codon modified coding sequence is selected a G/C optimized coding sequence, a human codon usage adapted coding sequence, or a G/C modified coding sequence.

[0218] In embodiments, the at least one coding sequence comprises or consists at least one nucleic acid sequence encoding a Coronavirus NSP4 protein being identical or at least 70%, 80%, 85%, 86%, 87%, 88%, 89%, 90%, 91%, 92%, 93%, 94%, 95%, 96%, 97%, 98%, or 99% identical to any one of the nucleic acid sequences selected from SEQ ID NOs: 18279-18445, 20156-20322, 22033-22199, 28091-28106, 28212-28227, 28276, 28342-28357, 28463-28478, or a fragment or variant of any of these sequences. Further information regarding respective nucleic acid sequences is provided under <223> identifier of the respective SEQ ID NO in the sequence listing, and in Table 1, row 65-79, 179-194, see in particular Column C).

[0219] In preferred embodiments, the at least one coding sequence comprises or consists at least one nucleic acid sequence encoding a SARS-CoV-2 NSP4 protein being identical or at least 70%, 80%, 85%, 86%, 87%, 88%, 89%, 90%, 91%, 92%, 93%, 94%, 95%, 96%, 97%, 98%, or 99% identical to any one of the nucleic acid sequences selected from SEQ ID NOs: 18292-18445, 20169-20322, 22046-22199, or a fragment or variant of any of these sequences. Particularly preferred nucleic acid sequences encoding SARS-CoV-2 NSP4 in the context of the invention are provided in Table 9.

[0220] In further embodiments, the at least one coding sequence comprises or consists at least one nucleic acid sequence encoding a SARS-CoV-2 variant NSP4 protein being identical or at least 70%, 80%, 85%, 86%, 87%, 88%, 89%, 90%, 91%, 92%, 93%, 94%, 95%, 96%, 97%, 98%, or 99% identical to any one of the nucleic acid sequences selected from SEQ ID NOs: 28091-28106, 28212-28227, 28342-28357, 28463-28478, or a fragment or variant of any of these sequences. Further information regarding respective nucleic acid sequences is provided under <223> identifier of the respective SEQ ID NO in the sequence listing, and in Table 1, rows 179-194.

[0221] In embodiments, the at least one nucleic acid comprises or consists of a nucleic acid sequence encoding a Coronavirus NSP4 protein which is identical or at least 70%, 80%, 85%, 86%, 87%, 88%, 89%, 90%, 91%, 92%, 93%, 94%, 95%, 96%, 97%, 98%, or 99% identical to a nucleic acid sequence selected from SEQ ID NOs: 20156-20322, 22033-22199, 28190-28211, 28320-28341, 28276, 28441-28462, or a fragment or variant of any of these sequences. Optionally, said nucleic acid sequences comprise a cap1 structure as defined herein, and/or at least one, preferably all uracil nucleotides in said RNA sequences are replaced by pseudouridine (ψ) nucleotides and/or N1-methylpseudouridine (m1ψ) nucleotides. Further information regarding respective nucleic acid sequences is provided under <223> identifier of the respective SEQ ID NO in the sequence listing, and in Table 1, row 65-79, 179-194, see in particular Column D).

[0222] In embodiments, the at least one nucleic acid comprises or consists of a nucleic acid sequence encoding a SARS-CoV-2 NSP4 protein which is identical or at least 70%, 80%, 85%, 86%, 87%, 88%, 89%, 90%, 91%, 92%, 93%, 94%, 95%, 96%, 97%, 98%, or 99% identical to a nucleic acid sequence selected from SEQ ID NOs: 20169-20322, 22046-22199, or a fragment or variant of any of these sequences. Optionally, said nucleic acid sequences comprise a cap1 structure as defined herein, and/or at least one, preferably all uracil nucleotides in said RNA sequences are replaced by pseudouridine (ψ) nucleotides and/or N1-methylpseudouridine (m1ψ) nucleotides. Particularly preferred mRNA sequences encoding SARS-CoV-2 NSP4 in the context of the invention are provided in Table 9.

[0223] In further embodiments, the at least one nucleic acid comprises or consists of a nucleic acid sequence encoding a SARS-CoV-2 variant NSP4 protein which is identical or at least 70%, 80%, 85%, 86%, 87%, 88%, 89%, 90%, 91%, 92%, 93%, 94%, 95%, 96%, 97%, 98%, or 99% identical to a nucleic acid sequence selected from SEQ ID NOs: 28190-28211, 28320-28341, 28441-28462, or a fragment or variant of any of these sequences. Optionally, said nucleic acid sequences comprise a cap1 structure as defined herein, and/or at least one, preferably all uracil nucleotides in said RNA sequences are replaced by pseudouridine (ψ) nucleotides and/or N1-methylpseudouridine (m1ψ) nucleotides.

[0224] In preferred embodiments, the pharmaceutical composition comprises at least one nucleic acid comprising at least one coding sequence encoding at least one antigenic peptide or protein selected or derived from at least one Coronavirus NSP6 protein, or an immunogenic fragment or immunogenic variant thereof.

[0225] Preferred antigenic peptide or proteins selected or derived from a Coronavirus NSP6 as defined herein are provided in Table 1 (rows 80-94, 195-201). Further provided in Table 1 are preferred nucleic acid sequences (coding sequences, mRNA sequences) encoding said antigenic peptide or proteins.

[0226] In embodiments, the Coronavirus NSP6 protein comprises or consists of at least one of the amino acid sequences being identical or at least 70%, 80%, 85%, 86%, 87%, 88%, 89%, 90%, 91%, 92%, 93%, 94%, 95%, 96%, 97%, 98%, or 99% identical to any one of SEQ ID NOs: 16569-16671, 27986-27992, or an immunogenic fragment or immunogenic variant of any of these. Further information regarding respective nucleic acid sequences is provided under <223> identifier of the respective SEQ ID NO in the sequence listing, and in Table 1, row 80-94, 195-201, see in particular Column B).

[0227] In preferred embodiments, the Coronavirus NSP6 is selected or derived from SARS-CoV-2 and comprises or consists of at least one of the amino acid sequences being identical or at least 70%, 80%, 85%, 86%, 87%, 88%, 89%, 90%, 91%, 92%, 93%, 94%, 95%, 96%, 97%, 98%, or 99% identical to any one of SEQ ID NOs: 16582-16671, or an immunogenic fragment or immunogenic variant of any of these. Particularly preferred amino acid sequences in the context of the invention are provided in Table 9.

[0228] In further embodiments, the Coronavirus NSP6 protein selected or derived from SARS-CoV-2 is a variant NSP6 protein and comprises or consists of at least one of the amino acid sequences being identical or at least 70%, 80%, 85%, 86%, 87%, 88%, 89%, 90%, 91%, 92%, 93%, 94%, 95%, 96%, 97%, 98%, or 99% identical to any one of SEQ ID NOs: 27986-27992, or an immunogenic fragment or immunogenic variant of any of these.

[0229] According to preferred embodiments, the at least one nucleic acid of the composition comprises at least one coding sequence encoding at least one antigenic peptide or protein derived from a Coronavirus NSP6 as defined above, or fragments and variants thereof. In that context, any coding sequence encoding at least one Coronavirus NSP6 as defined herein, or fragments and variants thereof may be understood as suitable coding sequence and may therefore be comprised in the nucleic acid of the composition.

[0230] In preferred embodiments, the at least one nucleic acid comprises or consists of at least one coding sequence encoding at least one antigenic peptide or protein selected or derived from Coronavirus NSP6 as defined herein, preferably encoding any one of SEQ ID NOs: 16569-16671, 27986-27992, or fragments of variants thereof. It has to be understood that, on nucleic acid level, any sequence (DNA or RNA sequence) which encodes an amino acid sequences being identical or at least 70%, 80%, 85%, 86%, 87%, 88%, 89%, 90%, 91%, 92%, 93%, 94%, 95%, 96%, 97%, 98%, or 99% identical to any one of SEQ ID NOs: 16569-16671, 27986-27992, or fragments or variants thereof, may be selected and may accordingly be understood as suitable coding sequence of the invention. Further information regarding said amino acid sequences is also provided in Table 1, and under <223> identifier of the ST25 sequence listing of respective sequence SEQ ID NOs.

[0231] In preferred embodiments, the at least one coding sequence of the nucleic acid is a codon modified coding sequence as defined herein, wherein the amino acid sequence, that is Coronavirus NSP6, encoded by the at least one codon modified coding sequence, is preferably not being modified compared to the amino acid sequence encoded by the corresponding wild type or reference coding sequence.

[0232] In particularly preferred embodiments, the at least one coding sequence of the nucleic acid is a codon modified coding sequence, wherein the codon modified coding sequence is selected a G/C optimized coding sequence, a human codon usage adapted coding sequence, or a G/C modified coding sequence.

[0233] In embodiments, the at least one coding sequence comprises or consists at least one nucleic acid sequence encoding a Coronavirus NSP6 protein being identical or at least 70%, 80%, 85%, 86%, 87%, 88%, 89%, 90%, 91%, 92%, 93%, 94%, 95%, 96%, 97%, 98%, or 99% identical to any one of the nucleic acid sequences selected from SEQ ID NOs: 18446-18548, 20323-20425, 22200-22302, 28107-28113, 28228-28234, 28277, 28358-28364, 28479-28485, or a fragment or variant of any of these sequences. Further information regarding respective nucleic acid sequences is provided under <223> identifier of the respective SEQ ID NO in the sequence listing, and in Table 1, row 80-94, 195-201, see in particular Column C).

[0234] In preferred embodiments, the at least one coding sequence comprises or consists at least one nucleic acid sequence encoding a SARS-CoV-2 NSP6 protein being identical or at least 70%, 80%, 85%, 86%, 87%, 88%, 89%, 90%, 91%, 92%, 93%, 94%, 95%, 96%, 97%, 98%, or 99% identical to any one of the nucleic acid sequences selected from SEQ ID NOs: 18459-18548, 20336-20425, 22213-22302, or a fragment or variant of any of these sequences. Particularly preferred nucleic acid sequences encoding SARS-CoV-2 NSP6 in the context of the invention are provided in Table 9.

[0235] In further embodiments, the at least one coding sequence comprises or consists at least one nucleic acid sequence encoding a SARS-CoV-2 variant NSP6 protein being identical or at least 70%, 80%, 85%, 86%, 87%, 88%, 89%, 90%, 91%, 92%, 93%, 94%, 95%, 96%, 97%, 98%, or 99% identical to any one of the nucleic acid sequences selected from SEQ ID NOs: 28107-28113, 28228-28234, 28358-28364, 28479-28485, or a fragment or variant of any of these sequences. Further information regarding respective nucleic acid sequences is provided under <223> identifier of the respective SEQ ID NO in the sequence listing, and in Table 1, rows 195-201).

[0236] In embodiments, the at least one nucleic acid comprises or consists of a nucleic acid sequence encoding a Coronavirus NSP6 protein which is identical or at least 70%, 80%, 85%, 86%, 87%, 88%, 89%, 90%, 91%, 92%, 93%, 94%, 95%, 96%, 97%, 98%, or 99% identical to a nucleic acid sequence selected from SEQ ID NOs: 20323-20425, 22200-22302, 28228-28234, 28277, 28358-28364, 28479-28485, or a fragment or variant of any of these sequences. Optionally, said nucleic acid sequences comprise a cap1 structure as defined herein, and/or at least one, preferably all uracil nucleotides in said RNA sequences are replaced by pseudouridine (ψ) nucleotides and/or N1-methylpseudouridine (m1ψ) nucleotides. Further information regarding respective nucleic acid sequences is provided under <223> identifier of the respective SEQ ID NO in the sequence listing, and in Table 1, row 80-94, 195-201, see in particular Column D).

[0237] In embodiments, the at least one nucleic acid comprises or consists of a nucleic acid sequence encoding a SARS-CoV-2 NSP6 protein which is identical or at least 70%, 80%, 85%, 86%, 87%, 88%, 89%, 90%, 91%, 92%, 93%, 94%, 95%, 96%, 97%, 98%, or 99% identical to a nucleic acid sequence selected from SEQ ID NOs: 20336-20425, 22213-22302 or a fragment or variant of any of these sequences. Optionally, said nucleic acid sequences comprise a cap1 structure as defined herein, and/or at least one, preferably all uracil nucleotides in said RNA sequences are replaced by pseudouridine (ψ) nucleotides and/or N1-methylpseudouridine (m1ψ) nucleotides. Particularly preferred mRNA sequences SARS-CoV-2 NSP6 in the context of the invention are provided in Table 9.

[0238] In further embodiments, the at least one nucleic acid comprises or consists of a nucleic acid sequence encoding a SARS-CoV-2 variant NSP6 protein which is identical or at least 70%, 80%, 85%, 86%, 87%, 88%, 89%, 90%, 91%, 92%, 93%, 94%, 95%, 96%, 97%, 98%, or 99% identical to a nucleic acid sequence selected from SEQ ID NOs: 28228-28234, 28358-28364, 28479-28485 or a fragment or variant of any of these sequences. Optionally, said nucleic acid sequences comprise a cap1 structure as defined herein, and/or at least one, preferably all uracil nucleotides in said RNA sequences are replaced by pseudouridine (ψ) nucleotides and/or N1-methylpseudouridine (m1ψ) nucleotides.

[0239] In preferred embodiments, the pharmaceutical composition comprises at least one nucleic acid comprising at least one coding sequence encoding at least one antigenic peptide or protein selected or derived from at least one Coronavirus NSP13 protein, or an immunogenic fragment or immunogenic variant thereof.

[0240] Preferred antigenic peptide or proteins selected or derived from a Coronavirus NSP13 as defined herein are provided in Table 1 (rows 117, 222-230). Further provided in Table 1 are preferred nucleic acid sequences (coding sequences, mRNA sequences) encoding said antigenic peptide or proteins.

[0241] In embodiments, the Coronavirus NSP13 protein comprises or consists of at least one of the amino acid sequences being identical or at least 70%, 80%, 85%, 86%, 87%, 88%, 89%, 90%, 91%, 92%, 93%, 94%, 95%, 96%, 97%, 98%, or 99% identical to any one of SEQ ID NOs: 27908, 28013-28021, or an immunogenic fragment or immunogenic variant of any of these. Further information regarding respective nucleic acid sequences is provided under <223> identifier of the respective SEQ ID NO in the sequence listing, and in Table 1, rows 117, 222-230, see in particular Column B).

[0242] In preferred embodiments, the Coronavirus NSP13 is selected or derived from SARS-CoV-2 and comprises or consists of at least one of the amino acid sequences being identical or at least 70%, 80%, 85%, 86%, 87%, 88%, 89%, 90%, 91%, 92%, 93%, 94%, 95%, 96%, 97%, 98%, or 99% identical to SEQ ID NOs: 27908, or an immunogenic fragment or immunogenic variant thereof.

[0243] In further embodiments, the Coronavirus NSP13 selected or derived from SARS-CoV-2 is a variant NSP13 and comprises or consists of at least one of the amino acid sequences being identical or at least 70%, 80%, 85%, 86%, 87%, 88%, 89%, 90%, 91%, 92%, 93%, 94%, 95%, 96%, 97%, 98%, or 99% identical to any one of SEQ ID NOs: 28013-28021, or an immunogenic fragment or immunogenic variant of any of these.

[0244] According to preferred embodiments, the at least one nucleic acid of the composition comprises at least one coding sequence encoding at least one antigenic peptide or protein derived from a Coronavirus NSP13 as defined above, or fragments and variants thereof. In that context, any coding sequence encoding at least one Coronavirus NSP13 as defined herein, or fragments and variants thereof may be understood as suitable coding sequence and may therefore be comprised in the nucleic acid of the composition.

[0245] In preferred embodiments, the at least one nucleic acid comprises or consists of at least one coding sequence encoding at least one antigenic peptide or protein selected or derived from Coronavirus NSP13 as defined herein, preferably encoding any one of SEQ ID NOs: 27908, 28013-28021, or fragments of variants thereof. It has to be understood that, on nucleic acid level, any sequence (DNA or RNA sequence) which encodes an amino acid sequences being identical or at least 70%, 80%, 85%, 86%, 87%, 88%, 89%, 90%, 91%, 92%, 93%, 94%, 95%, 96%, 97%, 98%, or 99% identical to any one of SEQ ID NOs: 27908, 28013-28021, or fragments or variants thereof, may be selected and may accordingly be understood as suitable coding sequence of the invention. Further information regarding said amino acid sequences is also provided in Table 1, and under <223> identifier of the ST25 sequence listing of respective sequence SEQ ID NOs.

[0246] In preferred embodiments, the at least one coding sequence of the nucleic acid is a codon modified coding sequence as defined herein, wherein the amino acid sequence, that is Coronavirus NSP13, encoded by the at least one codon modified coding sequence, is preferably not being modified compared to the amino acid sequence encoded by the corresponding wild type or reference coding sequence.

[0247] In particularly preferred embodiments, the at least one coding sequence of the nucleic acid is a codon modified coding sequence, wherein the codon modified coding sequence is selected a G/C optimized coding sequence, a human codon usage adapted coding sequence, or a G/C modified coding sequence.

[0248] In embodiments, the at least one coding sequence comprises or consists at least one nucleic acid sequence encoding a Coronavirus NSP13 protein being identical or at least 70%, 80%, 85%, 86%, 87%, 88%, 89%, 90%, 91%, 92%, 93%, 94%, 95%, 96%, 97%, 98%, or 99% identical to any one of the nucleic acid sequences selected from SEQ ID NOs: 28029, 28150, 28280, 28401, 28134-28142, 28255-28263, 28385-28393, 28506-28514, or a fragment or variant of any of these sequences. Further information regarding respective nucleic acid sequences is provided under <223> identifier of the respective SEQ ID NO in the sequence listing, and in Table 1, row 117, 222-230, see in particular Column C).

[0249] In preferred embodiments, the at least one coding sequence comprises or consists at least one nucleic acid sequence encoding a SARS-CoV-2 NSP13 protein being identical or at least 70%, 80%, 85%, 86%, 87%, 88%, 89%, 90%, 91%, 92%, 93%, 94%, 95%, 96%, 97%, 98%, or 99% identical to any one of the nucleic acid sequences selected from SEQ ID NOs: 28029, 28150, 28280, 28401, or a fragment or variant of any of these sequences.

[0250] In further embodiments, the at least one coding sequence comprises or consists at least one nucleic acid sequence encoding a SARS-CoV-2 variant NSP13 protein being identical or at least 70%, 80%, 85%, 86%, 87%, 88%, 89%, 90%, 91%, 92%, 93%, 94%, 95%, 96%, 97%, 98%, or 99% identical to any one of the nucleic acid sequences selected from SEQ ID NOs: 28134-28142, 28255-28263, 28385-28393, 28506-28514, or a fragment or variant of any of these sequences. Further information regarding respective nucleic acid sequences is provided under <223> identifier of the respective SEQ ID NO in the sequence listing, and in Table 1, rows 222-230).

[0251] In embodiments, the at least one nucleic acid comprises or consists of a nucleic acid sequence encoding a Coronavirus NSP13 protein which is identical or at least 70%, 80%, 85%, 86%, 87%, 88%, 89%, 90%, 91%, 92%, 93%, 94%, 95%, 96%, 97%, 98%, or 99% identical to a nucleic acid sequence selected from SEQ ID NOs: 28150, 28280, 28401, 28255-28263, 28385-28393, 28506-28514, or a fragment or variant of any of these sequences. Optionally, said nucleic acid sequences comprise a cap1 structure as defined herein, and/or at least one, preferably all uracil nucleotides in said RNA sequences are replaced by pseudouridine (ψ) nucleotides and/or N1-methylpseudouridine (m1ψ) nucleotides. Further information regarding respective nucleic acid sequences is provided under <223> identifier of the respective SEQ ID NO in the sequence listing, and in Table 1, row 117, 222-230, see in particular Column D).

[0252] In embodiments, the at least one nucleic acid comprises or consists of a nucleic acid sequence encoding a SARS-CoV-2 NSP13 protein which is identical or at least 70%, 80%, 85%, 86%, 87%, 88%, 89%, 90%, 91%, 92%, 93%, 94%, 95%, 96%, 97%, 98%, or 99% identical to a nucleic acid sequence selected from SEQ ID NOs: 28150, 28280, 28401, or a fragment or variant of any of these sequences. Optionally, said nucleic acid sequences comprise a cap1 structure as defined herein, and/or at least one, preferably all uracil nucleotides in said RNA sequences are replaced by pseudouridine (ψ) nucleotides and/or N1-methylpseudouridine (m1ψ) nucleotides.

[0253] In further embodiments, the at least one nucleic acid comprises or consists of a nucleic acid sequence encoding a SARS-CoV-2 variant NSP13 which is identical or at least 70%, 80%, 85%, 86%, 87%, 88%, 89%, 90%, 91%, 92%, 93%, 94%, 95%, 96%, 97%, 98%, or 99% identical to a nucleic acid sequence selected from SEQ ID NOs: 28255-28263, 28385-28393, 28506-28514, or a fragment or variant of any of these sequences. Optionally, said nucleic acid sequences comprise a cap1 structure as defined herein, and/or at least one, preferably all uracil nucleotides in said RNA sequences are replaced by pseudouridine (ψ) nucleotides and/or N1-methylpseudouridine (m1ψp) nucleotides.

[0254] In preferred embodiments, the pharmaceutical composition comprises at least one nucleic acid comprising at least one coding sequence encoding at least one antigenic peptide or protein selected or derived from at least one Coronavirus NSP14 protein, or an immunogenic fragment or immunogenic variant thereof.

[0255] Preferred antigenic peptide or proteins selected or derived from a Coronavirus NSP14 as defined herein are provided in Table 1 (rows 118, 231-237). Further provided in Table 1 are preferred nucleic acid sequences (coding sequences, mRNA sequences) encoding said antigenic peptide or proteins.

[0256] In embodiments, the Coronavirus NSP14 protein comprises or consists of at least one of the amino acid sequences being identical or at least 70%, 80%, 85%, 86%, 87%, 88%, 89%, 90%, 91%, 92%, 93%, 94%, 95%, 96%, 97%, 98%, or 99% identical to any one of SEQ ID NOs: 27909, 28022-28028, or an immunogenic fragment or immunogenic variant of any of these. Further information regarding respective nucleic acid sequences is provided under <223> identifier of the respective SEQ ID NO in the sequence listing, and in Table 1, row 118, 231-237, see in particular Column B).

[0257] In preferred embodiments, the Coronavirus NSP14 is selected or derived from SARS-CoV-2 and comprises or consists of at least one of the amino acid sequences being identical or at least 70%, 80%, 85%, 86%, 87%, 88%, 89%, 90%, 91%, 92%, 93%, 94%, 95%, 96%, 97%, 98%, or 99% identical to SEQ ID NOs: 27909, or an immunogenic fragment or immunogenic variant thereof.

[0258] In further embodiments, the Coronavirus NSP14 protein selected or derived from SARS-CoV-2 is a variant NSP14 protein and comprises or consists of at least one of the amino acid sequences being identical or at least 70%, 80%, 85%, 86%, 87%, 88%, 89%, 90%, 91%, 92%, 93%, 94%, 95%, 96%, 97%, 98%, or 99% identical to any one of SEQ ID NOs: 28022-28028, or an immunogenic fragment or immunogenic variant of any of these.

[0259] According to preferred embodiments, the at least one nucleic acid of the composition comprises at least one coding sequence encoding at least one antigenic peptide or protein derived from a Coronavirus NSP14 as defined above, or fragments and variants thereof. In that context, any coding sequence encoding at least one Coronavirus NSP14 as defined herein, or fragments and variants thereof may be understood as suitable coding sequence and may therefore be comprised in the nucleic acid of the composition.

[0260] In preferred embodiments, the at least one nucleic acid comprises or consists of at least one coding sequence encoding at least one antigenic peptide or protein selected or derived from Coronavirus NSP14 as defined herein, preferably encoding any one of SEQ ID NOs: 27909, 28022-28028, or fragments of variants thereof. It has to be understood that, on nucleic acid level, any sequence (DNA or RNA sequence) which encodes an amino acid sequences being identical or at least 70%, 80%, 85%, 86%, 87%, 88%, 89%, 90%, 91%, 92%, 93%, 94%, 95%, 96%, 97%, 98%, or 99% identical to any one of SEQ ID NOs: 27909, 28022-28028, or fragments or variants thereof, may be selected and may accordingly be understood as suitable coding sequence of the invention. Further information regarding said amino acid sequences is also provided in Table 1, and under <223> identifier of the ST25 sequence listing of respective sequence SEQ ID NOs.

[0261] In preferred embodiments, the at least one coding sequence of the nucleic acid is a codon modified coding sequence as defined herein, wherein the amino acid sequence, that is Coronavirus NSP14, encoded by the at least one codon modified coding sequence, is preferably not being modified compared to the amino acid sequence encoded by the corresponding wild type or reference coding sequence.

[0262] In particularly preferred embodiments, the at least one coding sequence of the nucleic acid is a codon modified coding sequence, wherein the codon modified coding sequence is selected a G/C optimized coding sequence, a human codon usage adapted coding sequence, or a G/C modified coding sequence.

[0263] In embodiments, the at least one coding sequence comprises or consists at least one nucleic acid sequence encoding a Coronavirus NSP14 protein being identical or at least 70%, 80%, 85%, 86%, 87%, 88%, 89%, 90%, 91%, 92%, 93%, 94%, 95%, 96%, 97%, 98%, or 99% identical to any one of the nucleic acid sequences selected from SEQ ID NOs: 28030, 28151, 28281, 28402, 28143-28149, 28264-28270, 28394-28400, 28515-28521, or a fragment or variant of any of these sequences. Further information regarding respective nucleic acid sequences is provided under <223> identifier of the respective SEQ ID NO in the sequence listing, and in Table 1, row 118, 231-237, see in particular Column C).

[0264] In preferred embodiments, the at least one coding sequence comprises or consists at least one nucleic acid sequence encoding a SARS-CoV-2 NSP14 protein being identical or at least 70%, 80%, 85%, 86%, 87%, 88%, 89%, 90%, 91%, 92%, 93%, 94%, 95%, 96%, 97%, 98%, or 99% identical to any one of the nucleic acid sequences selected from SEQ ID NOs: 28030, 28151, 28281, 28402, or a fragment or variant of any of these sequences.

[0265] In further embodiments, the at least one coding sequence comprises or consists at least one nucleic acid sequence encoding a SARS-CoV-2 variant NSP14 protein being identical or at least 70%, 80%, 85%, 86%, 87%, 88%, 89%, 90%, 91%, 92%, 93%, 94%, 95%, 96%, 97%, 98%, or 99% identical to any one of the nucleic acid sequences selected from SEQ ID NOs: 28143-28149, 28264-28270, 28394-28400, 28515-28521, or a fragment or variant of any of these sequences. Further information regarding respective nucleic acid sequences is provided under <223> identifier of the respective SEQ ID NO in the sequence listing, and in Table 1, rows 231-237).

[0266] In embodiments, the at least one nucleic acid comprises or consists of a nucleic acid sequence encoding a Coronavirus NSP14 protein which is identical or at least 70%, 80%, 85%, 86%, 87%, 88%, 89%, 90%, 91%, 92%, 93%, 94%, 95%, 96%, 97%, 98%, or 99% identical to a nucleic acid sequence selected from SEQ ID NOs: 28151, 28281, 28402, 28264-28270, 28394-28400, 28515-28521, or a fragment or variant of any of these sequences. Optionally, said nucleic acid sequences comprise a cap1 structure as defined herein, and/or at least one, preferably all uracil nucleotides in said RNA sequences are replaced by pseudouridine (ψ) nucleotides and/or N1-methylpseudouridine (m1ψ) nucleotides. Further information regarding respective nucleic acid sequences is provided under <223> identifier of the respective SEQ ID NO in the sequence listing, and in Table 1, row 118, 231-237, see in particular Column D).

[0267] In embodiments, the at least one nucleic acid comprises or consists of a nucleic acid sequence encoding a SARS-CoV-2 NSP14 protein which is identical or at least 70%, 80%, 85%, 86%, 87%, 88%, 89%, 90%, 91%, 92%, 93%, 94%, 95%, 96%, 97%, 98%, or 99% identical to a nucleic acid sequence selected from SEQ ID NOs: 28151, 28281, 28402, or a fragment or variant of any of these sequences. Optionally, said nucleic acid sequences comprise a cap1 structure as defined herein, and/or at least one, preferably all uracil nucleotides in said RNA sequences are replaced by pseudouridine (ψ) nucleotides and/or N1-methylpseudouridine (m1ψ) nucleotides.

[0268] Nucleic Acid Encoding a Coronavirus Accessory Protein:

[0269] In embodiments, the pharmaceutical composition comprises at least one nucleic acid comprising at least one coding sequence encoding at least one antigenic peptide or protein selected or derived from at least one accessory protein selected from ORF3a, ORF3b, ORF6, ORF7a, ORF7b, ORF8, ORF8a, ORF8b, ORF9b, and/or ORF10 or an immunogenic fragment or immunogenic variant of any of these.

[0270] In preferred embodiments, the pharmaceutical composition comprises the at least one nucleic acid comprising at least one coding sequence encoding at least one antigenic peptide or protein selected or derived from at least one Coronavirus accessory protein selected from ORF3a and/or ORF8 or an immunogenic fragment or immunogenic variant of any of these.

[0271] In preferred embodiments, the pharmaceutical composition comprises at least one nucleic acid comprising at least one coding sequence encoding at least one antigenic peptide or protein selected or derived from at least one Coronavirus ORF3a protein, or an immunogenic fragment or immunogenic variant thereof.

[0272] Preferred antigenic peptide or proteins selected or derived from a Coronavirus ORF3/ORF3a protein as defined herein are provided in Table 1 (rows 95-108, 202-209). Further provided in Table 1 are preferred nucleic acid sequences (coding sequences, mRNA sequences) encoding said antigenic peptide or proteins.

[0273] In embodiments, the Coronavirus ORF3a protein comprises or consists of at least one of the amino acid sequences being identical or at least 70%, 80%, 85%, 86%, 87%, 88%, 89%, 90%, 91%, 92%, 93%, 94%, 95%, 96%, 97%, 98%, or 99% identical to any one of SEQ ID NOs: 16672-16990, 27993-28000 or an immunogenic fragment or immunogenic variant of any of these. Further information regarding respective amino acid sequences is provided under <223> identifier of the respective SEQ ID NO in the sequence listing, and in Table 1, rows 95-108, 202-209, see in particular Column B).

[0274] In preferred embodiments, the Coronavirus ORF3a protein is selected or derived from SARS-CoV-2 and comprises or consists of at least one of the amino acid sequences being identical or at least 70%, 80%, 85%, 86%, 87%, 88%, 89%, 90%, 91%, 92%, 93%, 94%, 95%, 96%, 97%, 98%, or 99% identical to any one of SEQ ID NOs: 16684-16990, or an immunogenic fragment or immunogenic variant of any of these, Particularly preferred amino acid sequences in the context of the invention are provided in Table 9.

[0275] In further embodiments, the Coronavirus ORF3a protein selected or derived from SARS-CoV-2 is a variant ORF3a protein and comprises or consists of at least one of the amino acid sequences being identical or at least 70%, 80%, 85%, 86%, 87%, 88%, 89%, 90%, 91%, 92%, 93%, 94%, 95%, 96%, 97%, 98%, or 99% identical to any one of SEQ ID NOs: 27993-28000, or an immunogenic fragment or immunogenic variant of any of these.

[0276] According to preferred embodiments, the at least one nucleic acid of the composition comprises at least one coding sequence encoding at least one antigenic peptide or protein derived from a Coronavirus ORF3a protein as defined above, or fragments and variants thereof. In that context, any coding sequence encoding at least one Coronavirus ORF3a protein as defined herein, or fragments and variants thereof may be understood as suitable coding sequence and may therefore be comprised in the nucleic acid of the composition.

[0277] In preferred embodiments, the at least one nucleic acid comprises or consists of at least one coding sequence encoding at least one antigenic peptide or protein selected or derived from Coronavirus ORF3a protein as defined herein, preferably encoding any one of SEQ ID NOs: 16672-16990, 27993-28000, or fragments of variants thereof. It has to be understood that, on nucleic acid level, any sequence (DNA or RNA sequence) which encodes an amino acid sequences being identical or at least 70%, 80%, 85%, 86%, 87%, 88%, 89%, 90%, 91%, 92%, 93%, 94%, 95%, 96%, 97%, 98%, or 99% identical to any one of SEQ ID NOs: 16672-16990, 27993-28000, or fragments or variants thereof, may be selected and may accordingly be understood as suitable coding sequence of the invention. Further information regarding said amino acid sequences is also provided in Table 1, and under <223> identifier of the ST25 sequence listing of respective sequence SEQ ID NOs.

[0278] In preferred embodiments, the at least one coding sequence of the nucleic acid is a codon modified coding sequence as defined herein, wherein the amino acid sequence, that is Coronavirus ORF3a protein, encoded by the at least one codon modified coding sequence, is preferably not being modified compared to the amino acid sequence encoded by the corresponding wild type or reference coding sequence.

[0279] In particularly preferred embodiments, the at least one coding sequence of the nucleic acid is a codon modified coding sequence, wherein the codon modified coding sequence is selected a G/C optimized coding sequence, a human codon usage adapted coding sequence, or a G/C modified coding sequence.

[0280] In embodiments, the at least one coding sequence comprises or consists at least one nucleic acid sequence encoding a Coronavirus ORF3a protein being identical or at least 70%, 80%, 85%, 86%, 87%, 88%, 89%, 90%, 91%, 92%, 93%, 94%, 95%, 96%, 97%, 98%, or 99% identical to any one of the nucleic acid sequences selected from SEQ ID NOs: 18549-18867, 20426-20744, 22303-22621, 28114-28121, 28235-28242, 28278, 28365-28372, 28486-28493, or a fragment or variant of any of these sequences. Further information regarding respective nucleic acid sequences is provided under <223> identifier of the respective SEQ ID NO in the sequence listing, and in Table 1, rows 95-108, 202-209, see in particular Column C).

[0281] In preferred embodiments, the at least one coding sequence comprises or consists at least one nucleic acid sequence encoding a SARS-CoV-2 ORF3a protein being identical or at least 70%, 80%, 85%, 86%, 87%, 88%, 89%, 90%, 91%, 92%, 93%, 94%, 95%, 96%, 97%, 98%, or 99% identical to any one of the nucleic acid sequences selected from SEQ ID NOs: 18561-18867, 20438-20744, 22315-22621 or a fragment or variant of any of these sequences. Particularly preferred nucleic acid sequences encoding SARS-CoV-2 ORF3a in the context of the invention are provided in Table 9.

[0282] In further embodiments, the at least one coding sequence comprises or consists at least one nucleic acid sequence encoding a SARS-CoV-2 variant ORF3a protein being identical or at least 70%, 80%, 85%, 86%, 87%, 88%, 89%, 90%, 91%, 92%, 93%, 94%, 95%, 96% 97% 98%, or 99% identical to any one of the nucleic acid sequences selected from SEQ ID NOs: 28114-28121, 28235-28242, 28365-28372, 28486-28493 or a fragment or variant of any of these sequences. Further information regarding respective nucleic acid sequences is provided under <223> identifier of the respective SEQ ID NO in the sequence listing, and in Table 1, rows 202-209).

[0283] In embodiments, the at least one nucleic acid comprises or consists of a nucleic acid sequence encoding a Coronavirus ORF3a protein which is identical or at least 70%, 80%, 85%, 86%, 87%, 88%, 89%, 90%, 91%, 92%, 93%, 94%, 95%, 96%, 97%, 98%, or 99% identical to a nucleic acid sequence selected from SEQ ID NOs: 20426-20744, 22303-22621, 28235-28242, 28278, 28365-28372, 28486-28493 or a fragment or variant of any of these sequences. Optionally, said nucleic acid sequences comprise a cap1 structure as defined herein, and/or at least one, preferably all uracil nucleotides in said RNA sequences are replaced by pseudouridine (ψ) nucleotides and/or N1-methylpseudouridine (m1ψ) nucleotides. Further information regarding respective nucleic acid sequences is provided under <223> identifier of the respective SEQ ID NO in the sequence listing, and in Table 1, rows 95-108, 202-209, see in particular Column D).

[0284] In embodiments, the at least one nucleic acid comprises or consists of a nucleic acid sequence encoding a SARS-CoV-2 ORF3a protein which is identical or at least 70%, 80%, 85%, 86%, 87%, 88%, 89%, 90%, 91%, 92%, 93%, 94%, 95%, 96%, 97%, 98%, or 99% identical to a nucleic acid sequence selected from SEQ ID NOs: 20438-20744, 22315-22621, or a fragment or variant of any of these sequences. Optionally, said nucleic acid sequences comprise a cap1 structure as defined herein, and/or at least one, preferably all uracil nucleotides in said RNA sequences are replaced by pseudouridine (ψ) nucleotides and/or N1-methylpseudouridine (m1ψ) nucleotides. Particularly preferred mRNA sequences encoding SARS-CoV-2 ORF3a in the context of the invention are provided in Table 9.

[0285] In further embodiments, the at least one nucleic acid comprises or consists of a nucleic acid sequence encoding a SARS-CoV-2 variant ORF3a protein which is identical or at least 70%, 80%, 85%, 86%, 87%, 88%, 89%, 90%, 91%, 92%, 93%, 94%, 95%, 96%, 97%, 98%, or 99% identical to a nucleic acid sequence selected from SEQ ID NOs: 28235-28242, 28365-28372, 28486-28493 or a fragment or variant of any of these sequences. Optionally, said nucleic acid sequences comprise a cap1 structure as defined herein, and/or at least one, preferably all uracil nucleotides in said RNA sequences are replaced by pseudouridine (ψ) nucleotides and/or N1-methylpseudouridine (m1ψ) nucleotides.

[0286] In preferred embodiments, the pharmaceutical composition comprises at least one nucleic acid comprising at least one coding sequence encoding at least one antigenic peptide or protein selected or derived from at least one Coronavirus ORF8 protein, or an immunogenic fragment or immunogenic variant thereof.

[0287] Preferred antigenic peptide or proteins selected or derived from a Coronavirus ORF8 protein as defined herein are provided in Table 1 (rows 109-116, 210-221). Further provided in Table 1 are preferred nucleic acid sequences (coding sequences, mRNA sequences) encoding said antigenic peptide or proteins.

[0288] In embodiments, the Coronavirus ORF8 protein comprises or consists of at least one of the amino acid sequences being identical or at least 70%, 80%, 85%, 86%, 87%, 88%, 89%, 90%, 91%, 92%, 93%, 94%, 95%, 96%, 97%, 98%, or 99% identical to any one of SEQ ID NOs: 16991-17097, 28001-28012, or an immunogenic fragment or immunogenic variant of any of these. Further information regarding respective amino acid sequences is provided under <223> identifier of the respective SEQ ID NO in the sequence listing, and in Table 1, row 109-116, 210-221, see in particular Column B).

[0289] In preferred embodiments, the Coronavirus ORF8 protein is selected or derived from SARS-CoV-2 and comprises or consists of at least one of the amino acid sequences being identical or at least 70%, 80%, 85%, 86%, 87%, 88%, 89%, 90%, 91%, 92%, 93%, 94%, 95%, 96%, 97%, 98%, or 99% identical to any one of SEQ ID NOs: 16997-17097, or an immunogenic fragment or immunogenic variant of any of these, Particularly preferred amino acid sequences in the context of the invention are provided in Table 9.

[0290] In further embodiments, the Coronavirus ORF8 protein selected or derived from SARS-CoV-2 is a variant ORF8 protein and comprises or consists of at least one of the amino acid sequences being identical or at least 70%, 80%, 85%, 86%, 87%, 88%, 89%, 90%, 91%, 92%, 93%, 94%, 95%, 96%, 97%, 98%, or 99% identical to any one of SEQ ID NOs: 28001-28012, or an immunogenic fragment or immunogenic variant of any of these.

[0291] According to preferred embodiments, the at least one nucleic acid of the composition comprises at least one coding sequence encoding at least one antigenic peptide or protein derived from a Coronavirus ORF8 protein as defined above, or fragments and variants thereof. In that context, any coding sequence encoding at least one Coronavirus ORF8 protein as defined herein, or fragments and variants thereof may be understood as suitable coding sequence and may therefore be comprised in the nucleic acid of the composition.

[0292] In preferred embodiments, the at least one nucleic acid comprises or consists of at least one coding sequence encoding at least one antigenic peptide or protein selected or derived from Coronavirus ORF8 protein as defined herein, preferably encoding any one of SEQ ID NOs: 16991-17097, 28001-28012, or fragments of variants thereof. It has to be understood that, on nucleic acid level, any sequence (DNA or RNA sequence) which encodes an amino acid sequences being identical or at least 70%, 80%, 85%, 86%, 87%, 88%, 89%, 90%, 91%, 92%, 93%, 94%, 95%, 96%, 97%, 98%, or 99% identical to any one of SEQ ID NOs: 16991-17097, 28001-28012, or fragments or variants thereof, may be selected and may accordingly be understood as suitable coding sequence of the invention. Further information regarding said amino acid sequences is also provided in Table 1, and under <223> identifier of the ST25 sequence listing of respective sequence SEQ ID NOs.

[0293] In preferred embodiments, the at least one coding sequence of the nucleic acid is a codon modified coding sequence as defined herein, wherein the amino acid sequence, that is Coronavirus ORF8 protein, encoded by the at least one codon modified coding sequence, is preferably not being modified compared to the amino acid sequence encoded by the corresponding wild type or reference coding sequence.

[0294] In particularly preferred embodiments, the at least one coding sequence of the nucleic acid is a codon modified coding sequence, wherein the codon modified coding sequence is selected a G/C optimized coding sequence, a human codon usage adapted coding sequence, or a G/C modified coding sequence.

[0295] In embodiments, the at least one coding sequence comprises or consists at least one nucleic acid sequence encoding a Coronavirus ORF8 protein being identical or at least 70%, 80%, 85%, 86%, 87%, 88%, 89%, 90%, 91%, 92%, 93%, 94%, 95%, 96%, 97%, 98%, or 99% identical to any one of the nucleic acid sequences selected from SEQ ID NOs: 18868-18974, 20745-20851, 22622-22728, 28122-28133, 28243-28254, 28373-28384, 28494-28505, or a fragment or variant of any of these sequences. Further information regarding respective nucleic acid sequences is provided under <223> identifier of the respective SEQ ID NO in the sequence listing, and in Table 1, row 109-116, 210-221, see in particular Column C).

[0296] In preferred embodiments, the at least one coding sequence comprises or consists at least one nucleic acid sequence encoding a SARS-CoV-2 ORF8 protein being identical or at least 70%, 80%, 85%, 86%, 87%, 88%, 89%, 90%, 91%, 92%, 93%, 94%, 95%, 96%, 97%, 98%, or 99% identical to any one of the nucleic acid sequences selected from SEQ ID NOs: 18874-18974, 20751-20851, 22628-22728, or a fragment or variant of any of these sequences. Particularly preferred nucleic acid sequences encoding SARS-CoV-2 ORF8 in the context of the invention are provided in Table 9.

[0297] In further embodiments, the at least one coding sequence comprises or consists at least one nucleic acid sequence encoding a SARS-CoV-2 variant ORF8 protein being identical or at least 70%, 80%, 85%, 86%, 87%, 88%, 89%, 90%, 91%, 92%, 93%, 94%, 95%, 96%, 97%, 98%, or 99% identical to any one of the nucleic acid sequences selected from SEQ ID NOs: 28122-28133, 28243-28254, 28373-28384, 28494-28505, or a fragment or variant of any of these sequences. Further information regarding respective nucleic acid sequences is provided under <223> identifier of the respective SEQ ID NO in the sequence listing, and in Table 1, rows 210-221).

[0298] In embodiments, the at least one nucleic acid comprises or consists of a nucleic acid sequence encoding a Coronavirus ORF8 protein which is identical or at least 70%, 80%, 85%, 86%, 87%, 88%, 89%, 90%, 91%, 92%, 93%, 94%, 95%, 96%, 97%, 98%, or 99% identical to a nucleic acid sequence selected from SEQ ID NOs: 20745-20851, 22622-22728, 28243-28254, 28373-28384, 28494-28505, or a fragment or variant of any of these sequences. Optionally, said nucleic acid sequences comprise a cap1 structure as defined herein, and/or at least one, preferably all uracil nucleotides in said RNA sequences are replaced by pseudouridine (ψ) nucleotides and/or N1-methylpseudouridine (m1ψ) nucleotides. Further information regarding respective nucleic acid sequences is provided under <223> identifier of the respective SEQ ID NO in the sequence listing, and in Table 1, row 109-116, 210-221, see in particular Column D).

[0299] In embodiments, the at least one nucleic acid comprises or consists of a nucleic acid sequence encoding a SARS-CoV-2 ORF8 protein which is identical or at least 70%, 80%, 85%, 86%, 87%, 88%, 89%, 90%, 91%, 92%, 93%, 94%, 95%, 96%, 97%, 98%, or 99% identical to a nucleic acid sequence selected from SEQ ID NOs: 20751-20851, 22628-22728, or a fragment or variant of any of these sequences. Optionally, said nucleic acid sequences comprise a cap1 structure as defined herein, and/or at least one, preferably all uracil nucleotides in said RNA sequences are replaced by pseudouridine (ψ) nucleotides and/or N1-methylpseudouridine (m1ψ) nucleotides. Particularly preferred mRNA sequences encoding SARS-CoV-2 ORF8 in the context of the invention are provided in Table 9.

[0300] In further embodiments, the at least one nucleic acid comprises or consists of a nucleic acid sequence encoding a SARS-CoV-2 variant ORF8 protein which is identical or at least 70%, 80%, 85%, 86%, 87%, 88%, 89%, 90%, 91%, 92%, 93%, 94%, 95%, 96%, 97%, 98%, or 99% identical to a nucleic acid sequence selected from SEQ ID NOs: 28254, 28373-28384, 28494-28505, or a fragment or variant of any of these sequences. Optionally, said nucleic acid sequences comprise a cap1 structure as defined herein, and/or at least one, preferably all uracil nucleotides in said RNA sequences are replaced by pseudouridine (ψ) nucleotides and/or N1-methylpseudouridine (m1ψ) nucleotides.

[0301] Nucleic Acid Encoding a Coronavirus E Protein:

[0302] In embodiments, the pharmaceutical composition comprises at least one nucleic acid comprising at least one coding sequence encoding at least one antigenic peptide or protein selected or derived from at least one Coronavirus envelope (E) protein, or an immunogenic fragment or immunogenic variant thereof.

[0303] In preferred embodiments, the Coronavirus E protein comprises or consists of at least one of the amino acid sequences being identical or at least 70%, 80%, 85%, 86%, 87%, 88%, 89%, 90%, 91%, 92%, 93%, 94%, 95%, 96%, 97%, 98%, or 99% identical to any one of SEQ ID NOs: 15675-15719, 27940-27947, or an immunogenic fragment or immunogenic variant of any of these. Further information regarding respective amino acid sequences is provided under <223> identifier of the respective SEQ ID NO in the sequence listing, and in Table 1, row 33-48, 149-156, see in particular Column B).

[0304] In preferred embodiments, the at least one coding sequence comprises or consists at least one nucleic acid sequence encoding a Coronavirus E protein being identical or at least 70%, 80%, 85%, 86%, 87%, 88%, 89%, 90%, 91%, 92%, 93%, 94%, 95%, 96%, 97%, 98%, or 99% identical to any one of the nucleic acid sequences selected from SEQ ID NOs: 17552-17596, 19429-19473, 21306-21350, 28061-28068, 28182-28189, 28312-28319, 28433-28440, or a fragmentor variant ofany of these sequences. Further information regarding respective amino acid sequences is provided under <223> identifier of the respective SEQ ID NO in the sequence listing, and in Table 1, row 33-48, 149-156, see in particular Column C and D).

[0305] Preferred antigenic peptide or proteins selected or derived from a Coronavirus antigen constructs as defined above are provided in Table U (rows 1 to 237). Therein, each row 1 to 237 corresponds to a suitable Coronavirus constructs. Column A of Table provides a description of the Coronavirus antigen constructs. Column B of Table provides protein (amino acid) SEQ ID NOs of respective Coronavirus antigen constructs encoded by the nucleic acids. Column C of Table 1 provides SEQ ID NO of the corresponding G/C optimized nucleic acid coding sequences (opt1, gc). Column D of Table 1 provided respective suitable mRNA sequences. Further information for each sequence ID is provided under <223> identifier of the respective SEQ ID NOs in the sequence listing. Particularly preferred sequences in the context of the invention are provided in Table 9.

TABLE 1
Coronavirus constructs (amino acid sequences, nucleic acid coding sequences, mRNA):

| | | B | C | |
|---|---|---|---|---|
| | | SEQ ID | SEQ ID | D |
| | A | NO: | NO: CDS | SEQ ID NO: |
| Row | Name | Protein | opt1 (gc) | mRNA |
| 1 | MERS-COV/MERS-COV-Jeddah-human-1 membrane protein | 15221 | 17098 | 18975, 20852 |
| 2 | MERS-COV/AI-Hasa_4_2013 membrane protein | 15222 | 17099 | 18976, 20853 |
| 3 | MERS-COV/Riyadh_14_2013 membrane protein | 15223 | 17100 | 18977, 20854 |
| 4 | MERS-COV/England 1 membrane protein | 15224 | 17101 | 18978, 20855 |
| 5 | SARS-COV/Tor2 membrane protein | 15225 | 17102 | 18979, 20856 |
| 6 | HCoV/OC43 membrane protein | 15226 | 17103 | 18980, 20857 |
| 7 | HCoV/HKU1 membrane protein | 15227 | 17104 | 18981, 20858 |
| 8 | HCoV/229E/BN1/GER/2015 membrane protein | 15228 | 17105 | 18982, 20859 |
| 9 | HCoV/NL63/RPTEC/2004 membrane protein | 15229 | 17106 | 18983, 20860 |
| 10 | Bat SARS-like CoV/WIV1 membrane protein | 15230 | 17107 | 18984, 20861 |
| 11 | BatCoV/HKU9-1 BF_0051 membrane protein | 15231 | 17108 | 18985, 20862 |
| 12 | PDCoV/Swine/Thailand/S5011/2015 membrane protein | 15232 | 17109 | 18986, 20863 |
| 13 | PEDV/NPL-PEDv/2013/P10 membrane protein | 15233 | 17110 | 18987, 20864 |
| 14 | MHV/A59 membrane protein | 15234 | 17111 | 18988, 20865 |
| 15 | SARS-COV-2/Wuhan-Hu-1 membrane protein | 15235 | 17112 | 18989, 20866, |
| | | | | 28271 |
| 16 | SARS-COV-2 “divers strains/isolates” membrane protein | 15236- | 17113- | 18990-19049, |
| | | 15295 | 17172 | 20867-20926 |
| 17 | MERS-COV/MERS-COV-Jeddah-human-1 nucleocapsid protein | 15296 | 17173 | 19050, 20927 |
| 18 | MERS-COV/Al-Hasa_4_2013 nucleocapsid protein | 15297 | 17174 | 19051, 20928 |
| 19 | MERS-COV/Riyadh_14_2013 nucleocapsid protein | 15298 | 17175 | 19052, 20929 |
| 20 | MERS-COV/England 1 nucleocapsid protein | 15299 | 17176 | 19053, 20930 |
| 21 | SARS-COV/Tor2 nucleocapsid protein | 15300 | 17177 | 19054, 20931 |
| 22 | HCoV/OC43 nucleocapsid protein | 15301 | 17178 | 19055, 20932 |
| 23 | HCoV/HKU1 nucleocapsid protein | 15302 | 17179 | 19056, 20933 |
| 24 | HCoV/229E/BN1/GER/2015 nucleocapsid protein | 15303 | 17180 | 19057, 20934 |
| 25 | HCoV/NL63/RPTEC/2004 nucleocapsid protein | 15304 | 17181 | 19058, 20935 |
| 26 | Bat SARS-like CoV/WIV1 nucleocapsid protein | 15305 | 17182 | 19059, 20936 |
| 27 | BatCoV/HKU9-1 BF_0051 nucleocapsid protein | 15306 | 17183 | 19060, 20937 |
| 28 | PDCoV/Swine/Thailand/S5011/2015 nucleocapsid protein | 15307 | 17184 | 19061, 20938 |
| 29 | PEDV/NPL-PEDv/2013/P10 nucleocapsid protein | 15308 | 17185 | 19062, 20939 |
| 30 | MHV/A59 nucleocapsid protein | 15309 | 17186 | 19063, 20940 |
| 31 | SARS-COV-2/Wuhan-Hu-1 nucleocapsid protein | 15310 | 17187 | 19064, 20941, |
| | | | | 28272 |
| 32 | SARS-COV-2 “divers strains/isolates” nucleocapsid protein | 15311- | 17188- | 19065-19428, |
| | | 15674 | 17551 | 20942-21305 |
| 33 | MERS-COV/MERS-COV-Jeddah-human-1 envelope protein | 15675 | 17552 | 19429, 21306 |
| 34 | MERS-COV/Al-Hasa_4_2013 envelope protein | 15676 | 17553 | 19430, 21307 |
| 35 | MERS-COV/Riyadh_14_2013 envelope protein | 15677 | 17554 | 19431, 21308 |
| 36 | MERS-COV/England 1 envelope protein | 15678 | 17555 | 19432, 21309 |
| 37 | SARS-COV/Tor2 envelope protein | 15679 | 17556 | 19433, 21310 |
| 38 | HCoV/OC43 envelope protein | 15680 | 17557 | 19434, 21311 |
| 39 | HCoV/HKU1 envelope protein | 15681 | 17558 | 19435, 21312 |
| 40 | HCoV/229E/BN1/GER/2015 envelope protein | 15682 | 17559 | 19436, 21313 |
| 41 | HCoV/NL63/RPTEC/2004 envelope protein | 15683 | 17560 | 19437, 21314 |
| 42 | Bat SARS-like CoV/WIV1 envelope protein | 15684 | 17561 | 19438, 21315 |
| 43 | BatCoV/HKU9-1 BF_0051 envelope protein | 15685 | 17562 | 19439, 21316 |
| 44 | PDCoV/Swine/Thailand/S5011/2015 envelope protein | 15686 | 17563 | 19440, 21317 |
| 45 | PEDV/NPL-PEDv/2013/P10 envelope protein | 15687 | 17564 | 19441, 21318 |
| 46 | MHV/A59 envelope protein | 15688 | 17565 | 19442, 21319 |
| 47 | SARS-CoV-2/Wuhan-Hu-1 envelope protein | 15689 | 17566 | 19443, 21320, |
| | | | | 28273 |
| 48 | SARS-COV-2 “divers strains/isolates” envelope protein | 15690- | 17567- | 19444-19473, |
| | | 15719 | 17596 | 21321-21350 |
| 49 | MERS-COV/MERS-COV-Jeddah-human-1 non-structural protein 3 | 15720 | 17597 | 19474, 21351 |
| 50 | MERS-COV/AI-Hasa_4_2013 non-structural protein 3 | 15721 | 17598 | 19475, 21352 |
| 51 | MERS-COV/Riyadh_14_2013 non-structural protein 3 | 15722 | 17599 | 19476, 21353 |
| 52 | MERS-COV/England 1 non-structural protein 3 | 15723 | 17600 | 19477, 21354 |
| 53 | SARS-COV/Tor2 non-structural protein 3 | 15724 | 17601 | 19478, 21355 |
| 54 | HCoV/OC43 non-structural protein 3 | 15725 | 17602 | 19479, 21356 |
| 55 | HCoV/HKU1 non-structural protein 3 | 15726 | 17603 | 19480, 21357 |
| 56 | HCoV/229E/BN1/GER/2015 non-structural protein 3 | 15727 | 17604 | 19481, 21358 |
| 57 | HCoV/NL63/RPTEC/2004 non-structural protein 3 | 15728 | 17605 | 19482, 21359 |
| 58 | Bat SARS-like CoV/WIV1 non-structural protein 3 | 15729 | 17606 | 19483, 21360 |
| 59 | BatCoV/HKU9-1 BF_0051 non-structural protein 3 | 15730 | 17607 | 19484, 21361 |
| 60 | PEDV/NPL-PEDv/2013/P10 non-structural protein 3 | 15731 | 17608 | 19485, 21362 |
| 61 | MHV/A59 non-structural protein 3 | 15732 | 17609 | 19486, 21363 |
| 62 | SARS-COV-2/Wuhan-Hu-1 non-structural protein 3 | 15733 | 17610 | 19487, 21364, |
| | | | | 28274 |
| 63 | SARS-COV-2/Wuhan/WIV05/2019 non-structural protein 3 | 15734 | 17611 | 19488, 21365, |
| | | | | 28275 |
| 64 | SARS-COV-2 “divers strains/isolates” non-structural protein 3 | 15735- | 17612- | 19489-20155, |
| | | 16401 | 18278 | 21366-22032 |
| 65 | MERS-COV/MERS-COV-Jeddah-human-1 non-structural protein 4 | 16402 | 18279 | 20156, 22033 |
| 66 | MERS-COV/AI-Hasa_4_2013 non-structural protein 4 | 16403 | 18280 | 20157, 22034 |
| 67 | MERS-COV/Riyadh_14_2013 non-structural protein 4 | 16404 | 18281 | 20158, 22035 |
| 68 | MERS-COV/England 1 non-structural protein 4 | 16405 | 18282 | 20159, 22036 |
| 69 | SARS-COV/Tor2 non-structural protein 4 | 16406 | 18283 | 20160, 22037 |
| 70 | HCoV/OC43 non-structural protein 4 | 16407 | 18284 | 20161, 22038 |
| 71 | HCoV/HKU1 non-structural protein 4 | 16408 | 18285 | 20162, 22039 |
| 72 | HCoV/229E/BN1/GER/2015 non-structural protein 4 | 16409 | 18286 | 20163, 22040 |
| 73 | HCoV/NL63/RPTEC/2004 non-structural protein 4 | 16410 | 18287 | 20164, 22041 |
| 74 | Bat SARS-like CoV/WIV1 non-structural protein 4 | 16411 | 18288 | 20165, 22042 |
| 75 | BatCoV/HKU9-1 BF_0051 non-structural protein 4 | 16412 | 18289 | 20166, 22043 |
| 76 | PEDV/NPL-PEDv/2013/P10 non-structural protein 4 | 16413 | 18290 | 20167, 22044 |
| 77 | MHV/A59 non-structural protein 4 | 16414 | 18291 | 20168, 22045 |
| 78 | SARS-COV-2/Wuhan-Hu-1 non-structural protein 4 | 16415 | 18292 | 20169, 22046, |
| | | | | 28276 |
| 79 | SARS-COV-2 “divers strains/isolates” non-structural protein 4 | 16416- | 18293- | 20170-20322, |
| | | 16568 | 18445 | 22047-22199 |
| 80 | MERS-COV/MERS-COV-Jeddah-human-1 non-structural protein 6 | 16569 | 18446 | 20323, 22200 |
| 81 | MERS-COV/Al-Hasa_4_2013 non-structural protein 6 | 16570 | 18447 | 20324, 22201 |
| 82 | MERS-COV/Riyadh_14_2013 non-structural protein 6 | 16571 | 18448 | 20325, 22202 |
| 83 | MERS-COV/England 1 non-structural protein 6 | 16572 | 18449 | 20326, 22203 |
| 84 | SARS-COV/Tor2 non-structural protein 6 | 16573 | 18450 | 20327, 22204 |
| 85 | HCoV/OC43 non-structural protein 6 | 16574 | 18451 | 20328, 22205 |
| 86 | HCoV/HKU1 non-structural protein 6 | 16575 | 18452 | 20329, 22206 |
| 87 | HCoV/229E/BN1/GER/2015 non-structural protein 6 | 16576 | 18453 | 20330, 22207 |
| 88 | HCoV/NL63/RPTEC/2004 non-structural protein 6 | 16577 | 18454 | 20331, 22208 |
| 89 | Bat SARS-like CoV/WIV1 non-structural protein 6 | 16578 | 18455 | 20332, 22209 |
| 90 | BatCoV/HKU9-1 BF_0051 non-structural protein 6 | 16579 | 18456 | 20333, 22210 |
| 91 | PEDV/NPL-PEDv/2013/P10 non-structural protein 6 | 16580 | 18457 | 20334, 22211 |
| 92 | MHV/A59 non-structural protein 6 | 16581 | 18458 | 20335, 22212 |
| 93 | SARS-COV-2/Wuhan-Hu-1 non-structural protein 6 | 16582 | 18459 | 20336, 22213, |
| | | | | 28277 |
| 94 | SARS-COV-2 “divers strains/isolates” non-structural protein 6 | 16583- | 18460- | 20337-20425, |
| | | 16671 | 18548 | 22214-22302 |
| 95 | MERS-COV/MERS-COV-Jeddah-human-1 ORF3 protein | 16672 | 18549 | 20426, 22303 |
| 96 | MERS-COV/Al-Hasa_4_2013 ORF3 protein | 16673 | 18550 | 20427, 22304 |
| 97 | MERS-COV/Riyadh_14_2013 ORF3 protein | 16674 | 18551 | 20428, 22305 |
| 98 | MERS-COV/England 1 ORF3 protein | 16675 | 18552 | 20429, 22306 |
| 99 | SARS-COV/Tor2 ORF3 protein | 16676 | 18553 | 20430, 22307 |
| 100 | HCoV/OC43 ORF3 protein | 16677 | 18554 | 20431, 22308 |
| 101 | HCoV/HKU1 ORF3 protein | 16678 | 18555 | 20432, 22309 |
| 102 | HCoV/229E/BN1/GER/2015 ORF3 protein | 16679 | 18556 | 20433, 22310 |
| 103 | HCoV/NL63/RPTEC/2004 ORF3 protein | 16680 | 18557 | 20434, 22311 |
| 104 | Bat SARS-like CoV/WIV1 ORF3 protein | 16681 | 18558 | 20435, 22312 |
| 105 | BatCoV/HKU9-1 BF_0051 ORF3 protein | 16682 | 18559 | 20436, 22313 |
| 106 | PEDV/NPL-PEDv/2013/P10 ORF3 protein | 16683 | 18560 | 20437, 22314 |
| 107 | SARS-COV-2/Vuhan-Hu-1 ORF3a protein | 16684 | 18561 | 20438, 22315, |
| | | | | 28278 |
| 108 | SARS-COV-2 “divers strains/isolates” ORF3a protein | 16685- | 18562- | 20439-20744, |
| | | 16990 | 18867 | 22316-22621 |
| 109 | MERS-COV/MERS-COV-Jeddah-human-1 ORF8b protein | 16991 | 18868 | 20745, 22622 |
| 110 | MERS-COV/Al-Hasa_4_2013 ORF8b protein | 16992 | 18869 | 20746, 22623 |
| 111 | MERS-COV/Riyadh_14_2013 ORF8b protein | 16993 | 18870 | 20747, 22624 |
| 112 | SARS-COV/Tor2 ORF8a protein | 16994 | 18871 | 20748, 22625 |
| 113 | SARS-COV/Tor2 ORF8b protein | 16995 | 18872 | 20749, 22626 |
| 114 | Bat SARS-like CoV/WIV1 ORF8 protein | 16996 | 18873 | 20750, 22627 |
| 115 | SARS-COV-2/Wuhan-Hu-1 ORF8 protein | 16997 | 18874 | 20751, 22628, |
| | | | | 28279 |
| 116 | SARS-COV-2 “divers strains/isolates” ORF8 protein | 16998- | 18875- | 20752-20851, |
| | | 17097 | 18974 | 22629-22728 |
| 117 | SARS-COV-2/Wuhan-Hu-1 non-structural protein 13 | 27908 | 28029 | 28150, 28280, |
| | | | | 28401 |
| 118 | SARS-COV-2/Wuhan-Hu-1 non-structural protein 14 | 27909 | 28030 | 28151, 28281, |
| | | | | 28402 |
| 119 | SARS-COV-2/Wuhan-Hu-1 membrane protein (M) (1-222)(182T) | 27910 | 28031 | 28152, 28282, |
| | | | | 28403 |
| 120 | SARS-COV-2/Wuhan-Hu-1 membrane protein (M) (1- | 27911 | 28032 | 28153, 28283, |
| | 222)(A2S_F28L_V70L) | | | 28404 |
| 121 | SARS-COV-2/Wuhan-Hu-1 membrane protein (M) (1- | 27912 | 28033 | 28154, 28284, |
| | 222)(A2T_1201V) | | | 28405 |
| 122 | SARS-COV-2/Wuhan-Hu-1 membrane protein (M) (1- | 27913 | 28034 | 28155, 28285, |
| | 222)(N121K_H125Y_H148Y_H155Y_K162N) | | | 28406 |
| 123 | SARS-COV-2/Wuhan-Hu-1 membrane protein (M) (1- | 27914 | 28035 | 28156, 28286, |
| | 222)(A63T_H125Y) | | | 28407 |
| 124 | SARS-COV-2/Wuhan-Hu-1 membrane protein (M) (1- | 27915 | 28036 | 28157, 28287, |
| | 222)(A2S_M1091_H125Y) | | | 28408 |
| 125 | SARS-COV-2/Wuhan-Hu-1 membrane protein (M) (1- | 27916 | 28037 | 28158, 28288, |
| | 222)(A2V_M1091_H125Y) | | | 28409 |
| 126 | SARS-COV-2/Wuhan-Hu-1 membrane protein (M) (1- | 27917 | 28038 | 28159, 28289, |
| | 222)(L17F_M1091) | | | 28410 |
| 127 | SARS-COV-2/Wuhan-Hu-1 nucleocapsid protein (N) (1- | 27918 | 28039 | 28160, 28290, |
| | 419)(D3L_R203K_G204R_S235F) | | | 28411 |
| 128 | SARS-COV-2/Wuhan-Hu-1 nucleocapsid protein (N) (1- | 27919 | 28040 | 28161, 28291, |
| | 419)(T2051) | | | 28412 |
| 129 | SARS-COV-2/Wuhan-Hu-1 nucleocapsid protein (N) (1- | 27920 | 28041 | 28162, 28292, |
| | 419)(P80R) | | | 28413 |
| 130 | SARS-COV-2/Wuhan-Hu-1 nucleocapsid protein (N) (1- | 27921 | 28042 | 28163, 28293, |
| | 419)(P80R_R203K_G204R) | | | 28414 |
| 131 | SARS-COV-2/Wuhan-Hu-1 nucleocapsid protein (N) (1- | 27922 | 28043 | 28164, 28294, |
| | 419)(D63G_R203M_G215C_D377Y) | | | 28415 |
| 132 | SARS-COV-2/Wuhan-Hu-1 nucleocapsid protein (N) (1- | 27923 | 28044 | 28165, 28295, |
| | 419)(D63G_R203M_D377Y) | | | 28416 |
| 133 | SARS-COV-2/Vuhan-Hu-1 nucleocapsid protein (N) (1- | 27924 | 28045 | 28166, 28296, |
| | 419)(T205\|_T3621) | | | 28417 |
| 134 | SARS-COV-2/Wuhan-Hu-1 nucleocapsid protein (N) (1- | 27925 | 28046 | 28167, 28297, |
| | 419)(S2Y_D3del_A12G_T2051) | | | 28418 |
| 135 | SARS-COV-2/Wuhan-Hu-1 nucleocapsid protein (N) (1- | 27926 | 28047 | 28168, 28298, |
| | 419)(P13L_R203K_G204R_G214C) | | | 28419 |
| 136 | SARS-COV-2/Wuhan-Hu-1 nucleocapsid protein (N) (1- | 27927 | 28048 | 28169, 28299, |
| | 419)(P67S_R203M_D377Y) | | | 28420 |
| 137 | SARS-COV-2/Wuhan-Hu-1 nucleocapsid protein (N) (1- | 27928 | 28049 | 28170, 28300, |
| | 419)(1157V_R203K_G204R) | | | 28421 |
| 138 | SARS-COV-2/Wuhan-Hu-1 nucleocapsid protein (N) (1- | 27929 | 28050 | 28171, 28301, |
| | 419)(A119S_R203K_G204R_M234I) | | | 28422 |
| 139 | SARS-COV-2/Wuhan-Hu-1 nucleocapsid protein (N) (1- | 27930 | 28051 | 28172, 28302, |
| | 419)(R203K_G204R) | | | 28423 |
| 140 | SARS-COV-2/Wuhan-Hu-1 nucleocapsid protein (N) (1- | 27931 | 28052 | 28173, 28303, |
| | 419)(R203K_G204R_G212V) | | | 28424 |
| 141 | SARS-COV-2/Wuhan-Hu-1 nucleocapsid protein (N) (1- | 27932 | 28053 | 28174, 28304, |
| | 419)(R203K_G204R_A208G_R209del) | | | 28425 |
| 142 | SARS-COV-2/Wuhan-Hu-1 nucleocapsid protein (N) (1- | 27933 | 28054 | 28175, 28305, |
| | 419)(R203M_D377Y) | | | 28426 |
| 143 | SARS-COV-2/Wuhan-Hu-1 nucleocapsid protein (N) (1- | 27934 | 28055 | 28176, 28306, |
| | 419)(T2051_M2341) | | | 28427 |
| 144 | SARS-COV-2/Wuhan-Hu-1 nucleocapsid protein (N) (1- | 27935 | 28056 | 28177, 28307, |
| | 419)(M2341) | | | 28428 |
| 145 | SARS-COV-2/Wuhan-Hu-1 nucleocapsid protein (N) (1- | 27936 | 28057 | 28178, 28308, |
| | 419)(A12G_T2051) | | | 28429 |
| 146 | SARS-COV-2/Wuhan-Hu-1 nucleocapsid protein (N) (1- | 27937 | 28058 | 28179, 28309, |
| | 419)(P13L_P199L_S202R_T2051_M2341) | | | 28430 |
| 147 | SARS-COV-2/Wuhan-Hu-1 nucleocapsid protein (N) (1- | 27938 | 28059 | 28180, 28310, |
| | 419)(P13L_R203K_G204R_G214C_T3661) | | | 28431 |
| 148 | SARS-COV-2/Wuhan-Hu-1 nucleocapsid protein (N) (1- | 27939 | 28060 | 28181, 28311, |
| | 419)(R203K_G204R_A208G_R209del_M2341) | | | 28432 |
| 149 | SARS-COV-2/Wuhan-Hu-1 envelope protein (E) (1-75)(P71L) | 27940 | 28061 | 28182, 28312, |
| | | | | 28433 |
| 150 | SARS-COV-2/Wuhan-Hu-1 envelope protein (E) (1- | 27941 | 28062 | 28183, 28313, |
| | 75)(T91_C43F_V49L_V58F_V62F_L73F) | | | 28434 |
| 151 | SARS-COV-2/Wuhan-Hu-1 envelope protein (E) (1- | 27942 | 28063 | 28184, 28314, |
| | 75)(T91_V58F_V62F_S68F_L73F) | | | 28435 |
| 152 | SARS-COV-2/Wuhan-Hu-1 envelope protein (E) (1- | 27943 | 28064 | 28185, 28315, |
| | 75)(T91_V58F_S68A_R69G_P71S) | | | 28436 |
| 153 | SARS-COV-2/Wuhan-Hu-1 envelope protein (E) (1-75)(L21F) | 27944 | 28065 | 28186, 28316, |
| | | | | 28437 |
| 154 | SARS-COV-2/Wuhan-Hu-1 envelope protein (E) (1- | 27945 | 28066 | 28187, 28317, |
| | 75)(T91_L21F_S55F_V58F_S68F_L73F) | | | 28438 |
| 155 | SARS-COV-2/Wuhan-Hu-1 envelope protein (E) (1- | 27946 | 28067 | 28188, 28318, |
| | 75)(T91_S55F_V58F_S68F_P71L_D72Y_L73F) | | | 28439 |
| 156 | SARS-COV-2/Wuhan-Hu-1 envelope protein (E) (1- | 27947 | 28068 | 28189, 28319, |
| | 75)(T91_S55F_V58F_S68F_D72Y_L73F) | | | 28440 |
| 157 | SARS-COV-2/Wuhan-Hu-1 non-structural protein 3 (NSP3) (1- | 27948 | 28069 | 28190, 28320, |
| | 1946)(T1841_A891D_11413T) | | | 28441 |
| 158 | SARS-COV-2/Wuhan-Hu-1 non-structural protein 3 (NSP3) (1- | 27949 | 28070 | 28191, 28321, |
| | 1946)(A329T_P823L) | | | 28442 |
| 159 | SARS-COV-2/Wuhan-Hu-1 non-structural protein 3 (NSP3) (1- | 27950 | 28071 | 28192, 28322, |
| | 1946)(S371L_K978Q) | | | 28443 |
| 160 | SARS-COV-2/Wuhan-Hu-1 non-structural protein 3 (NSP3) (1- | 27951 | 28072 | 28193, 28323, |
| | 1946)(A489S_P1229L_P1470S) | | | 28444 |
| 161 | SARS-COV-2/Wuhan-Hu-1 non-structural protein 3 (NSP3) (1- | 27952 | 28073 | 28194, 28324, |
| | 1946)(K838N) | | | 28445 |
| 162 | SARS-COV-2/Wuhan-Hu-1 non-structural protein 3 (NSP3) (1- | 27953 | 28074 | 28195, 28325, |
| | 1946)(K838N_P1229L_N1779S) | | | 28446 |
| 163 | SARS-COV-2/Wuhan-Hu-1 non-structural protein 3 (NSP3) (1- | 27954 | 28075 | 28196, 28326, |
| | 1946)(K838N_N1779S) | | | 28447 |
| 164 | SARS-COV-2/Wuhan-Hu-1 non-structural protein 3 (NSP3) (1- | 27955 | 28076 | 28197, 28327, |
| | 1946)(A489S_P1229L_P1470S_A1712V) | | | 28448 |
| 165 | SARS-COV-2/Wuhan-Hu-1 non-structural protein 3 (NSP3) (1- | 27956 | 28077 | 28198, 28328, |
| | 1946)(S795L_K838N) | | | 28449 |
| 166 | SARS-COV-2/Wuhan-Hu-1 non-structural protein 3 (NSP3) (1- | 27957 | 28078 | 28199, 28329, |
| | 1946)(A42V_T4291_D822N_P1470S) | | | 28450 |
| 167 | SARS-COV-2/Wuhan-Hu-1 non-structural protein 3 (NSP3) (1- | 27958 | 28079 | 28200, 28330, |
| | 1946)(T238A_T721I_N1330D) | | | 28451 |
| 168 | SARS-COV-2/Wuhan-Hu-1 non-structural protein 3 (NSP3) (1- | 27959 | 28080 | 28201, 28331, |
| | 1946)(H343Y_P823L_K928I_N1588S) | | | 28452 |
| 169 | SARS-COV-2/Wuhan-Hu-1 non-structural protein 3 (NSP3) (1- | 27960 | 28081 | 28202, 28332, |
| | 1946)(E379V_K1694N) | | | 28453 |
| 170 | SARS-COV-2/Wuhan-Hu-1 non-structural protein 3 (NSP3) (1- | 27961 | 28082 | 28203, 28333, |
| | 1946)(T4291_P1470S_F1570V) | | | 28454 |
| 171 | SARS-COV-2/Wuhan-Hu-1 non-structural protein 3 (NSP3) (1- | 27962 | 28083 | 28204, 28334, |
| | 1946)(D737G_S1808F) | | | 28455 |
| 172 | SARS-COV-2/Wuhan-Hu-1 non-structural protein 3 (NSP3) (1- | 27963 | 28084 | 28205, 28335, |
| | 1946)(T7501) | | | 28456 |
| 173 | SARS-COV-2/Wuhan-Hu-1 non-structural protein 3 (NSP3) (1- | 27964 | 28085 | 28206, 28336, |
| | 1946)(T11901) | | | 28457 |
| 174 | SARS-COV-2/Wuhan-Hu-1 non-structural protein 3 (NSP3) (1- | 27965 | 28086 | 28207, 28337, |
| | 1946)(A1527V_T18311) | | | 28458 |
| 175 | SARS-COV-2/Wuhan-Hu-1 non-structural protein 3 (NSP3) (1- | 27966 | 28087 | 28208, 28338, |
| | 1946)(A86V_A656V_11022V_E1847D) | | | 28459 |
| 176 | SARS-COV-2/Wuhan-Hu-1 non-structural protein 3 (NSP3) (1- | 27967 | 28088 | 28209, 28339, |
| | 1946)(D136N_E379V_K1694N) | | | 28460 |
| 177 | SARS-COV-2/Wuhan-Hu-1 non-structural protein 3 (NSP3) (1- | 27968 | 28089 | 28210, 28340, |
| | 1946)(A862S_G1129S) | | | 28461 |
| 178 | SARS-COV-2/Wuhan-Hu-1 non-structural protein 3 (NSP3) (1- | 27969 | 28090 | 28211, 28341, |
| | 1946)(T1190L_K1772R) | | | 28462 |
| 179 | SARS-COV-2/Wuhan-Hu-1 non-structural protein 4 (NSP4) (1- | 27970 | 28091 | 28212, 28342, |
| | 501)(V168L_T4931) | | | 28463 |
| 180 | SARS-COV-2/Wuhan-Hu-1 non-structural protein 4 (NSP4) (1- | 27971 | 28092 | 28213, 28343, |
| | 501)(F18L) | | | 28464 |
| 181 | SARS-COV-2/Wuhan-Hu-1 non-structural protein 4 (NSP4) (1- | 27972 | 28093 | 28214, 28344, |
| | 501)(124T_G179S_S185N_A447V) | | | 28465 |
| 182 | SARS-COV-2/Wuhan-Hu-1 non-structural protein 4 (NSP4) (1- | 27973 | 28094 | 28215, 28345, |
| | 501)(V168L_A447V_T4931) | | | 28466 |
| 183 | SARS-COV-2/Wuhan-Hu-1 non-structural protein 4 (NSP4) (1- | 27974 | 28095 | 28216, 28346, |
| | 501)(Y206H_L265F_T2961_A473S) | | | 28467 |
| 184 | SARS-COV-2/Wuhan-Hu-1 non-structural protein 4 (NSP4) (1- | 27975 | 28096 | 28217, 28347, |
| | 501)(T174\|_A447V) | | | 28468 |
| 185 | SARS-COV-2/Wuhan-Hu-1 non-structural protein 4 (NSP4) (1- | 27976 | 28097 | 28218, 28348, |
| | 501)(T190\|_T4931) | | | 28469 |
| 186 | SARS-COV-2/Wuhan-Hu-1 non-structural protein 4 (NSP4) (1- | 27977 | 28098 | 28219, 28349, |
| | 501)(D218N_L439P) | | | 28470 |
| 187 | SARS-COV-2/Wuhan-Hu-1 non-structural protein 4 (NSP4) (1- | 27978 | 28099 | 28220, 28350, |
| | 501)(D218N_D460N) | | | 28471 |
| 188 | SARS-COV-2/Wuhan-Hu-1 non-structural protein 4 (NSP4) (1- | 27979 | 28100 | 28221, 28351, |
| | 501)(S396T) | | | 28472 |
| 189 | SARS-COV-2/Wuhan-Hu-1 non-structural protein 4 (NSP4) (1- | 27980 | 28101 | 28222, 28352, |
| | 501)(L439P) | | | 28473 |
| 190 | SARS-COV-2/Wuhan-Hu-1 non-structural protein 4 (NSP4) (1- | 27981 | 28102 | 28223, 28353, |
| | 501)(A447V) | | | 28474 |
| 191 | SARS-COV-2/Wuhan-Hu-1 non-structural protein 4 (NSP4) (1- | 27982 | 28103 | 28224, 28354, |
| | 501)(L439P_T4931) | | | 28475 |
| 192 | SARS-COV-2/Wuhan-Hu-1 non-structural protein 4 (NSP4) (1- | 27983 | 28104 | 28225, 28355, |
| | 501)(T115l_S396T) | | | 28476 |
| 193 | SARS-COV-2/Wuhan-Hu-1 non-structural protein 4 (NSP4) (1- | 27984 | 28105 | 28226, 28356, |
| | 501)(K400E_L439P_A447V) | | | 28477 |
| 194 | SARS-COV-2/Wuhan-Hu-1 non-structural protein 4 (NSP4) (1- | 27985 | 28106 | 28227, 28357, |
| | 501)(L448F) | | | 28478 |
| 195 | SARS-COV-2/Wuhan-Hu-1 non-structural protein 6 (NSP6) (1- | 27986 | 28107 | 28228, 28358, |
| | 291)(T78A_V150A_1163V_T1821) | | | 28479 |
| 196 | SARS-COV-2/Wuhan-Hu-1 non-structural protein 6 (NSP6) (1- | 27987 | 28108 | 28229, 28359, |
| | 291)(S107del_G108del_F109del) | | | 28480 |
| 197 | SARS-COV-2/Wuhan-Hu-1 non-structural protein 6 (NSP6) (1- | 27988 | 28109 | 28230, 28360, |
| | 291)(S107del_G108del_F109del_M165T) | | | 28481 |
| 198 | SARS-COV-2/Wuhan-Hu-1 non-structural protein 6 (NSP6) (1- | 27989 | 28110 | 28231, 28361, |
| | 291)(V27G_L38F_F221L_C222F) | | | 28482 |
| 199 | SARS-COV-2/Wuhan-Hu-1 non-structural protein 6 (NSP6) (1- | 27990 | 28111 | 28232, 28362, |
| | 291)(L38F_L126F) | | | 28483 |
| 200 | SARS-COV-2/Wuhan-Hu-1 non-structural protein 6 (NSP6) (1- | 27991 | 28112 | 28233, 28363, |
| | 291)(S107del_G108del_F109del_L126F) | | | 28484 |
| 201 | SARS-COV-2/Wuhan-Hu-1 non-structural protein 6 (NSP6) (1- | 27992 | 28113 | 28234, 28364, |
| | 291)(S107del_G108del_F109del_V2791) | | | 28485 |
| 202 | SARS-COV-2/Wuhan-Hu-1 ORF3a protein (ORF3a) (1- | 27993 | 28114 | 28235, 28365, |
| | 275)(Q57H_S171L) | | | 28486 |
| 203 | SARS-COV-2/Wuhan-Hu-1 ORF3a protein (ORF3a) (1- | 27994 | 28115 | 28236, 28366, |
| | 275)(D155Y_S253P) | | | 28487 |
| 204 | SARS-COV-2/Wuhan-Hu-1 ORF3a protein (ORF3a) (1- | 27995 | 28116 | 28237, 28367, |
| | 275)(S253P) | | | 28488 |
| 205 | SARS-COV-2/Wuhan-Hu-1 ORF3a protein (ORF3a) (1- | 27996 | 28117 | 28238, 28368, |
| | 275)(L15F_W131C_T1511) | | | 28489 |
| 206 | SARS-COV-2/Wuhan-Hu-1 ORF3a protein (ORF3a) (1- | 27997 | 28118 | 28239, 28369, |
| | 275)(P42L_Q57H) | | | 28490 |
| 207 | SARS-COV-2/Wuhan-Hu-1 ORF3a protein (ORF3a) (1- | 27998 | 28119 | 28240, 28370, |
| | 275)(Q57H_N257del) | | | 28491 |
| 208 | SARS-COV-2/Wuhan-Hu-1 ORF3a protein (ORF3a) (1- | 27999 | 28120 | 28241, 28371, |
| | 275)(N257del) | | | 28492 |
| 209 | SARS-COV-2/Wuhan-Hu-1 ORF3a protein (ORF3a) (1- | 28000 | 28121 | 28242, 28372, |
| | 275)(P42L_Q57H_P104L) | | | 28493 |
| 210 | SARS-COV-2/Wuhan-Hu-1 ORF8 protein (ORF8) (1- | 28001 | 28122 | 28243, 28373, |
| | 121)(R521_Y73C) | | | 28494 |
| 211 | SARS-COV-2/Wuhan-Hu-1 ORF8 protein (ORF8) (1-121)(E92K) | 28002 | 28123 | 28244, 28374, |
| | | | | 28495 |
| 212 | SARS-COV-2/Wuhan-Hu-1 ORF8 protein (ORF8) (1- | 28003 | 28124 | 28245, 28375, |
| | 121)(D119I_F120del_\|121del) | | | 28496 |
| 213 | SARS-COV-2/Wuhan-Hu-1 ORF8 protein (ORF8) (1- | 28004 | 28125 | 28246, 28376, |
| | 121)(K44R_F120V_1121L) | | | 28497 |
| 214 | SARS-COV-2/Wuhan-Hu-1 ORF8 protein (ORF8) (1-121)(K2Q) | 28005 | 28126 | 28247, 28377, |
| | | | | 28498 |
| 215 | SARS-COV-2/Wuhan-Hu-1 ORF8 protein (ORF8) (1-121)(T111) | 28006 | 28127 | 28248, 28378, |
| | | | | 28499 |
| 216 | SARS-COV-2/Wuhan-Hu-1 ORF8 protein (ORF8) (1- | 28007 | 28128 | 28249, 28379, |
| | 121)(T11K_P38S_S67F) | | | 28500 |
| 217 | SARS-COV-2/Vuhan-Hu-1 ORF8 protein (ORF8) (1-121)(T261) | 28008 | 28129 | 28250, 28380, |
| | | | | 28501 |
| 218 | SARS-COV-2/Wuhan-Hu-1 ORF8 protein (ORF8) (1-121)(F3Y) | 28009 | 28130 | 28251, 28381, |
| | | | | 28502 |
| 219 | SARS-COV-2/Wuhan-Hu-1 ORF8 protein (ORF8) (1- | 28010 | 28131 | 28252, 28382, |
| | 121)(T11\|_A51S) | | | 28503 |
| 220 | SARS-COV-2/Wuhan-Hu-1 ORF8 protein (ORF8) (1- | 28011 | 28132 | 28253, 28383, |
| | 121)(V32L_V100L) | | | 28504 |
| 221 | SARS-COV-2/Wuhan-Hu-1 ORF8 protein (ORF8) (1-121)(A65V) | 28012 | 28133 | 28254, 28384, |
| | | | | 28505 |
| 222 | SARS-COV-2/Wuhan-Hu-1 non-structural protein 13 (NSP13) (1- | 28013 | 28134 | 28255, 28385, |
| | 602)(P78L) | | | 28506 |
| 223 | SARS-COV-2/Wuhan-Hu-1 non-structural protein 13 (NSP13) (1- | 28014 | 28135 | 28256, 28386, |
| | 602)(P79S_K461R) | | | 28507 |
| 224 | SARS-COV-2/Wuhan-Hu-1 non-structural protein 13 (NSP13) (1- | 28015 | 28136 | 28257, 28387, |
| | 602)(E342D) | | | 28508 |
| 225 | SARS-COV-2/Wuhan-Hu-1 non-structural protein 13 (NSP13) (1- | 28016 | 28137 | 28258, 28388, |
| | 602)(T5891) | | | 28509 |
| 226 | SARS-COV-2/Wuhan-Hu-1 non-structural protein 13 (NSP13) (1- | 28017 | 28138 | 28259, 28389, |
| | 602)(P54L_D261Y) | | | 28510 |
| 227 | SARS-COV-2/Wuhan-Hu-1 non-structural protein 13 (NSP13) (1- | 28018 | 28139 | 28260, 28390, |
| | 602)(Q89H_H165Y) | | | 28511 |
| 228 | SARS-COV-2/Wuhan-Hu-1 non-structural protein 13 (NSP13) (1- | 28019 | 28140 | 28261, 28391, |
| | 602)(D106Y_P530L) | | | 28512 |
| 229 | SARS-COV-2/WVuhan-Hu-1 non-structural protein 13 (NSP13) (1- | 28020 | 28141 | 28262, 28392, |
| | 602)(P173H_E262D_P420S_P492S) | | | 28513 |
| 230 | SARS-COV-2/Wuhan-Hu-1 non-structural protein 13 (NSP13) (1- | 28021 | 28142 | 28263, 28393, |
| | 602)(D261Y) | | | 28514 |
| 231 | SARS-COV-2/Wuhan-Hu-1 non-structural protein 14 (NSP14) (1- | 28022 | 28143 | 28264, 28394, |
| | 528)(T321_P143S_P444S) | | | 28515 |
| 232 | SARS-COV-2/Wuhan-Hu-1 non-structural protein 14 (NSP14) (1- | 28023 | 28144 | 28265, 28395, |
| | 528)(P204L_F218Y_P328Q) | | | 28516 |
| 233 | SARS-COV-2/Wuhan-Hu-1 non-structural protein 14 (NSP14) (1- | 28024 | 28145 | 28266, 28396, |
| | 528)(E348G_P452S) | | | 28517 |
| 234 | SARS-COV-2/Wuhan-Hu-1 non-structural protein 14 (NSP14) (1- | 28025 | 28146 | 28267, 28397, |
| | 528)(A395V) | | | 28518 |
| 235 | SARS-COV-2/Wuhan-Hu-1 non-structural protein 14 (NSP14) (1- | 28026 | 28147 | 28268, 28398, |
| | 528)(D145E_A275S) | | | 28519 |
| 236 | SARS-COV-2/Wuhan-Hu-1 non-structural protein 14 (NSP14) (1- | 28027 | 28148 | 28269, 28399, |
| | 528)(D145G_Q355H) | | | 28520 |
| 237 | SARS-COV-2/Wuhan-Hu-1 non-structural protein 14 (NSP14) (1- | 28028 | 28149 | 28270, 28400, |
| | 528)(S2561_A361V_A372T) | | | 28521 |

[0306] Suitable features and embodiments that apply to the at least one nucleic acid encoding Coronavirus M, N, NSP3, NSP4, NSP6, NSP13, NSP14, ORF3A, ORF8, E are provided in paragraph “Nucleic acid features and embodiments” below.

[0307] Suitably, the nucleic acids is formulated and/or complexed. Suitable features and embodiments that apply to nucleic acids complexation or formulation of nucleic acid encoding Coronavirus M, N, NSP3, NSP4, NSP6, NSP13, NSP14, ORF3A, ORF8, E are provided in paragraph “Formulation and Complexation” below.

[0308] In preferred embodiments, intramuscular or intradermal administration of the composition comprising at least one nucleic acid encoding Coronavirus M, N, NSP3, NSP4, NSP6, NSP13, NSP14, ORF3A, ORF8, and/or E as defined herein results in expression of the encoded Coronavirus M, N, NSP3, NSP4, NSP6, NSP13, NSP14, ORF3A, ORF8, and/or E in a subject. In embodiments where the nucleic acid is an RNA, administration results in translation of the RNA and to a production of the encoded Coronavirus M, N, NSP3, NSP4, NSP6, NSP13, NSP14, ORF3A, ORF8, and/or E. In embodiments where the nucleic acid is a DNA (e.g. plasmid DNA, adenovirus DNA), administration of said composition results in transcription of the DNA into RNA, and to a subsequent translation of the RNA into the encoded Coronavirus M, N, NSP3, NSP4, NSP6, NSP13, NSP14, ORF3A, ORF8, and/or E in a subject.

[0309] In embodiments, administration of the pharmaceutical composition comprising at least one nucleic acid encoding Coronavirus M, N, NSP3, NSP4, NSP6, NSP13, NSP14, ORF3A, ORF8, and/or E as defined herein to a subject elicits neutralizing antibodies against Coronavirus and does not elicit disease enhancing antibodies.

[0310] In preferred embodiments, administration of the pharmaceutical composition comprising at least one nucleic acid encoding Coronavirus M, N, NSP3, NSP4, NSP6, NSP13, NSP14, ORF3A, ORF8, and/or E as defined herein to a subject elicits antigen-specific immune responses comprising T-cell responses and/or B-cell responses against the encoded Coronavirus M, N, NSP3, NSP4, NSP6, NSP13, NSP14, ORF3A, ORF8, and/or E antigen.

[0311] Combinations of M, N, NSP3, NSP4, NSP6, NSP13, NSP14, ORF3A, ORF8, and/or E (Multivalent Composition)

[0312] In preferred embodiments, the pharmaceutical composition comprises the at least one, preferably at least two or a plurality of the following nucleic acid sequences encoding at least one antigenic peptide or protein is selected or derived from membrane protein (M) as defined herein, nucleocapsid protein (N) as defined herein, non-structural protein as defined herein, and/or accessory protein as defined herein:
[0313] M nucleic acid comprising at least one coding sequence encoding at least one antigenic peptide or protein selected or derived from at least one membrane (M) protein as defined herein, or an immunogenic fragment or immunogenic variant thereof, and/or
[0314] N nucleic acid comprising at least one coding sequence encoding at least one antigenic peptide or protein selected or derived from at least one nucleocapsid (N) protein as defined herein, or an immunogenic fragment or immunogenic variant thereof, and/or
[0315] NSP3 nucleic acid comprising at least one coding sequence encoding at least one antigenic peptide or protein selected or derived from at least one NSP3 protein as defined herein, or an immunogenic fragment or immunogenic variant thereof, and/or
[0316] NSP4 nucleic acid comprising at least one coding sequence encoding at least one antigenic peptide or protein selected or derived from at least one NSP4 protein as defined herein, or an immunogenic fragment or immunogenic variant thereof, and/or
[0317] NSP6 nucleic acid comprising at least one coding sequence encoding at least one antigenic peptide or protein selected or derived from at least one NSP6 protein as defined herein, or an immunogenic fragment or immunogenic variant thereof, and/or
[0318] NSP13 nucleic acid comprising at least one coding sequence encoding at least one antigenic peptide or protein selected or derived from at least one NSP6 protein as defined herein, or an immunogenic fragment or immunogenic variant thereof, and/or
[0319] NSP14 nucleic acid comprising at least one coding sequence encoding at least one antigenic peptide or protein selected or derived from at least one NSP6 protein as defined herein, or an immunogenic fragment or immunogenic variant thereof, and/or
[0320] ORF3A nucleic acid comprising at least one coding sequence encoding at least one antigenic peptide or protein selected or derived from at least one ORF3a protein, or an immunogenic fragment or immunogenic variant thereof, and/or
[0321] ORF8 nucleic acid comprising at least one coding sequence encoding at least one antigenic peptide or protein selected or derived from at least one ORF8 protein, or an immunogenic fragment or immunogenic variant thereof.
[0322] E nucleic acid comprising at least one coding sequence encoding at least one antigenic peptide or protein selected or derived from at least one E protein, or an immunogenic fragment or immunogenic variant thereof.

[0323] In embodiments, the pharmaceutical composition comprises 2, 3, 4, 5, 6, 7, or more of M, N, NSP3, NSP4, NSP6, NSP13, NSP14, ORF3A, ORF8, E wherein the antigenic peptide or proteins are selected or derived from the same Coronavirus. Suitably, the 2, 3, 4, 5, 6, 7 or more antigenic peptide or proteins are selected or derived from SARS-CoV-2 or SARS-CoV-2 variants. In embodiments, the 2, 3, 4, 5, 6, 7 or more antigenic peptide or proteins are selected or derived from different Coronaviruses, preferably different pandemic Coronaviruses, e.g. SARS-CoV-2, SARS-CoV-1, and/or MERS-CoV or from different pandemic SARS-CoV-2 variants.

[0324] In embodiments, the pharmaceutical composition of the invention comprises at least two nucleic acid sequences according to the following combinations:
[0325] M and N; M and NSP3; M and NSP4; M and NSP6; M and NSP13; M and NSP14; M and ORF3A; M and ORF8; N and NSP3; N and NSP4; N and NSP6; N and NSP13; N and NSP 14, N and ORF3A; N and ORF8: NSP3 and NSP4; NSP3 and NSP6; NSP3 and NSP13; NSP3 and NSP14; NSP3 and ORF3A; NSP3 and ORF8; NSP4 and NSP6; NSP4 and NSP13; NSP4 and NSP14; NSP4 and ORF3A; NSP4 and ORF8; NSP6 and NSP13; NSP6 and NSP14; NSP6 and ORF3A; NSP6 and ORF8; NSP13 and NSP14; NSP13 and ORF3A; NSP13 and ORF8; NSP14 and OFR3A; NSP14 and ORF8; or ORF3A and ORF8,
[0326] optionally, wherein the antigenic peptide or proteins are selected or derived from the same Coronavirus, preferably SARS-CoV-2 or SARS-CoV-2 variants or wherein the antigenic peptide or proteins are selected or derived from different Coronaviruses, preferably different pandemic Coronaviruses or Coronavirus variants, e.g. SARS-CoV-2, SARS-CoV-1, and/or MERS-CoV or from different pandemic SARS-CoV-2 variants.

[0327] In embodiments, the pharmaceutical composition of the invention comprises at least two nucleic acid sequences according to the following combinations:
[0328] M and N; M and NSP3; M and NSP4; M and NSP6; M and ORF3A; M and ORF8; M and NSP13; M and NSP14;
[0329] N and NSP3; N and NSP4; N and NSP6; N and ORF3A; N and ORF8; N and NSP13; N and NSP14;
[0330] optionally, wherein the antigenic peptide or proteins are selected or derived from the same Coronavirus, preferably SARS-CoV-2 or SARS-CoV-2 variants or wherein the antigenic peptide or proteins are selected or derived from different Coronaviruses, preferably different pandemic Coronaviruses, e.g. SARS-CoV-2, SARS-CoV-1, and/or MERS-CoV or from different pandemic SARS-CoV-2 variants.

[0331] In preferred embodiments, the pharmaceutical composition of the invention comprises at least two nucleic acid sequences according to the following combinations:
[0332] N and NSP3; N and NSP4; N and ORF8; NSP3 and NSP4; NSP3 and ORF8; NSP4 and ORF8;
[0333] optionally wherein the antigenic peptide or proteins are selected or derived from the same SARS-CoV-2 virus or SARS-CoV-2 variant or wherein the antigenic peptide or proteins are selected or derived from different Coronaviruses, preferably different pandemic Coronaviruses, e.g. SARS-CoV-2, SARS-CoV-1, and/or MERS-CoV or from different pandemic SARS-CoV-2 variants.

[0334] In embodiments, the pharmaceutical composition of the invention comprises at least three nucleic acid sequences according to the following combinations:
[0335] M and N and NSP3; M and N and NSP4; M and N and NSP6; M and N and NSP13; M and N and NSP14; M and N and ORF3A; M and N and ORF8; M and NSP3 and NSP4; M and NSP3 and NSP6; M and NSP3 and NSP13; M and NSP3 and NSP14; M and NSP3 and ORF3A; M and NSP3 and ORF8; M and NSP4 and NSP6; M and NSP4 and NSP13; M and NSP4 and NSP14; M and NSP4 and ORF3A; M and NSP4 and ORF8; M and NSP6 and NSP13; M and NSP6 and NSP14; M and NSP6 and ORF3A; M and NSP6 and ORF8; M and NSP13 and NSP14; M and NSP13 and ORF3A; M and NSP13 and ORF8; M and NSP14 and ORF 3A; M and NSP14 and ORF; M and ORF3A and ORF8; N and NSP3 and NSP4; N and NSP3 and NSP6; N and NSP3 and NSP13; N and NSP3 and NSP14; N and NSP3 and ORF3A; N and NSP3 and ORF8; N and NSP4 and NSP6; N and NSP4 and NSP13; N and NSP4 and SNP14; N and NSP4 and ORF3A; N and NSP4 and ORF8; N and NSP6 and ORF3A; N and NSP6 and NSP13; N and NSP6 and NSP14; N and NSP6 and ORF8; N and NSP13 and NSP14; N and NSP13 and ORF3A; N and NSP13 and ORF8; N and NSP14 and ORF3A; N and NSP14 and ORF8; N and ORF3A and ORF8; NSP3 and NSP4 and NSP6; NSP3 and NSP4 and NSP13; NSP3 and NSP4 and NSP14; NSP3 and NSP4 and ORF3A; NSP3 and NSP4 and ORF8; NSP3 and NSP6 and ORF3A; NSP3 and NSP6 and ORF8; NSP3 and NSP13 and ORF3A; NSP3 and NSP13 and ORF8; NSP3 and ORF3A and ORF8; NSP4 and NSP6 and NSP13; NSP4 and NSP6 and NSP14; NSP4 and NSP6 and ORF3A; NSP4 and NSP6 and ORF8; NSP13 and NSP14 and ORF3A; NSP13 and NSP14 and ORF8; NSP4 and ORF3A and ORF8; NSP6 and ORF3A and ORF8, NSP13 and ORF3A and ORF8; or NSP14 and ORF3A and ORF8,
[0336] optionally, wherein the antigenic peptide or proteins are selected or derived from the same Coronavirus, preferably SARS-CoV-2 or SARS-CoV-2 variants or wherein the antigenic peptide or proteins are selected or derived from different Coronaviruses, preferably different pandemic Coronaviruses, e.g. SARS-CoV-2, SARS-CoV-1, and/or MERS-CoV or from different pandemic SARS-CoV-2 variants.

[0337] In embodiments, the pharmaceutical composition of the invention comprises at least three nucleic acid sequences according to the following combinations:
[0338] M and N and NSP3; M and N and NSP4; M and N and NSP6; M and N and ORF3A; M and N and ORF8;
[0339] M and NSP3 and NSP4; M and NSP3 and NSP6; M and NSP3 and ORF3A;
[0340] M and NSP3 and ORF8; M and NSP4 and NSP6; M and NSP4 and ORF3A; M and NSP4 and ORF8;
[0341] M and NSP6 and ORF3A; M and NSP6 and ORF8; M and ORF3A and ORF8; N and NSP3 and NSP4;
[0342] N and NSP3 and NSP6; N and NSP3 and ORF3A; N and NSP3 and ORF8; N and NSP4 and NSP6;
[0343] N and NSP4 and ORF3A; N and NSP4 and ORF8; N and NSP6 and ORF3A; N and NSP6 and ORF8;
[0344] N and ORF3A and ORF8,
[0345] optionally, wherein the antigenic peptide or proteins are selected or derived from the same Coronavirus, preferably SARS-CoV-2 or SARS-CoV-2 variants or wherein the antigenic peptide or proteins are selected or derived from different Coronaviruses, preferably different pandemic Coronaviruses, e.g. SARS-CoV-2, SARS-CoV-1, and/or MERS-CoV or from different pandemic SARS-CoV-2 variants.

[0346] In preferred embodiments, the pharmaceutical composition of the invention comprises at least three nucleic acid sequences according to the following combinations:
[0347] N and NSP3 and NSP4; N and NSP3 and ORF8; N and NSP4 and ORF8; N and ORF3A and ORF8, NSP3 and NSP4 and ORF8,
[0348] optionally, wherein the antigenic peptide or proteins are selected or derived from the same Coronavirus, preferably SARS-CoV-2 or SARS-CoV-2 variants or wherein the antigenic peptide or proteins are selected or derived from different Coronaviruses, preferably different pandemic Coronaviruses, e.g. SARS-CoV-2, SARS-CoV-1, and/or MERS-CoV or from different pandemic SARS-CoV-2 variants.

[0349] In embodiments, the pharmaceutical composition of the invention comprises at least four nucleic acid sequences according to the following combinations:
[0350] NSP3 and NSP4 and NSP6 and M; NSP3 and NSP4 and ORF3A and M;
[0351] NSP3 and NSP4 and ORF8 and M; NSP3 and NSP6 and ORF3A and M;
[0352] NSP3 and NSP6 and ORF8 and M; NSP3 and ORF3A and ORF8 and M;
[0353] NSP4 and NSP6 and ORF3A and M; NSP4 and NSP6 and ORF8 and M;
[0354] NSP4 and ORF3A and ORF8 and M; NSP6 and ORF3A and ORF8 and M;
[0355] NSP3 and NSP4 and NSP6 and N; NSP3 and NSP4 and ORF3A and N;
[0356] NSP3 and NSP4 and ORF8 and N; NSP3 and NSP6 and ORF3A and N;
[0357] NSP3 and NSP6 and ORF8 and N; NSP3 and ORF3A and ORF8 and N;
[0358] NSP4 and NSP6 and ORF3A and N; NSP4 and NSP6 and ORF8 and N; or
[0359] NSP4 and ORF3A and ORF8 and N; NSP6 and ORF3A and ORF8 and N,
[0360] optionally, wherein the antigenic peptide or proteins are selected or derived from the same Coronavirus, preferably SARS-CoV-2 or SARS-CoV-2 variants or wherein the antigenic peptide or proteins are selected or derived from different Coronaviruses, preferably different pandemic Coronaviruses, e.g. SARS-CoV-2, SARS-CoV-1, and/or MERS-CoV or from different pandemic SARS-CoV-2 variants.

[0361] In particularly preferred embodiments, the pharmaceutical composition of the invention comprises at least four nucleic acid sequences according to the following combination:
[0362] NSP3 and NSP4 and ORF8 and N;
[0363] optionally, wherein the antigenic peptide or proteins are selected or derived from the same Coronavirus, preferably SARS-CoV-2 or SARS-CoV-2 variants or wherein the antigenic peptide or proteins are selected or derived from different Coronaviruses, preferably different pandemic Coronaviruses or Coronavirus variants, e.g. SARS-CoV-2, SARS-CoV-1, and/or MERS-CoV or from different pandemic SARS-CoV-2 variants.

[0364] In more preferred embodiments, the pharmaceutical composition of the invention comprises at least four nucleic acid sequences according to the following combination: NSP3 and NSP4 and ORF8 and N;
[0365] wherein the antigenic peptide or proteins are selected or derived from the same SARS-CoV-2 or a SARS-CoV-2 variant or wherein the antigenic peptide or proteins are selected or derived from different SARS-CoV-2 or SARS-CoV-2 variants.

[0366] In embodiments, the pharmaceutical composition of the invention comprises at least five nucleic acid sequences according to the following combinations:
[0367] NSP3 and NSP4 and NSP6 and M and N; NSP3 and NSP4 and ORF3A and M and N;
[0368] NSP3 and NSP4 and ORF8 and M and N; NSP3 and NSP6 and ORF3A and M and N;
[0369] NSP3 and NSP6 and ORF8 and M and N; NSP3 and ORF3A and ORF8 and M and N;
[0370] NSP4 and NSP6 and ORF3A and M and N; NSP4 and NSP6 and ORF8 and M and N; or
[0371] NSP4 and ORF3A and ORF8 and M and N; NSP6 and ORF3A and ORF8 and M and N,
[0372] optionally, wherein the antigenic peptide or proteins are selected or derived from the same Coronavirus, preferably SARS-CoV-2 SARS-CoV-2 variants or wherein the antigenic peptide or proteins are selected or derived from different Coronaviruses, preferably different pandemic Coronaviruses, e.g. SARS-CoV-2, SARS-CoV-1, and/or MERS-CoV or from different pandemic SARS-CoV-2 variants.

[0373] Nucleic Acid Encoding Coronavirus Spike Protein

[0374] In various embodiments, the pharmaceutical composition of the first aspect further comprises at least one (additional) nucleic acid comprising at least one coding sequence encoding at least one antigenic peptide or protein selected or derived from at least one Coronavirus spike protein (S), or an immunogenic fragment or immunogenic variant thereof.

[0375] Accordingly, in preferred embodiments, the pharmaceutical composition comprises at least two nucleic acids,
[0376] (i) at least one nucleic acid comprising at least one coding sequence encoding at least one antigenic peptide or protein selected or derived from at least one Coronavirus spike protein (S), or an immunogenic fragment or immunogenic variant thereof, and
[0377] (ii) at least one nucleic acid comprising at least one coding sequence encoding at least one antigenic peptide or protein from at least one Coronavirus, wherein the at least one antigenic peptide or protein is selected or derived from membrane protein (M), nucleocapsid protein (N), non-structural protein, and/or accessory protein or an immunogenic fragment or immunogenic variant thereof.

[0378] The Coronavirus spike protein of the composition that is provided by the at least one (additional) nucleic acid can be selected or derived from any Coronavirus.

[0379] In preferred embodiments the at least one Coronavirus spike protein (S) is selected or derived from at least one pandemic Coronavirus.

[0380] In preferred embodiments the at least one Coronavirus spike protein (S) is selected or derived from at least one Alphacoronavirus, at least one Betacoronavirus, at least one Gammacoronavirus, and/or at least one Deltacoronavirus, preferably a pandemic Alphacoronavirus, Betacoronavirus, Gammacoronavirus, Deltacoronavirus.

[0381] In embodiments, the at least one Coronavirus spike protein (S) is selected or derived from at least one Betacoronavirus. Suitably, the Betacoronavirus is selected from at least one Sarbecovirus, at least one Merbecovirus, at least one Embecovirus, at least one Nobecovirus, and/or at least one Hibecovirus.

[0382] In a preferred embodiments, the at least one Coronavirus spike protein (S) is selected or derived from a Betacoronavirus, preferably a Sarbecovirus. In the context of the invention, a preferred Sarbecovirus may be selected from a SARS-associated Coronavirus. Preferred SARS-associated viruses can be selected from SARS-CoV-1 and/or SARS-CoV-2 or variants thereof.

[0383] In a preferred embodiments, the at least one Coronavirus spike protein (S) is selected or derived from a Betacoronavirus, preferably a Merbecovirus. In the context of the invention, a preferred Merbecovirus may be selected from a MERS-associated Coronavirus. Preferred MERS-associated Coronaviruses can be selected from MERS-CoV.

[0384] The term “antigenic peptide or protein derived from at least one Coronavirus spike protein (S)” relates to any peptide or protein that is selected or is derived from the respective Coronavirus S protein as defined herein, but also to fragments, variants or derivatives thereof, preferably to immunogenic fragments or immunogenic variants thereof.

[0385] The term “immunogenic fragment of Coronavirus spike protein (S)” or “immunogenic variant of Coronavirus spike protein (S)” has to be understood as any fragment/variant of the corresponding Coronavirus spike protein (S) that is capable of raising an immune response in a subject.

[0386] In the context of the invention, any protein selected or derived from a Coronavirus spike protein (S), preferably a pandemic Coronavirus spike protein (S), may be used in the context of the invention and may be suitably encoded by the coding sequence of the additional nucleic acid. It is further in the scope of the underlying invention, that the at least one antigenic peptide or protein may comprise or consist of a synthetically engineered or an artificial Coronavirus S peptide or protein. The term “synthetically engineered” Coronavirus S peptide or protein, or the term “artificial Coronavirus S peptide or protein” relates to a protein that does not occur in nature. Accordingly, an “artificial Coronavirus S peptide or protein” or a “synthetically engineered Coronavirus S peptide or protein” may for example differ in at least one amino acid compared to the naturally existing Coronavirus peptide or protein, and/or may comprise an additional peptide or protein element (e.g. a heterologous element), and/or may be N-terminally or C-terminally extended or truncated.

[0387] In preferred embodiments, the encoded at least one antigenic peptide or protein comprises or consists at least one peptide or protein selected or derived from a Coronavirus spike protein (S, S1, S2, or S1 and S2), or an immunogenic fragment or immunogenic variant of any of these.

[0388] The term spike protein (S) as used herein refers to a Coronavirus protein. Spike protein (S) is a typical type I viral fusion protein that exists as trimer on the viral surface with each monomer consisting of a Head (S1) and stem (S2). Individual precursor S polypeptides form a homotrimer and undergo glycosylation within the Golgi apparatus as well as processing to remove the signal peptide, and cleavage by a cellular protease to generate separate S1 and S2 polypeptide chains, which remain associated as S1/S2 protomers within the homotrimer and is therefore a trimer of heterodimers. The S1 domain of the spike glycoprotein includes the receptor binding domain (RBD) that engages (most likely) with the angiotensin-converting enzyme 2 receptors and mediates viral fusion into the host cell, an N-terminal domain that may make initial contact with target cells, and 2 subdomains, all of which are susceptible to neutralizing antibodies. S2 domain consists of a six helix bundle fusion core involved in membrane fusion with the host endosomal membrane and is also a target for neutralization. The S2 subunit further comprises two heptad-repeat sequences (HR1 and HR2) and a central helix typical of fusion glycoproteins, a transmembrane domain, and the cytosolic tail domain.

[0389] Without wishing to being bound to theory, RBD and CND domains may be crucial for immunogenicity of the Coronavirus spike protein (S). Both regions are located at the S1 fragment of the Coronavirus spike protein. Accordingly, it may be suitable in the context of the invention that the antigenic peptide or protein comprises or consists of an S1 fragment of the spike protein of a Coronavirus or an immunogenic fragment or immunogenic variant thereof. Suitably, such an S1 fragment may comprise at least an RBD and/or a CND domain as defined above.

[0390] In particularly preferred embodiments, the encoded at least one antigenic peptide or protein comprises or consists of a Coronavirus spike protein (S), wherein spike protein (S) comprises or consists of a spike protein fragment S1, or an immunogenic fragment or immunogenic variant thereof.

[0391] Without wishing to being bound to theory, it may be suitable that the antigenic peptide or protein comprises or consists of Coronavirus spike protein fragment S1 and (at least a fragment of) Coronavirus spike protein fragment S2, because the formation of an immunogenic Coronavirus spike protein may be promoted.

[0392] In particularly preferred embodiments, the encoded at least one antigenic peptide or protein comprises or consists of a full-length Coronavirus spike protein or an immunogenic fragment or immunogenic variant of any of these. The term “full-length Coronavirus spike protein” has to be understood as a Coronavirus spike protein, preferably derived from a pandemic Coronavirus, having an amino acid sequence corresponding to essentially the full spike protein.

[0393] In particularly preferred embodiments, the Coronavirus spike protein (S) that is provided by the (additional) nucleic is designed or adapted to stabilize the S antigen in pre-fusion conformation. A pre-fusion conformation is particularly advantageous in the context of an efficient vaccine, as several potential epitopes for neutralizing antibodies may merely be accessible in said pre-fusion protein conformation. Furthermore, remaining of the S protein in the pre-fusion conformation is aimed to avoid immunopathological effects, like e.g. enhanced disease and/or antibody dependent enhancement (ADE).

[0394] Accordingly, in preferred embodiments, the (additional) nucleic acid comprises at least one coding sequence encoding at least one antigenic peptide or protein that is selected or derived from an Coronavirus S, preferably a pandemic Coronavirus S, wherein the spike protein (S) is a pre-fusion stabilized spike protein (S_stab). Suitably, said pre-fusion stabilized spike protein comprises at least one pre-fusion stabilizing mutation.

[0395] The term “pre-fusion conformation” as used herein relates to a structural conformation adopted by the ectodomain of the coronavirus S protein following processing into a mature coronavirus S protein in the secretory system, and prior to triggering of the fusogenic event that leads to transition of coronavirus S to the postfusion conformation.

[0396] A “pre-fusion stabilized spike protein (S_stab)” as described herein comprises one or more amino acid substitutions, deletions, or insertions compared to a native coronavirus S sequence that provide for increased retention of the prefusion conformation compared to coronavirus S ectodomain trimers formed from a corresponding native coronavirus S sequence. The “stabilization” of the prefusion conformation by the one or more amino acid substitutions, deletions, or insertions can be, for example, energetic stabilization (for example, reducing the energy of the prefusion conformation relative to the post-fusion open conformation) and/or kinetic stabilization (for example, reducing the rate of transition from the prefusion conformation to the postfusion conformation). Additionally, stabilization of the coronavirus S ectodomain trimer in the prefusion conformation can include an increase in resistance to denaturation compared to a corresponding native coronavirus S sequence.

[0397] Accordingly, in preferred embodiments, the Coronavirus spike protein includes one or more amino acid substitutions that stabilize the S protein in the pre-fusion conformation, for example, substitutions that stabilize the membrane distal portion of the S protein (including the N-terminal region) in the pre-fusion conformation.

[0398] In preferred embodiments, the at least one pre-fusion stabilizing mutation comprises a cavity filling mutation that further stabilizes the pre-fusion state of the Coronavirus S protein. The term “cavity filling mutation” or “cavity filling amino acid substitution” relates to an amino acid substitution that fills a cavity within the protein core of a protein, such as a coronavirus S protein ectodomain. Cavities are essentially voids within a folded protein where amino acids or amino acid side chains are not present. In several embodiments, a cavity-filling amino acid substitution is introduced to fill a cavity present in the prefusion conformation of a Coronavirus S ectodomain core that collapses (e.g., has reduced volume) after transition to the postfusion conformation.

[0399] In preferred embodiments, the at least one pre-fusion stabilizing mutation comprises a mutated protonation site that further stabilizes the pre-fusion state.

[0400] In preferred embodiments, the at least one pre-fusion stabilizing mutation comprises an artificial intramolecular disulfide bond. Such an artificial intramolecular disulfide bond can be introduced to further stabilize the membrane distal portion of the S protein (including the N-terminal region) in the pre-fusion conformation; that is, in a conformation that specifically binds to one or more pre-fusion specification antibodies, and/or presents a suitable antigenic site that is present on the pre-fusion conformation but not in the post fusion conformation of the S protein. In embodiments, the at least one pre-fusion stabilizing mutation comprises 2, 3, 4, 5, 6, 7, or 8 different artificial intramolecular disulfide bonds.

[0401] It has to be emphasized that in the context of the invention any Coronavirus S protein, preferably any pandemic Coronavirus S protein may be mutated as described above to stabilize the spike protein in the pre-fusion conformation. Accordingly, a spike protein may be selected from any Coronavirus, preferably from any Alphacoronavirus, Betacoronavirus, Gammacoronavirus, Deltacoronavirus, more preferably Betacoronavirus.

[0402] According to various preferred embodiments, the (additional) nucleic acid encodes at least one antigenic peptide or protein from Coronavirus S as defined herein, preferably of a pandemic Coronavirus, and, additionally, at least one heterologous peptide or protein element.

[0403] Suitably, the at least one heterologous peptide or protein element may promote or improve secretion of the encoded Coronavirus S antigenic peptide or protein (e.g. via secretory signal sequences), promote or improve anchoring of the encoded antigenic peptide or protein of the invention in the plasma membrane (e.g. via transmembrane elements), promote or improve formation of antigen complexes (e.g. via multimerization domains or antigen clustering elements), or promote or improve virus-like particle formation (VLP forming sequence). In addition, the nucleic acid of may additionally encode peptide linker elements, self-cleaving peptides, immunologic adjuvant sequences or dendritic cell targeting sequences.

[0404] Suitable multimerization domains may be selected from the list of amino acid sequences according to SEQ ID NOs: 1116-1167 of WO2017081082, or fragments or variants of these sequences. Suitable transmembrane elements may be selected from the list of amino acid sequences according to SEQ ID NOs: 1228-1343 of WO2017081082, or fragments or variants of these sequences. Suitable VLP forming sequences may be selected from the list of amino acid sequences according to SEQ ID NOs: 1168-1227 of the patent application WO2017081082, or fragments or variants of these sequences. Suitable peptide linkers may be selected from the list of amino acid sequences according to SEQ ID NOs: 1509-1565 of the patent application WO2017081082, or fragments or variants of these sequences. Suitable self-cleaving peptides may be selected from the list of amino acid sequences according to SEQ ID NOs: 1434-1508 of the patent application WO2017081082, or fragments or variants of these sequences. Suitable immunologic adjuvant sequences may be selected from the list of amino acid sequences according to SEQ ID NOs: 1360-1421 of the patent application WO2017081082, or fragments or variants of these sequences. Suitable dendritic cell (DCs) targeting sequences may be selected from the list of amino acid sequences according to SEQ ID NOs: 1344-1359 of the patent application WO2017081082, or fragments or variants of these sequences. Suitable secretory signal peptides may be selected from the list of amino acid sequences according to SEQ ID NOs: 1-1115 and SEQ ID NO: 1728 of published PCT patent application WO2017081082, or fragments or variants of these sequences.

[0405] In preferred embodiments, the at least one coding sequence additionally encodes one or more heterologous peptide or protein elements selected from a signal peptide, a linker peptide, a helper epitope, an antigen clustering element, a trimerization or multimerization element, a transmembrane element, or a VLP forming sequence.

[0406] In preferred embodiments, the (additional) nucleic acid encoding at least one antigenic protein derived from a Coronavirus S additionally encodes at least one heterologous trimerization element, an antigen clustering element, or a VLP forming sequence.

[0407] In preferred embodiments, the antigen clustering elements may be selected from a ferritin element, or a lumazine synthase element, surface antigen of Hepatitis B virus (HBsAg), or encapsulin. Expressing a stably clustered Coronavirus spike protein, preferably in in its prefusion conformation, may increases the magnitude and breadth of neutralizing activity against the encoded Coronavirus S antigen.

[0408] Lumazine synthase (Lumazine, LS, LumSynth) is an enzyme with particle-forming properties, present in a broad variety of organisms, and involved in riboflavin biosynthesis. In particularly preferred embodiments, lumazine synthase is used to promote antigen clustering and may therefore promote or enhance immune responses of the encoded Coronavirus S antigen.

[0409] In particularly preferred embodiments, the antigen clustering element (multimerization element) is or is derived from lumazine synthase, wherein the amino acid sequences of said antigen clustering domain is preferably identical or at least 70%, 80%, 85%, 86%, 87%, 88%, 89%, 90%, 91%, 92%, 93%, 94%, 95%, 96%, 97%, 98%, or 99% identical to any one of amino acid sequences SEQ ID NO: 112, a fragment or variant thereof.

[0410] Ferritin is a protein whose main function is intracellular iron storage. Almost all living organisms produce ferritin which is made of 24 subunits, each composed of a four-alpha-helix bundle, that self-assemble in a quaternary structure with octahedral symmetry. Its properties to self-assemble into nanoparticles are well-suited to carry and expose antigens.

[0411] In particularly preferred embodiments, ferritin is used to promote the antigen clustering and may therefore promote immune responses of the encoded Coronavirus S protein.

[0412] In particularly preferred embodiments, the antigen clustering element (multimerization element) is selected or derived from ferritin wherein the amino acid sequences of said antigen clustering domain is preferably identical or at least 70%, 80%, 85%, 86%, 87%, 88%, 89%, 90%, 91%, 92%, 93%, 94%, 95%, 96%, 97%, 98%, or 99% identical to any one of amino acid sequence SEQ ID NO: 113, a fragment or variant thereof.

[0413] In some embodiments, the antigen clustering domain is a Hepatitis B surface antigen (HBsAg). HBsAg forms spherical particles. The addition of a fragment of the surface antigen of Hepatitis B virus (HBsAg) sequence may be particularly effective in enhancing the immune response of the nucleic-acid-based vaccine against Coronavirus.

[0414] In particularly preferred embodiments, HBsAg is used to promote the antigen clustering and may therefore promote immune responses of the encoded Coronavirus S antigen, preferably a spike protein as defined herein.

[0415] In some embodiments, the antigen clustering element is an encapsulin element. The addition of an encapsulin sequence may be particularly effective in enhancing the immune response of the nucleic-acid-based vaccine against Coronavirus. In particularly preferred embodiments, encapsulin is used to promote the antigen clustering and may therefore promote immune responses of the encoded Coronavirus S protein as defined herein.

[0416] Encapsulin is a protein isolated from thermophile Thermotoga maritima and may be used as an element to allow self-assembly of antigens to form antigen (nano)particles. Encapsulin is assembled from 60 copies of identical 31 kDa monomers having a thin and icosahedral T=1 symmetric cage structure with interior and exterior diameters of 20 and 24 nm, respectively.

[0417] In embodiments where the coding sequence of the (additional) nucleic acid additionally encodes heterologous antigen clustering element, it is particularly preferred and suitable to generate a fusion protein comprising an antigen clustering element and an antigenic peptide or protein derived from a Coronavirus S. Suitably, said antigenic peptide or protein, preferably the spike protein, is lacking the C-terminal transmembrane domain (TM) or is lacking a part of the C-terminal transmembrane domain (TM).

[0418] In other embodiments, where the coding sequence of the (additional) nucleic acid of additionally encodes heterologous antigen clustering element as defined above, it is particularly preferred and suitable to generate a fusion protein comprising an antigen clustering element and an antigenic peptide or protein derived from a Coronavirus spike protein fragment S1 (lacking S2 and/or TM and/or TMflex). Further, it may be suitable to use linker elements for separating the heterologous antigen clustering element from the antigenic peptide or protein (e.g. a linker according to SEQ ID NO: 115, 13148, 13152).

[0419] Further suitable multimerization elements may be selected from the list of amino acid sequences according to SEQ ID NOs: 1116-1167 of WO2017081082, or fragments or variants of these sequences. SEQ ID NOs: 1116-1167 of WO2017081082 are herewith incorporated by reference.

[0420] In preferred embodiments, the trimerization element may be selected from a foldon element. In preferred embodiments, the foldon element is a fibritin foldon element. Expressing a stable trimeric spike protein, preferably in its prefusion conformation, may increases the magnitude and breadth of neutralizing activity against a Coronavirus S.

[0421] In particularly preferred embodiments, a fibritin foldon element is used to promote the antigen trimerization and may therefore promote immune responses of the encoded coronavirus antigen, preferably spike protein. Preferably, the foldon element is or is derived from a bacteriophage, preferably from bacteriophage T4, most preferably from fibritin of bacteriophage T4.

[0422] In particularly preferred embodiments, the trimerization element is selected or derived from foldon wherein the amino acid sequences of said trimerization element is preferably identical or at least 70%, 80%, 85%, 86%, 87%, 88%, 89%, 90%, 91%, 92%, 93%, 94%, 95%, 96%, 97%, 98%, or 99% identical to any one of amino acid sequence SEQ ID NO: 114, a fragment or variant of any of these.

[0423] In embodiments where the coding sequence of the (additional) nucleic acid encodes heterologous trimerization element, it is particularly preferred and suitable to generate a fusion protein comprising a trimerization element and an antigenic peptide or protein derived from a Coronavirus S. Suitably, said antigenic peptide or protein, preferably the spike protein derived from Coronavirus that is lacking the C-terminal transmembrane domain, or is lacking a part of the C-terminal transmembrane domain (TMflex).

[0424] In other embodiments, where the coding sequence of the (additional) nucleic acid encodes heterologous trimerization element as defined above, it is particularly preferred and suitable to generate a fusion protein comprising an trimerization element and an antigenic peptide or protein derived from Coronavirus spike protein fragment S1 (lacking S2 and/or TM and/or TMflex). Further, it may be suitable to use linker elements for separating the heterologous antigen clustering element from the antigenic peptide or protein (e.g. a linker according to SEQ ID NO: 115, 13148, 13152).

[0425] Further suitable trimerization elements may be selected from the list of amino acid sequences according to SEQ ID NOs: 1116-1167 of WO2017081082, or fragments or variants of these sequences. SEQ ID NOs: 1116-1167 of WO2017081082 are herewith incorporated by reference.

[0426] In preferred embodiments, the VLP forming sequence may be selected and fused to the Coronavirus S antigen as defined herein. Expressing a stably clustered spike protein in VLP form may increases the magnitude and breadth of neutralizing activity against Coronavirus. VLPs structurally mimic infectious viruses and they can induce potent cellular and humoral immune responses.

[0427] Suitable VLP forming sequences may be selected from elements derived from Hepatitis B virus core antigen, HIV-1 Gag protein, or Woodchuck hepatitis core antigen element (WhcAg).

[0428] In particularly preferred embodiments, the at least one VLP-forming sequence is a Woodchuck hepatitis core antigen element (WhcAg). The WhcAg element is used to promote VLP formation and may therefore promote immune responses of the encoded Coronavirus S antigen, preferably spike protein.

[0429] In particularly preferred embodiments, the VLP forming sequence is selected or derived from foldon wherein the amino acid sequences of said VLP forming sequences is preferably identical or at least 70%, 80%, 85%, 86%, 87%, 88%, 89%, 90%, 91%, 92%, 93%, 94%, 95%, 96%, 97%, 98%, or 99% identical to any one of amino acid sequence SEQ ID NO: 13171, a fragment or variant of any of these.

[0430] In embodiments where the coding sequence of the (additional) nucleic acid encodes heterologous VLP forming sequence, it is particularly preferred and suitable to generate a fusion protein comprising a VLP forming sequence and an antigenic peptide or protein derived from Coronavirus S. Suitably, said antigenic peptide or protein, preferably the spike protein derived from a Coronavirus that is lacking the C-terminal transmembrane domain, or is lacking a part of the C-terminal transmembrane domain.

[0431] In other embodiments, where the coding sequence of the (additional) nucleic acid encodes heterologous VLP-forming sequence as defined above, it is particularly preferred and suitable to generate a fusion protein comprising a VLP-forming sequence and an antigenic peptide or protein derived from a Coronavirus spike protein fragment S1 (lacking S2 and/or TM and/or TMflex). Further, it may be suitable to use linker elements for separating the heterologous antigen clustering element from the antigenic peptide or protein (e.g. a linker according to SEQ ID NO: 115, 13148, 13152).

[0432] Further suitable VLP forming sequences in that context may be selected from the list of amino acid sequences according to SEQ ID NOs: 1168-1227 of the patent application WO2017081082, or fragments or variants of these sequences. SEQ ID NOs: 1168-1227 of WO2017081082 are herewith incorporated by reference.

[0433] In embodiments, the antigenic peptide or protein comprises a heterologous signal peptide. A heterologous signal peptide may be used to improve the secretion of the encoded Coronavirus S antigen.

[0434] Suitable secretory signal peptides may be selected from the list of amino acid sequences according to SEQ ID NOs: 1-1115 and SEQ ID NO: 1728 of published PCT patent application WO2017081082, or fragments or variants of these sequences. 1-1115 and SEQ ID NO: 1728 of WO2017081082 are herewith incorporated by reference.

[0435] In embodiments where the coding sequence of the (additional) nucleic acid encodes heterologous secretory signal peptide, it is particularly preferred and suitable to generate a fusion protein comprising a heterologous secretory signal peptide and an antigenic peptide or protein derived from a Coronavirus S. Suitably, said antigenic peptide or protein, preferably the spike protein derived from Coronavirus is lacking the N-terminal endogenous secretory signal peptide (lacking aa 1 to aa 15).

[0436] According to preferred embodiments, the (additional) nucleic acid comprises at least one coding sequence encoding at least one antigenic peptide or protein selected or derived from a Coronavirus S as defined herein, or fragments and variants thereof. In preferred embodiments, the nucleic acid comprises at least one coding sequence encoding at least one antigenic peptide or protein selected or derived from at least one Coronavirus S as defined herein, or fragments and variants thereof, wherein said at least one Coronavirus is selected from at least one (pandemic) Alphacoronavirus, at least one (pandemic) Betacoronavirus, at least one (pandemic) Gammacoronavirus, and/or at least one (pandemic) Deltacoronavirus.

[0437] In that context, any coding sequence encoding at least one antigenic protein of a Coronavirus S as defined herein, or fragments and variants thereof may be understood as suitable coding sequence and may therefore be comprised in the (additional) nucleic acid of the pharmaceutical composition.

[0438] Suitable features and embodiments that apply to the nucleic acids as defined herein encoding spike proteins are provided in paragraph “Nucleic acid features and embodiments” below.

[0439] Suitably, the (additional) nucleic acids encoding spike proteins is formulated and/or complexed. Suitable features and embodiments that apply to nucleic acid complexation or formulation are provided in paragraph “Formulation and Complexation” below.

[0440] Preferably, intramuscular or intradermal administration of a composition comprising at least one nucleic acid encoding Coronavirus spike protein (S) as defined herein results in expression of the encoded Coronavirus spike protein (S) construct in a subject. In embodiments where the nucleic acid is an RNA, administration of the composition results in translation of the RNA and to a production of the encoded Coronavirus spike protein (S) antigen in a subject. In embodiments where the nucleic acid is a DNA (e.g. plasmid DNA, adenovirus DNA), administration of said composition results in transcription of the DNA into RNA, and to a subsequent translation of the RNA into the encoded Coronavirus spike protein (S) antigen in a subject.

[0441] In embodiments, administration of the pharmaceutical composition comprising at least one nucleic acid encoding Coronavirus spike protein (S) to a subject elicits neutralizing antibodies against Coronavirus spike protein (S) and does not elicit disease enhancing antibodies. In particular, administration of a pharmaceutical composition comprising at least one nucleic acid encoding Coronavirus spike protein (S) pre-fusion stabilized spike protein to a subject does not elicit immunopathological effects, like e.g. enhanced disease and/or antibody dependent enhancement (ADE).

[0442] In preferred embodiments, administration of the pharmaceutical composition comprising at least one nucleic acid encoding Coronavirus spike protein (S) to a subject elicits antigen-specific immune responses comprising T-cell responses and/or B-cell responses against the encoded Coronavirus spike protein (S) antigen.

[0443] Nucleic Acid Encoding SARS-CoV-2 Spike Protein

[0444] In a particularly preferred embodiment, the Coronavirus spike protein (S) is selected or derived from at least one SARS-CoV-2 spike protein (S1, S2, or S1 and S2), or an immunogenic fragment or immunogenic variant thereof.

[0445] In a further particularly preferred embodiment, the Coronavirus spike protein (S) is selected or derived from at least one SARS-CoV-2 variant spike protein (S1, S2, or S1 and S2), or an immunogenic fragment or immunogenic variant thereof.

[0446] Accordingly, in preferred embodiments of the first aspect, the (additional) nucleic acid comprises at least one coding sequence encoding at least one antigenic peptide or protein selected or derived from at least one SARS-CoV-2, or an immunogenic fragment or immunogenic variant thereof.

[0447] It has to be understood that generic embodiments and features that have been described paragraph “Nucleic acid encoding a Coronavirus spike protein” may also apply to a nucleic acid encoding a SARS-CoV-2 spike protein.

[0448] In the context of the invention, any S protein selected or derived from a SARS-CoV-2 may be used in the context of the invention and may be suitably encoded by the coding sequence or the nucleic acid. It is further in the scope of the underlying invention, that the at least one antigenic peptide or protein may comprise or consist of a synthetically engineered or an artificial SARS-CoV-2 S peptide or protein. The term “synthetically engineered” SARS-CoV-2 S peptide or protein, or the term “artificial SARS-CoV-2 S peptide or protein” relates to an S protein that does not occur in nature. Accordingly, an “artificial SARS-CoV-2 S peptide or protein” or a “synthetically engineered SARS-CoV-2 S peptide or protein” may for example differ in at least one amino acid compared to the natural SARS-CoV-2 S peptide or protein, and/or may comprise an additional heterologous peptide or protein element, and/or may be N-terminally or C-terminally extended or truncated.

[0449] In the context of the invention, any Spike protein that is selected from or is derived from a SARS-CoV-2 comprising at least one amino acid substitution selected from a SARS-CoV-2 variant may be used and may be suitably encoded by the coding sequence or the nucleic acid may be used in the context of the invention. It is further in the scope of the underlying invention, that the at least one antigenic peptide or protein may comprise or consist of a synthetically engineered or an artificial SARS-CoV-2 spike protein. The term “synthetically engineered” SARS-CoV-2 spike protein, or the term “artificial SARS-CoV-2 spike protein” relates to a protein that does not occur in nature. Accordingly, an “artificial SARS-CoV-2 spike protein” or a “synthetically engineered SARS-CoV-2 spike protein” may for example differ in at least one amino acid compared to the natural SARS-CoV-2 spike protein, and/or may comprise an additional heterologous peptide or protein element, and/or may be N-terminally or C-terminally extended or truncated.

[0450] In preferred embodiments, the (additional) nucleic acid comprises at least one coding sequence encoding at least one antigenic peptide or protein selected or derived from SARS-CoV-2 spike protein (S), or an immunogenic fragment or immunogenic variant thereof.

[0451] In particularly preferred embodiments of the pharmaceutical composition, the encoded at least one antigenic peptide or protein of the (additional) nucleic acid comprises or consists at least one peptide or protein selected or derived from a SARS-CoV-2 spike protein (S, S1, S2, or S1 and S2), or an immunogenic fragment or immunogenic variant of any of these.

[0452] Suitable SARS-CoV-2 spike antigenic peptide or proteins sequences that are provided by the (additional) nucleic acid are disclosed in Table 2, rows 1 to 41, Column A and B. In addition, further information regarding said suitable antigenic peptide or protein sequences selected or derived from SARS-CoV-2 spike protein are provided under <223> identifier of the ST25 sequence listing.

[0453] It has to be noted that where reference is made to amino acid (aa) residues and their position in a SARS-CoV-2 spike protein, any numbering used herein—unless stated otherwise—relates to the position of the respective amino acid residue in a corresponding spike protein (S) of the original or ancestral SARS-CoV-2 coronavirus isolate EPI_ISL_402128 (BetaCoV_Wuhan_WIV05_2019_EPI_ISL_402128) according to SEQ ID NO: 1. Respective amino acid positions are, if referring to SARS-CoV-2 Spike protein, exemplarily indicated for spike protein (S) of SARS-CoV-2 coronavirus isolate EPI_ISL_402128 (SEQ ID NO: 1). The person skilled in the art will of course be able to adapt the teaching provided in the present specification exemplified for SARS-CoV-2 EPI_ISL_402128 (SEQ ID NO: 1) to other antigenic peptides or proteins in other SARS-CoV-2 coronavirus isolates, e.g. to isolates including but not limited to EPI_ISL_404227, EPI_ISL_403963, EPI_ISL_403962, EPI_ISL_403931, EPI_ISL_403930, EPI_ISL_403929, EPI_ISL_402130, EPI_ISL_402129, EPI_ISL_402128, EPI_ISL_402126, EPI_ISL_402125, EPI_ISL_402124, EPI_ISL_402123, EPI_ISL_402120, EPI_ISL_402119 (further SARS-CoV-2 isolates are provided in List A and/or List B).

[0454] Protein annotation for SARS-CoV-2 spike protein (S) was performed using SEQ ID NO: 1 as a reference protein. The full-length S of SARS-CoV-2 reference protein has 1273 amino acid residues, and comprises the following elements:
[0455] secretory signal peptide: amino acid position aa 1 to aa 15 (see SEQ ID NO: 28)
[0456] spike protein fragment S1: amino acid position aa 1 to aa 681 (see SEQ ID NO: 27)
[0457] S1-N-Terminal Domain (S1-NTD) amino acid position aa 1 to aa 681 (see SEQ ID NO: 26992)
[0458] receptor binding domain (RBD): amino acid position aa 319 to aa 541 (see SEQ ID NO: 13243)
[0459] critical neutralisation domain (CND): amino acid position aa 329 to aa 529 (see SEQ ID NO: 13310)
[0460] spike protein fragment S2: amino acid position aa 682 to aa 1273 (see SEQ ID NO: 30)
[0461] transmembrane domain (TM) amino acid position aa 1212 to aa 1273 (see SEQ ID NO: 49)
[0462] transmembrane domain (TMflex) amino acid position aa 1148 to aa 1273 (see SEQ ID NO: 13176)
[0463] Furine cleavage site region (S1/S2) amino acid position aa 681 to aa 685 (see SEQ ID NO: 26994)

[0464] It has to be noted that variation on amino acid level naturally occurs between spike proteins derived from different SARS-CoV-2 isolates or SARS-CoV-2 variants. In the context of the invention, such amino acid variations can be applied to each antigenic peptide or protein derived from a SARS-CoV-2 spike protein as described herein. Suitably, the amino acid variations or mutations are selected in a way to induce an immune response against the SARS-CoV-2 virus variant the substitution/mutation is derived from.

[0465] Accordingly, in particularly preferred embodiments, the nucleic acid of the invention comprises at least one coding sequence encoding at least one SARS-CoV-2 spike protein, or an immunogenic fragment or immunogenic variant thereof, wherein the SARS-CoV-2 spike protein comprises at least one amino acid substitution, deletion, or insertion selected from a SARS-CoV-2 variant.

[0466] In that context, the term “at least one amino acid substitution, deletion, or insertion selected from a SARS-CoV-2 variant” has to be understood as at least one amino acid position in the SARS-CoV-2 spike protein (or fragment thereof) that is different to the original SARS-CoV-2 spike protein (according to the SEQ ID NO: 1 reference strain).

[0467] In preferred embodiments, the SARS-CoV-2 variant is selected from or is derived from the following SARS-CoV-2 lineages: B.1.351 (South Africa), B.1.1.7 (UK), P.1 (Brazil), B.1.429 (California), B.1.525 (Nigeria), B.1.258 (Czech republic), B.1.526 (New York), A.23.1 (Uganda), B.1.617.1 (India), B.1.617.2 (India), B.1.617.3 (India), P.2 (Brazil), C37.1 (Peru).

[0468] In particularly preferred embodiments, the SARS-CoV-2 variant is selected from or derived from the following SARS-CoV-2 lineages: B.1.351 (South Africa), P.1 (Brazil), B.1.617.1 (India), B.1.617.2 (India), B.1.617.3 (India).

[0469] Accordingly, each spike protein of SARS-CoV-2 provided herein and contemplated as suitable antigen in the context of the invention may have one or more of the following amino acid variations, substitutions or mutations (amino acid positions according to reference SEQ ID NO: 1):
[0470] D614G or G614D; H49Y or Y49H; V367F or F367V; P1263L or L1263P; V483A or A483V; S939F or F939S; S943P or P943S; L5F or F5L; L8V or V8L; S940F or F940S; C1254F or F1254C; Q239K or K239Q; M153T or T153M; V1040F or F1040V; A845S or S845A; Y145H or H145Y; A831V or V831A; M1229I or I1229M; H69 or H69del/aa deleted; V70 or H70del/aa deleted; H69_V70 or H69del and H70del/aa deleted; A222V or V222A; Y453F or F453Y; S477N or N477S; I692V or V692I; R403K or K403R; K417N or N417K; N437S or S437N; N439K or K439N; V445A or A445V; V445I or I445V; V445F or F445V; G446V or V446G; G446S or S446G; G446A or A446G; L455F or F455L; F456L or L456F; K458N or N458K; A475V or V475A; G476S or S476G; G476A or A476G; S477I or I477S; S477R or R477S; S477G or G477S; S477T or T477S; T478I or I478T; T478K or K478T; T478R or R478T; T478A or A478T; E484Q or Q484E; E484K or K484E; E484A or A484E; E484D or D484E; G485R or R485G; G485S or S485G, F486L or L486F; N487I or I487N; Y489H or H489Y; F490S or S490F; F490L or L490F; Q493L or L493Q; Q493K or K493Q; S494P or P494S; S494L or L494S; P499L or L499P; T500I or I500T; N501Y or Y501N; N501T or T501N; N501S or S501N; V503F or F503V; V503I or I503V; G504D or D504G; Y505W or W505Y; Q506K or K506Q; Q506H or H506Q; H69 or H69del/aa deleted; V70 or H70del/aa deleted; H69_V70 or H69del and H70del/aa deleted; A222V or V222A; Y453F or F453Y; S477N or N477S; I692V or V692I; R403K or K403R; K417N or N417K; N437S or S437N; N439K or K439N; V445A or A445V; V445I or I445V; V445F or F445V; G446V or V446G; G446S or S446G; G446A or A446G; L455F or F455L; F456L or L456F; K458N or N458K; A475V or V475A; G476S or S476G; G476A or A476G; S477I or I477S; S477R or R477S; S477G or G477S; S477T or T477S; T478I or I478T; T478K or K478T; T478R or R478T; T478A or A478T; E484Q or Q484E; E484K or K484E; E484A or A484E; E484D or D484E; G485R or R485G; G485S or S485G; F486L or L486F; N487I or I487N; Y489H or H489Y; F490S or S490F; F490L or L490F; Q493L or L493Q; Q493K or K493Q; S494P or P494S; S494L or L494S; P499L or L499P; T500I or I500T: N501Y or Y501N; N501T or T501N; N501S or S501N; V503F or F503V; V503I or I503V; G504D or D504G; Y505W or W505Y; Q506K or K506Q; Q506H or H506Q; Y144 or Y144del/aa del; A570D or D570A; P681H or H681P; T716I or I716T; S982A or A982S; D1118H or H1118D; L18F or F18L; D80A or A80D; D215G or G215D; L242 or L242del/aa deleted; A243 or A243del/aa deleted; L244 or L244del/aa deleted; L242_A243_L244 or L242del and A243del and L244del/aa deleted; R246I or I246R; A701V or V701A; T20N or N20T; P26S or S26P; D138Y or Y138D; R190S or S190R; H655Y or Y655H; T1027I or I1027T; S13I or I13S; W152C or C152W; L452R or R452L; R346T or T346R; P384L or L384P; L452M or M452L; F456A or A456F; F456K or K456F; F456V or V456F; E484P or P484E; K417T or T417K; G447V or V447G; L452Q or Q452L; A475S or S475A; F486I or I486F; F490Y or Y490F; Q493R or R493Q; S494A or A494S; P499H or H499P; P499S or S499P; G502V or V502G; T748K or K748T; A522S or S522A; and/or V1176F or F1176V.

[0471] The variations or mutations provided below are derived from novel emerging SARS-CoV-2 virus variants, and may be integrated into the spike protein that is provided by the nucleic acid of the invention:

[0472] List 1A: Amino Acid Positions for Substitutions Deletions and/or Insertions
[0473] H69; V70; A222; Y453; S477; I692; R403; K417; N437; N439; V445; G446; L455; F456; K458; A475; G476; T478; E484; G485, F486; N487; Y489; F490; Q493; S494; P499; T500; N50I; V503; G504; Y505; 0506; Y144; A570; P68I; T716; S982; D1118; L18; D80; D215; L242; A243; L244; R246; A70I; T20; P26; D138; R190; H655; T1027; S13; W152; L452; R346; P384; G447; G502; T748; A522; V1176; T859; S247; Y248; L249; T250; P25I; G252; G75; T76; D950; E154; G769; S254; Q613; F157; R158; Q957; D253; T95; F888; Q677; A67; Q414; N450; V483; G669; T732; Q949; Q107I; E1092; H110I; N1187; W258; T19; V126; H245; S12; A899; G142; E156; K558; or Q52 (relative to the sequence of SEQ ID NO: 1).

[0474] List 1B: Amino Acid Substitutions Deletions or Insertions
[0475] H69del; V70del; A222V; Y453F; S477N; I692V; R403K; K417N; N437S; N439K; V445A; V445I; V445F; G446V; G446S; G446A; L455F; F456L; K458N; A475V; G476S; G476A; S477I; S477R; S477G; S477T; T478I; T478K; T478R; T478A; E484Q; E484K; E484A; E484D; G485R; G485S, F486L; N487I; Y489H; F490S; F490L; Q493L; Q493K; S494P; S494L; P499L; T500I; N501Y; N501T; N501S; V503F; V503I; G504D; Y505W; Q506K; Q506H; Y144del; A570D; P681H; T716I; S982A; D1118H; L18F; D80A; D215G; L242del; A243del; L244del; L242del; A243del; L244del; R246I; A701V; T20N; P26S; D138Y; R190S; H655Y; T1027I; S13I; W152C; L452R; R346T; P384L; L452M; F456A; F456K; F456V; E484P; K417T; G447V; L452Q; A475S; F486I; F490Y; Q493R; S494A; P499H; P499S; G502V; T748K; A522S; V1176F; T859N; S247del; Y248del; L249del; T250del; P251del; G252del; R246del; S247del; Y248del; L249del; T250del; P251del; G252del; G75V; T76I; G75V; T76I; D950N; P681R; E154K; G769V; S254F; Q613H; F157L; F157del; R158del; Q957R; D253G; T95I; F888L; Q677H; A67V; Q414K; N450K; V483A; G669S; T732A; Q949R; Q1071H; E1092K; H1101Y; N1187D; W258L; V70F; T19R; Y144T; Y145S; ins145N; R346K; R346S; V126A; H245Y; ins214TDR; S12F; W152R; A899S; G142D; E156G; K558N; or Q52R (relative to the sequence of SEQ ID NO: 1).

[0476] In a preferred embodiment there is provided a RNA comprising at least one coding sequence encoding at least one SARS-CoV-2 spike protein or an immunogenic fragment or immunogenic variant thereof, wherein the SARS-CoV-2 spike protein comprises at least one amino acid substitution, deletion or insertion at a position corresponding to H69; V70; A222; Y453; S477; I692; R403; K417; N437; N439; V445; G446; L455; F456; K458; A475; G476; T478; E484; G485, F486; N487; Y489; F490; Q493; S494; P499; T500; N50I; V503; G504; Y505; 0506; Y144; A570; P68I; T716; S982; D1118; L18; D80; D215; L242; A243; L244; R246; A70I; T20; P26; D138; R190; H655; T1027; S13; W152; L452; R346; P384; G447; G502; T748; A522; V1176; T859; S247; Y248; L249; T250; P25I; G252; G75; T76; D950; E154: G769; S254; 0613; F157; R158; Q957; D253; T95; F888; Q677; A67; Q414; N450; V483; G669; T732; Q949; Q107I; E1092; H110I; N1187; W258; T19; V126; H245; S12; A899; G142; E156; K558; and/or Q52 relative to the sequence of SEQ ID NO: 1.

[0477] In particularly preferred embodiments, the SARS-CoV-2 spike protein comprises at least one amino acid substitution, deletion or insertion at a position corresponding to H69del; V70del; A222V; Y453F; S477N; I692V; R403K; K417N; N437S; N439K; V445A; V445I; V445F; G446V; G446S; G446A; L455F; F456L; K458N; A475V; G476S; G476A; S477I; S477R; S477G; S477T; T478I; T478K; T478R; T478A; E484Q; E484K; E484A; E484D; G485R; G485S, F486L; N487I; Y489H; F490S; F490L; Q493L; Q493K; S494P; S494L; P499L; T500I; N501Y; N501T; N501S; V503F; V503I; G504D; Y505W; Q506K; Q506H; Y144del; A570D; P681H; T716I; S982A; D1118H; L18F; D80A; D215G; L242del; A243del; L244del; L242del; A243del; L244del; R246I; A701V; T20N; P26S; D138Y; R190S; H655Y; T1027I; S13I; W152C; L452R; R346T; P384L; L452M; F456A; F456K; F456V; E484P; K417T; G447V; L452Q; A475S; F486I; F490Y; Q493R; S494A; P499H; P499S; G502V; T748K; A522S; V1176F; T859N; S247del; Y248del; L249del; T250del; P251del; G252del; R246del; S247del; Y248del; L249del; T250del; P251del; G252del; G75V; T76I; G75V; T76I; D950N; P681R; E154K; G769V; S254F; Q613H; F157L; F157del; R158del; Q957R; D253G; T95I; F888L; Q677H; A67V; Q414K; N450K; V483A; G669S; T732A; Q949R; Q1071H; E1092K; H1101Y; N1187D; W258L; V70F; T19R; Y144T; Y145S; ins145N; R346K; R346S; V126A; H245Y; ins214TDR; S12F; W152R; A899S; G142D; E156G; K558N; and/or Q52R relative to the sequence of SEQ ID NO: 1.

[0478] In certain embodiments there is provided a nucleic acid comprising at least one coding sequence encoding at least one SARS-CoV-2 spike protein or an immunogenic fragment or immunogenic variant thereof, wherein the SARS-CoV-2 spike protein comprises at least one amino acid substitution, deletion or insertion at a position corresponding to H69; V70; A222; Y453; S477; I692; R403; K417; N437; N439; V445; G446; L455; F456; K458; A475; G476; T478; E484; G485, F486; N487; Y489; F490; Q493; S494; P499; T500; N50I; V503; G504; Y505; and/or Q506 relative to the sequence of SEQ ID NO: 1. Thus, in some embodiments the SARS-CoV-2 spike protein comprises at least one amino acid substitution, deletion or insertion at a position corresponding to H69del; V70del; A222V; Y453F; S477N; I692V; R403K; K417N; N437S; N439K; V445A; V445I; V445F; G446V; G446S; G446A; L455F; F456L; K458N; A475V; G476S; G476A; S477I; S477R; S477G; S477T; T478I; T478K; T478R; T478A; E484Q; E484K; E484A; E484D; G485R; G485S, F486L; N487I; Y489H; F490S; F490L; Q493L; Q493K; S494P; S494L; P499L; T500I; N501Y; N501T; N501S; V503F; V503I; G504D; Y505W; Q506K; and/or Q506H relative to the sequence of SEQ ID NO: 1.

[0479] In a further embodiment there is provided a nucleic acid comprising at least one coding sequence encoding at least one SARS-CoV-2 spike protein or an immunogenic fragment or immunogenic variant thereof, wherein the SARS-CoV-2 spike protein comprises at least one amino acid substitution, deletion or insertion at a position corresponding to H69; V70; A222; Y453; S477; I692; R403; K417; N437; N439; V445; G446; L455; F456; K458; A475; G476; T478; E484; G485, F486; N487; Y489; F490; Q493; S494; P499; T500; N50I; V503; G504; Y505; Q506; Y144; A570; P68I; T716; S982; D1118; L18; D80; D215; L242; A243; L244; R246; A70I; T20; P26; D138; R190; H655; T1027; S13; W152; L452; R346; P384; G447; G502; T748; A522; or V1176 relative to the sequence of SEQ ID NO: 1. Thus, in some embodiments the SARS-CoV-2 spike protein comprises at least one amino acid substitution, deletion or insertion at a position corresponding to H69del; V70del; A222V; Y453F; S477N; I692V; R403K; K417N; N437S; N439K; V445A; V445I; V445F; G446V; G446S; G446A; L455F; F456L; K458N; A475V; G476S; G476A; S477I; S477R; S477G; S477T; T478I; T478K; T478R; T478A; E484Q; E484K; E484A; E484D; G485R; G485S, F486L; N487I; Y489H; F490S; F490L; Q493L; Q493K; S494P; S494L; P499L; T500I; N501Y; N501T; N501S; V503F; V503I; G504D; Y505W; Q506K; Q506H; Y144del; A570D; P681H; T716I; S982A; D1118H; L18F; D80A; D215G; L242del; A243del; L244del; L242del; A243del; L244del; R246I; A701V; T20N; P26S; D138Y; R190S; H655Y; T1027I; S13I; W152C; L452R; R346T; P384L; L452M; F456A; F456K; F456V; E484P; K417T; G447V; L452Q; A475S; F486I; F490Y; Q493R; S494A; P499H; P499S; G502V; T748K; A522S; and/or V1176F relative to the sequence of SEQ ID NO: 1.

[0480] In a further preferred embodiment there is provided a nucleic acid comprising at least one coding sequence encoding at least one SARS-CoV-2 spike protein or an immunogenic fragment or immunogenic variant thereof, wherein the SARS-CoV-2 spike protein comprises at least one amino acid substitution, deletion or insertion at a position corresponding to T859; R246; S247; Y248; L249; T250; P251; G252; G75; T76; D950; E154; G769; S254; Q613; F157; Q957; D253; T95; F888; Q677; A67; Q414; N450; V483; G669; T732; Q949; Q1071; E1092; H1101; N1187; F157; R158; W258; T19; H245; S12; A899; G142; E156; K558 and/or Q52 relative to the sequence of SEQ ID NO: 1. Thus, in some embodiments the SARS-CoV-2 spike protein comprises at least one amino acid substitution, deletion or insertion at a position corresponding to T859N; S247del; Y248del; L249del; T250del; P251del; G252del; R246del; S247del; Y248del; L249del; T250del; P251del; G252del; G75V; T76I; G75V; T76I; D950N; P681R; E154K; G769V; S254F; Q613H; F157L; Q957R; D253G; T95I; F888L; Q677H; A67V; Q414K; N450K; V483A; G669S; T732A; Q949R; Q1071H; E1092K; H1101Y; N1187D; F157del; R158del; W258L; V70F; T19R; Y144T; Y145S; ins145N; R346K; R346S; V126A; H245Y; ins214TDR; S12F; W152R; A899S; G142D; E156G; K558N and/or Q52R relative to the sequence of SEQ ID NO: 1.

[0481] In still a further embodiment there is provided a nucleic acid comprising at least one coding sequence encoding at least one SARS-CoV-2 spike protein or an immunogenic fragment or immunogenic variant thereof, wherein the SARS-CoV-2 spike protein comprises at least one amino acid substitution, deletion or insertion at a position corresponding to D614; H49; V367; P1263; V483; S939; S943; L5; L8; S940; C1254; Q239; M153; V1040; A845; Y145; A831; and/or M1229 relative to the sequence of SEQ ID NO: 1. Thus, in some embodiments the SARS-CoV-2 spike protein comprises at least one amino acid substitution, deletion or insertion at a position corresponding to D614G; H49Y; V367F; P1263L; V483A; S939F; S943P; L5F; L8V; S940F; C1254F; Q239K; M153T; V1040F; A845S; Y145H; A831V; and/or M1229I relative to the sequence of SEQ ID NO: 1.

[0482] In still a further embodiment there is provided a nucleic acid comprising at least one coding sequence encoding at least one SARS-CoV-2 spike protein or an immunogenic fragment or immunogenic variant thereof, wherein the SARS-CoV-2 spike protein comprises at least one amino acid substitution or deletion at a position corresponding to H69; V70; A222; Y453; S477; I692; R403; K417; N437; N439; V445; G446; L455; F456; K458; A475; G476; T478; E484; G485, F486; N487; Y489; F490; Q493; S494; P499; T500; N501; V503; G504; Y505; Q506; Y144; A570; P681; T716; S982; D1118; L18; D80; D215; L242; A243; L244; R246; A701; T20; P26; D138; R190; H655; T1027; S13; W152; L452; R346; P384; G447; G502; T748; A522; V1176; T859; S247; Y248; L249; T250; P251; G252; G75; T76; D950; E154; G769; S254; Q613; F157; Q957; D253; T95; F888; Q677; A67; Q414; N450; V483; G669; T732; Q949; Q1071; E1092; H1101; N1187 and/or Q52 relative to the sequence of SEQ ID NO: 1. Thus, in some embodiments the SARS-CoV-2 spike protein comprises at least one amino acid substitution or deletion at a position corresponding to H69del; V70del; A222V; Y453F; S477N; I692V; R403K; K417N; N437S; N439K; V445A; V445I; V445F; G446V; G446S; G446A; L455F; F456L; K458N; A475V; G476S; G476A; S477I; S477R; S477G; S477T; T478I; T478K; T478R; T478A; E484Q; E484K; E484A; E484D; G485R; G485S, F486L; N487I; Y489H; F490S; F490L; Q493L; Q493K; S494P; S494L; P499L; T500I; N501Y; N501T; N501S; V503F; V503I; G504D; Y505W; Q506K; Q506H; Y144del; A570D; P681H; T716I; S982A; D1118H; L18F; D80A; D215G; L242del; A243del; L244del; L242del; A243del; L244del; R246I; A701V; T20N; P26S; D138Y; R190S; H655Y; T1027I; S13I; W152C; L452R; R346T; P384L; L452M; F456A; F456K; F456V; E484P; K417T; G447V; L452Q; A475S; F486I; F490Y; Q493R; S494A; P499H; P499S; G502V; T748K; A522S; V176F; T859N; S247del; Y248del; L249del; T250del; P251del; G252del; R246del; S247del; Y248del; L249del; T250del; P251del; G252del; G75V; T76I; G75V; T76I; D950N; P681R; E154K; G769V; S254F; Q613H; F157L: F157del; R158del; Q957R; D253G; T95I; F888L; Q677H; A67V; Q414K; N450K; V483A; G669S; T732A; Q949R; Q1071H; E1092K; H1101Y; N1187D; W258L; V70F; T19R; Y144T; Y145S; R346K; R346S; V126A; H245Y; S12F; W152R; A899S; G142D; E156G; K558N; and/or Q52R.

[0483] In preferred embodiments, the SARS-CoV-2 spike protein comprises an amino acid substitution at a position located in the RBD domain (amino acid position aa 319 to aa 541; amino acid positions according to reference SEQ ID NO: 1) or the CND domain (amino acid position aa 329 to aa 529; amino acid positions according to reference SEQ ID NO: 1). Without wishing to be bound to theory, amino acid substitutions or mutations in the CND domain may help novel emerging SARS-CoV-2 variants to evade antibody detection of some types of antibodies induced in subjects vaccinated with first generation vaccines (designed against the original SARS-CoV-2 strain) or induced in subjects after infection with the original SARS-CoV-2 strain.

[0484] Accordingly, in preferred embodiments, the first aspect of the invention relates to a nucleic acid comprising at least one coding sequence encoding at least one antigenic peptide or protein from a SARS-CoV-2 spike protein or an immunogenic fragment or immunogenic variant thereof, wherein the SARS-CoV-2 spike protein comprises at least one amino acid substitution at position located in the RBD domain (amino acid position aa 319 to aa 541; amino acid positions according to reference SEQ ID NO: 1) or the CND domain (amino acid position aa 329 to aa 529 amino acid positions according to reference SEQ ID NO: 1).

[0485] In certain preferred embodiments, the SARS-CoV-2 spike protein comprises an amino acid substitution, insertion or deletion in at least one of the following positions: R346; V367, P384; R403; K417; N437; N439; V445; G446; G447; N450; L452; Y453; L455; F456; A475; G476; S477; T478; E484; G485; F486; N487; Y489; F490; Q493; S494; P499; T500; N501; G502; V503; G504; Y505; Q506; A522 (amino acid positions according to reference SEQ ID NO: 1).

[0486] Accordingly, in certain preferred embodiments, the first aspect of the invention relates to an nucleic acid comprising at least one coding sequence encoding at least one antigenic peptide or protein from a SARS-CoV-2 spike protein or an immunogenic fragment or immunogenic variant thereof, wherein the SARS-CoV-2 spike protein comprises at least one amino acid substitution at positions selected from K417; L452; E484; N501 and/or P681 (amino acid positions according to reference SEQ ID NO: 1).

[0487] Without wishing to be bound to theory, an amino acid substitution at position E484 may help SARS-CoV-2 virus variants to evade antibody detection of some types of antibodies induced in subjects vaccinated with first generation vaccines (designed against the original SARS-CoV-2 strain) or induced in subjects after infection with the original SARS-CoV-2 strain. A mutation/substitution in N501 occurs near the top of the coronavirus spike, where it may alter the shape of the protein, which may help to evade some types of coronavirus antibodies. Such SARS-CoV-2 are called SARS-CoV-2 E484 variants throughout the present invention and include e.g. SARS-CoV-2 B.1.351 (South Africa), SARS-CoV-2 B.1.617 (India), or P.1 (Brazil).

[0488] Accordingly, in some embodiments, it may be advantageous that the nucleic acid of the invention provides a SARS-CoV-2 spike protein comprising a substitution in position E484 to allow the induction of efficient immune responses against virus SARS-CoV-2 E484 variants.

[0489] In preferred embodiments, the SARS-CoV-2 spike protein comprises an amino acid substitution at position E484, wherein the amino acids E484 is substituted with K, P, Q, A, or D (amino acid positions according to reference SEQ ID NO: 1). Accordingly, the antigenic peptide or protein selected from or derived from SARS-CoV-2 spike protein comprises a E484K, E484P, E484Q, E484A, E484D amino acid substitution.

[0490] In particularly preferred embodiments, the SARS-CoV-2 spike protein comprises an amino acid substitution at position E484, wherein the amino acids E484 is substituted with K or Q (amino acid positions according to reference SEQ ID NO: 1). Accordingly, the antigenic peptide or protein selected from or derived from SARS-CoV-2 spike protein comprises a E484K or E484Q amino acid substitution. In certain preferred embodiments a SARS-CoV-2 spike protein comprises a E484K amino acid substitution.

[0491] In preferred embodiments, the SARS-CoV-2 spike protein comprises an amino acid substitution at position N501, wherein the amino acids N501 is substituted with a different amino acid (amino acid positions according to reference SEQ ID NO: 1).

[0492] Without wishing to be bound to theory, an amino acid substitution at position N501 may help SARS-CoV-2 virus variants to evade antibody detection of some types of antibodies induced in subjects vaccinated with first generation vaccines (designed against the original SARS-CoV-2 strain) or induced in subjects after infection with the original SARS-CoV-2 strain. A mutation/substitution in N501 occurs near the top of the coronavirus spike, where it may alter the shape of the protein, which may help to evade some types of coronavirus antibodies. Such SARS-CoV-2 are called SARS-CoV-2 N501 variants throughout the present invention and include e.g. SARS-CoV-2 B.1.351 (South Africa), SARS-CoV-2 B.1.1.7 (UK), or P.1 (Brazil).

[0493] Accordingly it may be advantageous that the nucleic acid of the invention provides a SARS-CoV-2 spike protein comprising a substitution in position N501 to allow the induction of efficient immune responses against virus SARS-CoV-2 N501 variants.

[0494] In preferred embodiments, the SARS-CoV-2 spike protein comprises an amino acid substitution at position N501, wherein the amino acids N501 is substituted with Y, T, S (amino acid positions according to reference SEQ ID NO: 1). Accordingly, the antigenic peptide or protein selected from or derived from SARS-CoV-2 spike protein comprises a N501Y, N501T, N501S amino acid substitution.

[0495] In particularly preferred embodiments, the SARS-CoV-2 spike protein comprises an amino acid substitution at position N501, wherein the amino acids N501 is substituted with Y (amino acid positions according to reference SEQ ID NO: 1). Accordingly, the antigenic peptide or protein selected from or derived from SARS-CoV-2 spike protein comprises a N501Y amino acid substitution.

[0496] In preferred embodiments, the SARS-CoV-2 spike protein comprises an amino acid substitution at position K417, wherein the amino acids K417 is substituted with a different amino acid (amino acid positions according to reference SEQ ID NO: 1).

[0497] Without wishing to be bound to theory, an amino acid substitution at position K417 may help SARS-CoV-2 virus variants to evade antibody detection of some types of antibodies induced in subjects vaccinated with first generation vaccines (designed against the original SARS-CoV-2 strain) or induced in subjects after infection with the original SARS-CoV-2 strain. A mutation/substitution in K417 occurs near the top of the coronavirus spike, where it may alter the shape of the protein, which may help to evade some types of coronavirus antibodies. Such SARS-CoV-2 are called SARS-CoV-2 K417 variants throughout the present invention and include e.g. SARS-CoV-2 B.1.351 (South Africa), SARS-CoV-2 B.1.1.7 (UK), P.1 (Brazil) or AY.1/AY.2.

[0498] Accordingly it may be advantageous that the nucleic acid of the invention provides a SARS-CoV-2 spike protein comprising a substitution in position K417 to allow the induction of efficient immune responses against virus SARS-CoV-2 K417 variants.

[0499] In preferred embodiments, the SARS-CoV-2 spike protein comprises an amino acid substitution at position K417, wherein the amino acids N501 is substituted with S, T, Q or N (amino acid positions according to reference SEQ ID NO: 1). Accordingly, the antigenic peptide or protein selected from or derived from SARS-CoV-2 spike protein comprises a K417S, K417T, K417Q or K417N amino acid substitution.

[0500] In particularly preferred embodiments, the SARS-CoV-2 spike protein comprises an amino acid substitution at position N501, wherein the amino acids K417 is substituted with T or N (amino acid positions according to reference SEQ ID NO: 1). Accordingly, the antigenic peptide or protein selected from or derived from SARS-CoV-2 spike protein comprises a K417T or K417N amino acid substitution. In certain preferred embodiments the antigenic peptide or protein selected from or derived from SARS-CoV-2 spike protein comprises a K417N amino acid substitution.

[0501] In preferred embodiments, the SARS-CoV-2 spike protein comprises an amino acid substitution at position L452, wherein the amino acids L452 is substituted with a different amino acid (amino acid positions according to reference SEQ ID NO: 1).

[0502] Without wishing to be bound to theory, an amino acid substitution at position L452 may help SARS-CoV-2 virus variants to evade antibody detection of some types of antibodies induced in subjects vaccinated with first generation vaccines (designed against the original SARS-CoV-2 strain) or induced in subjects after infection with the original SARS-CoV-2 strain. A mutation/substitution in L452 occurs near the top of the coronavirus spike, where it may alter the shape of the protein, which may help to evade some types of coronavirus antibodies. Such SARS-CoV-2 are called SARS-CoV-2 L452 variants throughout the present invention and include e.g. SARS-CoV-2 B.1.617.1 (India), SARS-CoV-2 B.1.617.2 (India), or SARS-CoV-2 B.1.617.3 (India).

[0503] Accordingly it may be advantageous that the nucleic acid of the invention provides a SARS-CoV-2 spike protein comprising a substitution in position L452 to allow the induction of efficient immune responses against virus SARS-CoV-2 L452 variants.

[0504] In preferred embodiments, the SARS-CoV-2 spike protein comprises an amino acid substitution at position L452, wherein the amino acids L452 is substituted with R or Q (amino acid positions according to reference SEQ ID NO: 1). Accordingly, the antigenic peptide or protein selected from or derived from SARS-CoV-2 spike protein comprises an L452R or L452Q amino acid substitution.

[0505] In particularly preferred embodiments, the SARS-CoV-2 spike protein comprises an amino acid substitution at position L452, wherein the amino acids L452 is substituted with R (amino acid positions according to reference SEQ ID NO: 1). Accordingly, the antigenic peptide or protein selected from or derived from SARS-CoV-2 spike protein comprises a L452R amino acid substitution.

[0506] In preferred embodiments, the SARS-CoV-2 spike protein comprises an amino acid substitution at a position located in the furin cleavage site (amino acid position aa 681 to 685; amino acid positions according to reference SEQ ID NO: 1). That sequence stretch (PRRAR in SEQ ID NO: 1) is believed to serve as a recognition site for furin cleavage.

[0507] Without wishing to be bound to theory, amino acid substitutions or mutations in the furin cleavage site may help novel emerging SARS-CoV-2 variants to increased membrane fusion and thus cause increased transmissibility.

[0508] In preferred embodiments, the SARS-CoV-2 spike protein comprises an amino acid substitution at position P681 in the furin cleavage site. Suitably, the amino acids P681 is substituted with a different amino acid (amino acid positions according to reference SEQ ID NO: 1), preferably an amino acid that improves furin cleavage. Such SARS-CoV-2 are called SARS-CoV-2 P681 variants throughout the present invention and include e.g. SARS-CoV-2 B.1.617.1 (India), SARS-CoV-2 B.1.617.2 (India), or SARS-CoV-2 B.1.617.3 (India), SARS-CoV-2 B.1.1.7 (UK), SARS-CoV-2 A.23.1 (Uganda).

[0509] Accordingly it may be advantageous that the nucleic acid of the invention provides a SARS-CoV-2 spike protein comprising a substitution in position P681 to allow the induction of efficient immune responses against virus SARS-CoV-2 P681 variants.

[0510] In preferred embodiments, the SARS-CoV-2 spike protein comprises an amino acid substitution at position P681, wherein the amino acids P681 is substituted with R or H (amino acid positions according to reference SEQ ID NO: 1). Accordingly, the antigenic peptide or protein selected from or derived from SARS-CoV-2 spike protein comprises an P681R or P681H amino acid substitution.

[0511] In particularly preferred embodiments, the SARS-CoV-2 spike protein comprises an amino acid substitution at position P681, wherein the amino acids P681 is substituted with R (amino acid positions according to reference SEQ ID NO: 1). Accordingly, the antigenic peptide or protein selected from or derived from SARS-CoV-2 spike protein comprises a P681R amino acid substitution.

[0512] In particularly preferred embodiments, the SARS-CoV-2 spike protein that is provide by the nucleic acid of the invention comprises an amino acid substitution at position L452 as defined herein, preferably L452R, and an amino acid substitution at position P681 as defined herein, preferably P681R (amino acid positions according to reference SEQ ID NO: 1).

[0513] In another particularly preferred embodiment, the SARS-CoV-2 spike protein that is provided by the nucleic acid of the invention comprises an amino acid substitution at position L452 as defined herein, preferably L452R, and an amino acid substitution at position P681 as defined herein, preferably P681R (amino acid positions according to reference SEQ ID NO: 1). In further preferred embodiment, the SARS-CoV-2 spike protein that is provided by the nucleic acid of the invention comprises an amino acid substitution at position L452 as defined herein, preferably L452R, an amino acid substitution at position P681 as defined herein, preferably P681R and D614 as defined herein, preferably D614G, (amino acid positions according to reference SEQ ID NO: 1).

[0514] In particularly preferred embodiments, the SARS-CoV-2 spike protein that is provided by the nucleic acid of the invention comprises an amino acid substitution at position N501 as defined herein, preferably N501Y, and an amino acid substitution at position E484 as defined herein, preferably E484K (amino acid positions according to reference SEQ ID NO: 1).

[0515] In particularly preferred embodiments, the SARS-CoV-2 spike protein that is provided by the nucleic acid of the invention comprises an amino acid substitution at position L452 as defined herein, preferably L452R, and an amino acid substitution at position E484 as defined herein, preferably E484Q (amino acid positions according to reference SEQ ID NO: 1)

[0516] In preferred embodiments, the SARS-CoV-2 spike protein comprises, in addition to the substitutions defined above (at positions E484, N501, L452 and optionally P681), at least one, in particular 1, 2, 3, 4, 5, 6, 7, 8, 9, or 10 additional amino acid substitution, insertion or deletion selected from List 1A or List 1B.

[0517] In particularly preferred embodiments, the SARS-CoV-2 spike protein that is provided by the nucleic acid of the invention comprises an amino acid substitution or deletion at position H69 as defined herein, preferably H69del, and an amino acid substitution or deletion at position V70 as defined herein, preferably V70del (amino acid positions according to reference SEQ ID NO: 1). In further preferred embodiment, the SARS-CoV-2 spike protein that is provide by the RNA of the invention comprises a deletion at both H69 and V70.

[0518] In preferred embodiments, the SARS-CoV-2 spike protein that is provided by the nucleic acid of the invention comprises at least one further amino acid substitution or deletion selected from the following SARS-CoV-2 isolates B.1.351 (South Africa), B.1.1.7 (UK), P.1 (Brazil), B.1.429 (California), B.1.525 (Nigeria), B.1.258 (Czech republic), B.1.526 (New York), A.23.1 (Uganda), B.1.617.1 (India), B.1.617.2 (India), B.1.617.3 (India), P.2 (Brazil), C37.1 (Peru).

[0519] In preferred embodiments, the SARS-CoV-2 spike protein that is provided by the nucleic acid of the invention comprises amino acid substitutions or deletions selected from (amino acid positions according to reference SEQ ID NO: 1):
[0520] E484K, N501Y, L18F, D80A, D215G, L242del, A243del, L244del, R246I, K417N, D614G, and A701V; (SA; B.1.351)
[0521] E484K, N501Y, L18F, D80A, D215G, L242del, A243del, L244del, K417N, D614G, and A701V; (SA; B.1.351)
[0522] E484K, N501Y, L18F, T20N, P26S, D138Y, R190S, K417T, D614G, H655Y, and T1027I; (Brazil; P1)
[0523] E484K, N501Y, L18F, T20N, P26S, D138Y, R190S, K417T, D614G, H655Y, T1027I, and V1176F; (Brazil P1)
[0524] L452R, P681R, and D614G; (B.1.617.1; India)
[0525] L452R, E484Q, P681R, E154K, D614G, and Q1071H; (B.1.617.2; India)
[0526] L452R, P681R, T19R, F157del, R158del, T478K, D614G, and D950N; (B.1.617.2; India)
[0527] T19R, L452R, E484Q, D614G, P681R and D950N; (B.1.617.3; India)
[0528] G75V, T76I, S247del, Y248del, L249del, T250del, P251del, G252del, D253del, L452Q, F490S, D614G, and T859N; (C.37.1; Peru)
[0529] T95I, Y145N, R346K, E484K, N501Y, D614G, P681H, and D950N; (B.1.1.621)
[0530] T95I, Y144T, Y145S, ins145N, R346K, E484K, N501Y, D614G, P681H, and D950N; (B.1.1.621)
[0531] H69del, V70del, Y144del, E484K, N501Y, A570D, D614G, P681H, T716I, S982A, and D1118H; (B.1.1.7-E484K)
[0532] S13I, W152C, L452R, and D614G; (B.1.429)
[0533] L452R; and D614G; (B.1.429)
[0534] H69del; V70del; N439K; D614G; (B.1.258)
[0535] T95I; E484K; D614G; and A701V; (B.1.526)
[0536] L5F, T95I, D253G, E484K, D614G, and A701V; (B.1.526)
[0537] L5F, T95I, D253G, S477N, D614G, and Q957R; (B.1.526)
[0538] F157L; V367F; Q613H; and P681R (A.23.1)
[0539] S254F; D614G; P681R; and G769V (A.23.1)
[0540] T478K; D614G; P681H; and T732A (B.1.1.519; Mexico)
[0541] P26S, H69del, V70del, V126A, Y144del, L242del, A243del, L244del, H245Y, S477N, E484K, D614G, P681H, T1027I and D1118H; (B.1.620; Africa)
[0542] ins214TDR, Q414K, N450K, D614G, and T716I; (B.1.214.2)
[0543] S12F, H69del, V70del, W152R, R346S, L452R, D614G, Q677H and A899S; (C.36.3; Thailand)
[0544] E484K, D614G and V1176F; (P2)
[0545] Q52R; A67V; H69del; V70del; F157del; R158del; E484K; D614G; Q677H and F888L; (B.1.525)
[0546] Q52R; A67V; H69del; V70del; Y144del; E484K; D614G; Q677H and F888L; (B.1.525)
[0547] A67V; H69del; V70del; Y144del; E484K; D614G; Q677H and F888L; (B.1.525)
[0548] T19R; T95I; G142D, E156G, F157del; R158del; W258L; K417N; L452R; T478K; K558N, D614G; P681R; and D950N; (AY.1)
[0549] T19R; V70F; G142D, E156G, F157del; R158del; A222V, K417N; L452R; T478K; D614G; P681R; and D950N; (AY.2)
[0550] T19R; T95I; F157del; R158del; W258L; K417N; L452R; T478K; D614G; P681R; and D950N; or (AY.1)
[0551] T19R; V70F; F157del; R158del; A222V; K417N; L452R; T478K; D614G; P681R; and D950N; (AY.2)
[0552] H69del, V70del and D614G;
[0553] D614G and M1229I;
[0554] A222V and D614G;
[0555] S477N and D614G;
[0556] N439K and D614G;
[0557] H69del, V70del, Y453F, D614G and 1692I;
[0558] Y453F and D614G;
[0559] D614G and I692V;
[0560] H69del, V70del, A222V, Y453F, D614G and 1692I;
[0561] N501Y and D614G;
[0562] K417N; E484K; N501Y and D614G; or
[0563] E484K and D614G.

[0564] In particularly preferred embodiments, the SARS-CoV-2 spike protein that is provided by the nucleic acid of the invention comprises the following amino acid substitutions or deletions (relative to SEQ ID NO: 1):
[0565] E484K, N501Y, L18F, D80A, D215G, L242del, A243del, L244del, R246I, K417N, D614G, and A701V;
[0566] E484K, N501Y, L18F, D80A, D215G, L242del, A243del, L244del, K417N, D614G, and A701V;
[0567] E484K, N501Y, L18F, T20N, P26S, D138Y, R190S, K417T, D614G, H655Y, and T1027I;
[0568] E484K, N501Y, L18F, T20N, P26S, D138Y, R190S, K417T, D614G, H655Y, T1027I, and V1176F;
[0569] L452R, P681R, and D614G;
[0570] L452R, E484Q, P681R, E154K, D614G, and Q1071H; or
[0571] L452R, P681R, T19R, F157del, R158del, T478K, D614G, and D950N.

[0572] In even more preferred embodiments, the SARS-CoV-2 spike protein that is provided by the nucleic acid of the invention comprises the following amino acid substitutions or deletions (relative to SEQ ID NO: 1):
[0573] E484K, N501Y, L18F, D80A, D215G, L242del, A243del, L244del, R246I, K417N, D614G, and A701V; or
[0574] E484K, N501Y, L18F, D80A, D215G, L242del, A243del, L244del, K417N, D614G, and A701V.

[0575] In further particularly preferred embodiments, the SARS-CoV-2 spike protein that is provided by the nucleic acid of the invention comprises the following amino acid substitutions or deletions (relative to SEQ ID NO: 1):
[0576] L452R, P681R, and D614G;
[0577] L452R, E484Q, P681R, E154K, D614G, and Q1071H;
[0578] L452R, P681R, T19R, F157del, R158del, T478K, D614G, and D950N; or
[0579] T19R, L452R, E484Q, D614G, P681R and D950N.

[0580] The following amino acid variations (amino acid positions according to reference SEQ ID NO: 1) are particularly preferred:
[0581] H69del, V70del, Y144del, N501Y, A570D, D614G, P681H, T716I, S982A, and D1118H
[0582] L18F, D80A, D215G, L242del, A243del, L244del, R246I, K417N, E484K, N501Y, D614G, and A701V
[0583] K417N, E484K, N501Y, and D614G
[0584] E484K and D614G
[0585] L18F, T20N, P26S, D138Y, R190S, K417T, E484K, N501Y, D614G, H655Y, and T1027I
[0586] S13I, W152C, L452R, and D614G
[0587] delH69, delV70, Y453F, D614G, I692V, and M1229I
[0588] E484K, E484P, or E484Q
[0589] G446V
[0590] G485R

[0591] In further preferred embodiments, the SARS-CoV-2 spike proteins (S) comprises the following amino acid variations (amino acid positions according to reference SEQ ID NO: 1): L18F, D80A, D215G, delL242, delA243, delL244, R246I, K417N, E484K, N501Y, D614G, A701V.

[0592] Suitable SARS-CoV-2 spike proteins (S) may be selected or derived from emerging SARS-CoV-2 variants according to the following List 1C (only examples of SARS-CoV-2 variants are provided, not limited to those):

[0593] List 1C: List of Emerging SARS-CoV-2 Variants

| Variant | Amino acid changes in spike protein |
|---|---|
| Mink Cluster 5 variant GISAID: EPI_ISL_616802 (hCoV- | delH69, delV70, Y453F, D614G, I692V, M1229I |
| 19/Denmark/DCGC-3024/2020) | |
| B.1.1.7 (a.k.a., 20B/501Y.V1, 501Y.V1, Variant of Concern- | delH69, delV70, delY144, N501Y, A570D, D614G, |
| 202012/01, VOC-202012/01, VUI-202012/01, B117, “UK | P681H, T716I, S982A, D1118H |
| variant”) | |
| B.1.351 (a.k.a., 20C/501Y.V2, 501Y.V2, N501Y.V2, “SA | L18F, D80A, D215G, delL242, delA243, delL244, |
| variant”, “South Africa variant”) | R246I, K417N, E484K, N501Y, D614G, A701V |
| P.1 (a.k.a., “Brazil variant” = “Japan variant”) | L18F, T20N, P26S, D138Y, R190S, K417T, E484K, |
| | N501Y, D614G, H655Y, T1027I |
| CAL.20C (a.k.a., “California variant”) | S13I, W152C, L452R, D614G |
| NCBI: QQN00429.1 (CAL.20.C example: SARS-COV- | |
| 2/human/USA/CA-LACPHL-AF00114/2021) | |

[0594] In some embodiments, a fragment of a SARS-CoV-2 spike protein as defined herein may be encoded by the nucleic acid, wherein said fragment may be N-terminally truncated, lacking the N-terminal amino acids 1 to up to 100 of the full-length SARS-CoV-2 spike reference protein (SEQ ID NO: 1) or of a SARS-CoV-2 spike variant protein and/or wherein said fragment may be C-terminally truncated, lacking the C-terminal amino acids (aa) 531 to up to aa 1273 of the full-length SARS-CoV-2 coronavirus reference protein (SEQ ID NO: 1) or of a SARS-CoV-2 spike variant protein. Such “fragment of a spike protein (S)” may additionally comprise amino acid substitutions (as described below) and may additionally comprise at least one heterologous peptide or protein element (as described below). In preferred embodiments, a fragment of a SARS-CoV-2 spike protein (S) may be C-terminally truncated, thereby lacking the C-terminal transmembrane domain (that is, lacking aa 1212 to aa 1273 or lacking aa 1148 to aa 1273))amino acid positions according to reference SEQ ID NO: 1)

[0595] In other embodiments, the encoded spike protein (S) derived from SARS-CoV-2 lacks the transmembrane domain (TM) (amino acid position aa 1212 to aa 1273 according to reference SEQ ID NO: 1). In embodiments, the encoded SARS-CoV-2 spike protein (S) lacks an extended part of the transmembrane domain (TMflex) (amino acid position aa 1148 to aa 1273, according to reference SEQ ID NO: 1). Without wishing to being bound to theory, a SARS-CoV-2 spike protein (S) lacking the transmembrane domain (TM or TMflex) as defined herein could be suitable for a SARS-CoV-2 vaccine, as such a protein would be soluble and not anchored in the cell membrane. A soluble protein may therefore be produced (that is translated) in higher concentrations upon administration to a subject, leading to improved immune responses.

[0596] Without wishing to being bound to theory, RBD (aa 319 to aa 541) and CND (aa 29 to aa 529) domains may be crucial for immunogenicity of SARS-CoV-2 spike protein (S). Both regions are located at the S1 fragment of the spike protein. Accordingly, it may be suitable in the context of the invention that the antigenic peptide or protein comprises or consists of an S1 fragment of the spike protein or an immunogenic fragment or immunogenic variant thereof.

[0597] Suitably, a S1 fragment of SARS-CoV-2 may comprise at least an RBD and/or a CND domain as defined above.

[0598] In preferred embodiments, the encoded at least one antigenic peptide or protein comprises or consists of a receptor-binding domain (RBD; aa 319 to aa 541), wherein the RBD comprises or consists of a spike protein fragment, or an immunogenic fragment or immunogenic variant thereof.

[0599] In further preferred embodiments, the encoded at least one antigenic peptide or protein comprises or consists of a truncated receptor-binding domain (truncRBD; aa 334 to aa 528), wherein the RBD comprises or consists of a spike protein fragment, or an immunogenic fragment or immunogenic variant thereof.

[0600] Such “fragment of a spike protein (S)” (RBD; aa 319 to aa 541 or truncRBD, aa 334 to aa 528), may additionally comprise amino acid substitutions (as described herein) and may additionally comprise at least one heterologous peptide or protein element (as described herein).

[0601] In particularly preferred embodiments, the encoded SARS-CoV-2 spike protein (S) comprises or consists of a spike protein fragment S1, or an immunogenic fragment or immunogenic variant thereof.

[0602] In preferred embodiments, the SARS-CoV-2 spike protein fragment S1 lacks at least 70%, 80%, 90%, preferably 100% of spike protein fragment S2 (aa 682 to aa 1273). Such embodiments may be beneficial as the SARS-CoV-2 S1 fragment comprises neutralizing epitopes without potential problems of full-length protein comprising S1 and S2.

[0603] Without wishing to being bound to theory, it may be suitable that the antigenic peptide or protein comprises or consists of SARS-CoV-2 spike protein fragment S1 and (at least a fragment of) SARS-CoV-2 spike protein fragment S2, because the formation of an immunogenic SARS-CoV-2 spike protein may be promoted.

[0604] Accordingly, in particularly preferred embodiments, the encoded SARS-CoV-2 spike protein (S) comprises or consists of a SARS-CoV-2 spike protein fragment S1 or an immunogenic fragment or immunogenic variant thereof, and SARS-CoV-2 spike protein fragment S2 or an immunogenic fragment or immunogenic variant thereof.

[0605] In particularly preferred embodiments, the encoded at least one antigenic peptide or protein comprises or consists of a full-length SARS-CoV-2 spike protein or an immunogenic fragment or immunogenic variant of any of these.

[0606] The term “full-length SARS-CoV-2 spike protein” has to be understood as a spike protein derived from SARS-CoV-2 or a variant SARS-CoV-2 having an amino acid sequence corresponding to essentially the full spike protein. Accordingly, a “full-length spike protein” may comprise aa 1 to aa 1273 (reference protein: SEQ ID NO: 1). Accordingly, a full-length SARS-CoV-2 spike protein may typically comprise a secretory signal peptide, a spike protein fragment S1, a spike protein fragment S2, a receptor binding domain (RBD), and a critical neutralisation domain CND, and a transmembrane domain. Notably, also variants that comprise certain amino acid substitutions (e.g. for allowing pre-fusion stabilization of the S protein) or natural occurring amino acid deletions are encompassed by the term “full-length SARS-CoV-2 spike protein”.

[0607] In particularly preferred embodiments, the SARS-CoV-2 spike protein (S) that is provided by the nucleic acid is designed or adapted to stabilize the antigen in pre-fusion conformation. A pre-fusion conformation is particularly advantageous in the context of an efficient SARS-CoV-2 vaccine, as several potential epitopes for neutralizing antibodies may merely be accessible in said pre-fusion protein conformation. Furthermore, remaining of the protein in the pre-fusion conformation is aimed to avoid immunopathological effects, like e.g. enhanced disease and/or antibody dependent enhancement (ADE).

[0608] In preferred embodiments, administration of a nucleic acid (or a composition or vaccine) encoding pre-fusion stabilized spike protein to a subject elicits spike protein neutralizing antibodies and does not elicit disease-enhancing antibodies. In particular, administration of a nucleic acid (or a composition or vaccine) encoding pre-fusion stabilized spike protein to a subject does not elicit immunopathological effects, like e.g. enhanced disease and/or antibody dependent enhancement (ADE).

[0609] Accordingly, in preferred embodiments, the (additional) nucleic acid comprises at least one coding sequence encoding at least one antigenic peptide or protein that is selected or derived from a SARS-CoV-2 spike protein (S), wherein the spike protein (S) is a pre-fusion stabilized spike protein (S_stab). Suitably, said pre-fusion stabilized spike protein comprises at least one pre-fusion stabilizing mutation.

[0610] Stabilization of the SARS-CoV-2 spike protein may be obtained by substituting at least one amino acids at position K986 and/or V987 with amino acids that stabilize the spike protein in a perfusion conformation (amino acid positions according to reference SEQ ID NO: 1).

[0611] In embodiments, the pre-fusion stabilizing mutation of SARS-CoV-2 spike protein comprises an amino acid substitution at position K986, wherein the amino acids K986 is substituted with one selected from A, I, L, M, F, V, G, or P (amino acid positions according to reference SEQ ID NO: 1), preferably wherein the amino acids K986 is substituted with P. In embodiments, the pre-fusion stabilizing mutation comprises an amino acid substitution at position V987, wherein the amino acids V987 is substituted with one selected from A, I, L, M, F, V, G, or P (amino acid positions according to reference SEQ ID NO: 1), preferably wherein the amino acids V987 is substituted with P.

[0612] Suitably, stabilization of the SARS-CoV-2 spike protein may be obtained by substituting two consecutive amino acids at position K986 and V987 with amino acids that stabilize the spike protein in a perfusion conformation (Amino acid positions according to reference SEQ ID NO: 1).

[0613] In preferred embodiments, the pre-fusion stabilizing mutation of the SARS-CoV-2 spike protein comprises an amino acid substitution at position K986 and V987, wherein the amino acids K986 and/or V987 are substituted with one selected from A, I, L, M, F, V, G, or P (amino acid positions according to reference SEQ ID NO: 1).

[0614] Preferably, stabilization of the perfusion conformation is obtained by introducing two consecutive proline substitutions at residues K986 and V987 in the SARS-CoV-2 spike protein (Amino acid positions according to reference SEQ ID NO: 1).

[0615] Accordingly, in preferred embodiments, the pre-fusion stabilized spike protein (S_stab) of SARS-CoV-2 comprises at least one pre-fusion stabilizing mutation, wherein the at least one pre-fusion stabilizing mutation comprises the following amino acid substitutions: K986P and V987P (amino acid positions according to reference SEQ ID NO: 1).

[0616] Accordingly, any NCBI Protein Accession numbers provided above, or any protein selected from SEQ ID NOs: 1-9, 274-340, 22737, 22739, 22741, 22743, 22745, 22747, 22749, 22751, 22753, 22755, 22757, 22929-22946 or fragments or variants thereof can be chosen by the skilled person to introduce such amino acid changes into SARS-CoV-2 spike proteins, preferably amino acid substitutions: K986P and V987P (amino acid positions according to reference SEQ ID NO: 1).

[0617] In particularly preferred embodiments, the SARS-CoV-2 spike protein that is encoded by the nucleic acid of the invention is a pre-fusion stabilized spike protein (S_stab) comprising at least one pre-fusion stabilizing K986P and V987P mutation and additionally comprising the following amino acid substitutions or deletions (amino acid positions according to reference SEQ ID NO: 1):
[0618] E484K, N501Y, and optionally L18F, D80A, D215G, L242del, A243del, L244del, R246I, K417N, D614G, A701V;
[0619] E484K, N501Y, and optionally L18F, D80A, D215G, L242del, A243del, L244del, K417N, D614G, A701V;
[0620] N501Y, P681H, and optionally H69del, V70del, Y144del, A570D, D614G, T716I, S982A, D1118H;
[0621] N501Y, P681H, E484K, and optionally H69del, V70del, Y144del, A570D, D614G, T716I, S982A, D1118H;
[0622] E484K, N501Y, and optionally L18F, T20N, P26S, D138Y, R190S, K417T, D614G, H655Y, T1027I;
[0623] E484K, N501Y, and optionally L18F, T20N, P26S, D138Y, R190S, K417T, D614G, H655Y, T1027I, V1176F;
[0624] N501Y, P681H, E484K, and optionally H69del, V70del, Y144del, A570D, D614G, T716I, S982A, D1118H;
[0625] L452R, and optionally S13I, W152C, D614G;
[0626] L452R, D614D and optionally P681R;
[0627] L452R, D614D, P681R and optionally E484Q, E154K, Q1071H;
[0628] L452R, D614D, P681R and optionally T19R, L452R, D950N;
[0629] L452R, D614D, P681R and optionally T19R, F157del, T478K, D950N;
[0630] E484K, and optionally Q52R, A67V, H69del, V70del, delY144, D614G, Q677H, F888L;
[0631] E484K, and optionally A67V, H69del, V70del, Y144del, D614G, Q677H, F888L;
[0632] E484K, and optionally L5F, T95I, D253G, D614G, A701V;
[0633] P681R, and optionally F157L, V367F, Q613H;
[0634] P681R, and optionally S254F, D614G, G769V;
[0635] L452R, P681R, and optionally D614G;
[0636] L452R, E484Q, P681R, and optionally E154K, D614G, Q1071H;
[0637] L452R, P681R, and optionally T19R, F157del, R158del, T478K, D614G, D950N;
[0638] E484K, and optionally D614G, V1176F;
[0639] L452Q, and optionally G75V, T76I, R246del, S247del, Y248del, L249del, T250del, P251del, G252del, F490S, D614G, T859N;
[0640] K417N, and optionally P681R;
[0641] K417N, P681R, and optionally D614G;
[0642] K417N, L452R, P681R, and optionally D614G;
[0643] K417N, T478K, P681R, and optionally D614G;
[0644] K417N, D950N, P681R, and optionally D614G.
[0645] K417N, D614G, P681R, and optionally T478K;
[0646] K417N, D614G, P681R, and optionally L452R;
[0647] K417N, D614G, P681R, L452R and optionally T478K;
[0648] S247del, Y248del, L249del, T250del, P251del, G252del, D253del and optionally D614G;
[0649] S247del, Y248del, L249del, T250del, P251del, G252del, D253del and optionally L452Q, D614G;
[0650] H69del, V70del and optionally D614G;
[0651] H69del, V70del, E484K and optionally D614G;
[0652] H69del, V70del, N501Y and optionally D614G; or
[0653] H69del, V70del, N501Y, E484K and optionally P681H.

[0654] In particularly preferred embodiments, the SARS-CoV-2 spike protein that is encoded by the nucleic acid of the invention is a pre-fusion stabilized spike protein (S_stab) (or a fragment or variant thereof) comprising at least one pre-fusion stabilizing K986P and V987P mutation and additionally comprises the following amino acid substitutions or deletions (amino acid positions according to reference SEQ ID NO: 1):
[0655] E484K, N501Y, L18F, D80A, D215G, L242del, A243del, L244del, R246I, K417N, D614G, and A701V;
[0656] E484K, N501Y, L18F, D80A, D215G, L242del, A243del, L244del, K417N, D614G, and A701V;
[0657] E484K, N501Y, L18F, T20N, P26S, D138Y, R190S, K417T, D614G, H655Y, and T1027I;
[0658] E484K, N501Y, L18F, T20N, P26S, D138Y, R190S, K417T, D614G, H655Y, T1027I, V1176F;
[0659] L452R, P681R, and D614G;
[0660] L452R, E484Q, P681R, E154K, D614G, and Q1071H; or
[0661] L452R, P681R, T19R, F157del, R158del, T478K, D614G, and D950N.

[0662] In particularly preferred embodiments, the SARS-CoV-2 spike protein that is encoded by the nucleic acid of the invention is a pre-fusion stabilized spike protein (S_stab) (or a fragment or variant thereof) comprising amino acid substitutions or deletions selected from (amino acid positions according to reference SEQ ID NO: 1):
[0663] K986P, V987P, E484K, N501Y, L18F, D80A, D215G, L242del, A243del, L244del, R246I, K417N, D614G, and A701V; or
[0664] K986P, V987P, E484K, N501Y, L18F, D80A, D215G, L242del, A243del, L244del, K417N, D614G, and A701V.

[0665] It has to be emphasized that in the context embodiments of the invention any SARS-CoV-2 coronavirus spike protein as defined herein may be mutated as described above (exemplified for reference protein SEQ ID NO: 1) to stabilize the spike protein in the pre-fusion conformation.

[0666] In preferred embodiments, the at least one pre-fusion stabilizing mutation of SARS-CoV-2 spike protein comprises a cavity filling mutation that further stabilizes the pre-fusion state, wherein said mutation/amino acid substitution is selected from the list comprising T887W; A1020W; T887W and A1020W; or P1069F (amino acid positions according to reference SEQ ID NO: 1).

[0667] In embodiments, at least one of the following amino acid substitutions T887W; A1020W; T887W and A1020W; or P1069F may be combined with a (K986P and V987P) substitution in the SARS-CoV-2 spike protein (amino acid positions according to reference SEQ ID NO: 1).

[0668] In particularly preferred embodiments, the SARS-CoV-2 spike protein comprises at least one of the following amino acid substitutions (amino acid positions according to reference SEQ ID NO: 1):
[0669] T887W; K986P and V987P
[0670] A1020W; K986P and V987P
[0671] T887W and A1020W; K986P and V987P
[0672] P1069F; K986P and V987P

[0673] Accordingly, any NCBI protein accession numbers of SARS-CoV-2 S provided above, or any protein selected from SEQ ID NOs: 1-9, 274-340, 22737, 22739, 22741, 22743, 22745, 22747, 22749, 22751, 22753, 22755, 22757, 22929-22946 or fragments or variants thereof, can be chosen by the skilled person to introduce such amino acid changes, suitably amino acid substitutions selected from T887W; A1020W; T887W and A1020W; or P1069F; or amino acid substitutions selected from (T887W; K986P and V987P); (A1020W; K986P and V987P); (T887W and A1020W; K986P and V987P); (P1069F; K986P and V987P) (amino acid positions according to reference SEQ ID NO: 1).

[0674] In embodiments, at least one of the following amino acid substitutions F817P, A892P, A899P and A942P may be combined with a (K986P and V987P) substitution (amino acid positions according to reference SEQ ID NO: 1).

[0675] In embodiments, the SARS-CoV-2 coronavirus spike protein comprises at least one of the following amino acid substitutions (Amino acid positions according to reference SEQ ID NO: 1):
[0676] F817P; K986P and V987P
[0677] A892P; K986P and V987P
[0678] A899P; K986P and V987P
[0679] A942P; K986P and V987P

[0680] In particularly preferred embodiments, the SARS-CoV-2 coronavirus spike protein comprises the following amino acid substitutions (Amino acid positions according to reference SEQ ID NO: 1):
[0681] F817P, A892P, A899P, A942P, K986P and V987P (S_stab_PP_hex)

[0682] Accordingly, any NCBI protein accession numbers provided above, or any protein selected from SEQ ID NOs: 1-9, 274-340, 22737, 22739, 22741, 22743, 22745, 22747, 22749, 22751, 22753, 22755, 22757, 22929-22946 or fragments or variants thereof can be chosen by the skilled person to introduce such amino acid changes, suitably amino acid substitutions selected from F817P, A892P, A899P, A942P; or amino acid substitutions selected from (F817P; K986P and V987P); (A892P; K986P and V987P); (A899P; K986P and V987P); (A942P; K986P and V987P); (F817P, A892P, A899P, A942P, K986P and V987P) (amino acid positions according to reference SEQ ID NO: 1).

[0683] In preferred embodiments, the at least one pre-fusion stabilizing mutation of SARS-CoV-2 spike protein comprises a mutated protonation site that further stabilizes the pre-fusion state, wherein said mutation/amino acid substitution is selected from H1048Q and H1064N; H1083N and H1101N; or H1048Q and H1064N and H1083N and H1101N (amino acid positions according to reference SEQ ID NO: 1).

[0684] In embodiments, at least one of the following amino acid substitutions H1048Q and H1064N; H1083N and H1101N; or H1048Q and H1064N and H1083N and H1101N may be combined with a (K986P and V987P) substitution (amino acid positions according to reference SEQ ID NO: 1) into a SARS-CoV-2 spike protein.

[0685] In particularly preferred embodiments, the SARS-CoV-2 spike protein comprises at least one of the following amino acid substitutions (Amino acid positions according to reference SEQ ID NO: 1):
[0686] H1048Q and H1064N; K986P and V987P
[0687] H1083N and H1101N; K986P and V987P
[0688] H1048Q and H1064N and H1083N and H1101N; K986P and V987P

[0689] Accordingly, any SARS-CoV-2 NCBI protein accession numbers provided above, or any protein selected from SEQ ID NOs: 1-9, 274-340, 22737, 22739, 22741, 22743, 22745, 22747, 22749, 22751, 22753, 22755, 22757, 22929-22946 or fragments or variants thereof can be chosen by the skilled person to introduce such amino acid changes into a SARS-CoV-2 spike protein, suitably amino acid substitutions selected from H1048Q and H1064N; H1083N and H1101N; or H1048Q and H1064N and H1083N and H1101N; or amino acid substitutions selected from (H1048Q and H1064N; K986P and V987P); (H1083N and H1101N; K986P and V987P); (H1048Q and H1064N and H1083N and H1101N; K986P and V987P); (amino acid positions according to reference SEQ ID NO: 1).

[0690] In preferred embodiments, the at least one pre-fusion stabilizing mutation of the SARS-CoV-2 spike protein comprises an artificial intramolecular disulfide bond. Such an artificial intramolecular disulfide bond can be introduced to further stabilize the membrane distal portion of the SARS-CoV-2 S protein (including the N-terminal region) in the pre-fusion conformation; that is, in a conformation that specifically binds to one or more pre-fusion specification antibodies, and/or presents a suitable antigenic site that is present on the pre-fusion conformation but not in the post fusion conformation of the SARS-CoV-2 S protein.

[0691] In preferred embodiments, the at least one pre-fusion stabilizing mutation of the SARS-CoV-2 spike protein comprises an artificial intramolecular disulfide bond, preferably wherein the at least one artificial intramolecular disulfide bond comprises at least two of the following amino acid substitutions selected from the list comprising I712C, I714C, P715C, T874C, G889C, A890C, I909C, N914C, Q965C, F970C, A972C, R995C, G999C, S1003C, L1034C, V1040C, Y1047C, S1055C, P1069C, T1077C, Y1110C, or S1123C (amino acid positions according to reference SEQ ID NO: 1).

[0692] In preferred embodiments, the at least one pre-fusion stabilizing mutation of the SARS-CoV-2 spike protein comprises an artificial intramolecular disulfide bond, wherein the at least one artificial intramolecular disulfide bond comprises at least one of the following amino acid substitutions: I712C and T1077C; I714C and Y1110C; P715C and P1069C; G889C and L1034C; I909C and Y1047C; Q965C and S1003C; F970C and G999C; A972C and R995C; A890C and V1040C; T874C and S1055C; or N914C and S1123C (amino acid positions according to reference SEQ ID NO: 1).

[0693] In embodiments, the at least one pre-fusion stabilizing mutation of the SARS-CoV-2 spike protein comprises 2, 3, 4, 5, 6, 7, or 8 different artificial intramolecular disulfide bonds, wherein each may be selected from the following amino acid substitutions: I712C and T1077C; I714C and Y1110C; P715C and P1069C; G889C and L1034C; I909C and Y1047C; Q965C and S1003C; F970C and G999C; A972C and R995C; A890C and V1040C; N914C and S11230; T874C and S1055C; or N914C and S1123C (amino acid positions according to reference SEQ ID NO: 1).

[0694] In embodiments, at least one, preferably 2, 3, 4, 5 or more of the following amino acid substitutions I712C and T1077C; I714C and Y1110C; P715C and P1069C; G889C and L1034C; I909C and Y1047C; Q965C and S1003C; F970C and G999C; A972C and R995C; A890C and V1040C; T874C and S1055C; or N914C and S1123C may be combined with a (K986P and V987P) substitution. For example, a pre-fusion stabilized SARS-CoV-2 S protein may comprise two different artificial intramolecular disulfide bonds, e.g. I712C and T1077C; P715C and P10690; and additionally a K986P and V987P substitution, etc. (amino acid positions according to reference SEQ ID NO: 1).

[0695] In particularly preferred embodiments, the SARS-CoV-2 spike protein comprises at least one of the following amino acid substitutions (amino acid positions according to reference SEQ ID NO: 1):
[0696] I712C and T1077C; K986P and V987P
[0697] I714C and Y1110C; K986P and V987P
[0698] P715C and P1069C; K986P and V987P
[0699] G889C and L1034C; K986P and V987P
[0700] I909C and Y1047C; K986P and V987P
[0701] Q965C and S1003C; K986P and V987P
[0702] F970C and G999C; K986P and V987P
[0703] A972C and R995C; K986P and V987P
[0704] A890C and V10400; K986P and V987P
[0705] T874C and S1055C; K986P and V987P
[0706] N914C and S1123C; K986P and V987P

[0707] Accordingly, any SASR-CoV-2 NCBI protein accession numbers provided above, or any protein selected from SEQ ID NOs: 1-9, 274-340, 22737, 22739, 22741, 22743, 22745, 22747, 22749, 22751, 22753, 22755, 22757, 22929-22946 or fragments or variants thereof can be chosen by the skilled person to introduce such amino acid changes into a SARS-CoV-2 spike protein, suitably amino acid substitutions selected from I712C and T1077C; I714C and Y1110C; P715C and P1069C; G889C and L1034C; I909C and Y1047C; Q965C and S1003C; F970C and G999C; A972C and R995C; A890C and V1040C; T874C and S1055C; or N914C and S1123C; or amino acid substitutions selected from (I712C; T1077C; K986P; V987P) or (I714C; Y1110C; K986P; V987P) or (P715C; P1069C; K986P; V987P) or (G889C; L1034C; K986P; V987P) or (I909C; Y1047C; K986P; V987P) or (Q965C; S1003C; K986P; V987P) or (F970C; G999C; K986P; V987P) or (A972C; R995C; K986P; V987P) or (A890C and V1040C; K986P and V987P) or (T874C and S1055C; K986P and V987P) or (N914C and S1123C; K986P and V987P) (amino acid positions according to reference SEQ ID NO: 1).

[0708] It has to be emphasized that in the context of the invention any SARS-CoV-2 spike protein may be mutated or modified as described above (exemplified for reference protein SEQ ID NO: 1) to stabilize the spike protein in the pre-fusion conformation.

[0709] According to various preferred embodiments, the (additional) nucleic acid encodes at least one antigenic peptide or protein selected or derived from SARS-CoV-2 spike protein as defined herein and, additionally, at least one heterologous peptide or protein element, preferably selected or derived from a signal peptide, a linker, a helper epitope, an antigen clustering element, a trimerization element, a transmembrane element, and/or a VLP-forming sequence.

[0710] Suitably, the at least one heterologous peptide or protein element may promote or improve secretion of the encoded SARS-CoV-2 spike protein (e.g. via secretory signal sequences), promote or improve anchoring of the encoded SARS-CoV-2 spike protein in the plasma membrane (e.g. via transmembrane elements), promote or improve formation of antigen complexes (e.g. via multimerization domains or antigen clustering elements), or promote or improve virus-like particle formation (VLP forming sequence). In addition, the nucleic acid may additionally encode peptide linker elements, self-cleaving peptides, immunologic adjuvant sequences or dendritic cell targeting sequences.

[0711] In preferred embodiments, the nucleic acid additionally encodes at least one heterologous trimerization element, an antigen clustering element, or a VLP forming sequence.

[0712] In preferred embodiments, the antigen clustering elements may be selected from a ferritin element, or a lumazine synthase element, surface antigen of Hepatitis B virus (HBsAg), or encapsulin. Expressing a stably clustered SARS-CoV-2 spike protein, preferably in in its prefusion conformation may increases the magnitude and breadth of neutralizing activity against the encoded SARS-CoV-2 peptide/protein.

[0713] In preferred embodiments, lumazine synthase is used to promote antigen clustering of the SARS-CoV-2 spike protein and may therefore promote or enhance immune responses of the encoded SARS-CoV-2 spike antigen. In preferred embodiments, ferritin is used to promote the antigen clustering of the SARS-CoV-2 spike protein and may therefore promote immune responses of the encoded SARS-CoV-2 antigen. In preferred embodiments, HBsAg is used to promote the antigen clustering of the SARS-CoV-2 spike protein and may therefore promote immune responses of the encoded SARS-CoV-2 antigen. In preferred embodiments, encapsulin is used to promote the antigen clustering of the SARS-CoV-2 spike protein and may therefore promote immune responses of the encoded SARS-CoV-2 antigen.

[0714] In embodiments where the coding sequence additionally encodes heterologous antigen clustering element, it is particularly preferred and suitable to generate a fusion protein comprising an antigen clustering element and an antigenic peptide or protein derived from SARS-CoV-2 spike protein. Suitably, said spike protein is lacking the C-terminal transmembrane domain (TM) (lacking aa 1212 to aa 1273) or is lacking a part of the C-terminal transmembrane domain (TMflex), e.g. lacking aa 1148 to aa 1273.

[0715] Accordingly, any amino acid sequences being identical or at least 50%, 60%, 70%, 80%, 85%, 86%, 87%, 88%, 89%, 90%, 91%, 92%, 93%, 94%, 95%, 96%, 97%, 98%, or 99% identical to any one of SEQ ID NOs: 1-26, 274-1278,13521-13587, 22732, 22737-22758, 22929-22964 can be modified to remove the endogenous transmembrane domain (TM) at position aa 1212 to aa 1273 and may therefore be used as “C-terminally truncated” SARS-CoV-2 spike proteins in the context of the invention (amino acid positions according to reference SEQ ID NO: 1). Furthermore, any amino acid sequences being identical or at least 50%, 60%, 70%, 80%, 85%, 86%, 87%, 88%, 89%, 90%, 91%, 92%, 93%, 94%, 95%, 96%, 97%, 98%, or 99% identical to any one of SEQ ID NOs: 1-26, 274-1278, 13521-13587, 22732, 22737-22758, 22929-22964 can be modified to remove a part the endogenous transmembrane domain (TMflex) at position aa 1148 to aa 1273 and may therefore be used as “C-terminally truncated” SARS-CoV-2 spike proteins in the context of the invention (Amino acid positions according to reference SEQ ID NO: 1). Suitable spike proteins lacking the C-terminal transmembrane domain (TM or TMflex) may be selected from SEQ ID NOs: 31-39, 1614-3623, 13377-13510.

[0716] In other embodiments, where the coding sequence additionally encodes heterologous antigen clustering element as defined above, it is particularly preferred and suitable to generate a fusion protein comprising an antigen clustering element and an antigenic peptide or protein selected or derived from SARS-CoV-2 spike protein fragment S1 (lacking S2 and/or (TM and/or TMflex). Further, it may be suitable to use linker elements for separating the heterologous antigen clustering element from the antigenic peptide or protein (e.g. a linker according to SEQ ID NO: 115, 13148, 13152).

[0717] In preferred embodiments, the trimerization element may be selected from a foldon element. In preferred embodiments, the foldon element is a fibritin foldon element. Expressing a stable trimeric spike protein, preferably in its prefusion conformation, may increases the magnitude and breadth of neutralizing activity against SARS-CoV-2 spike.

[0718] In particularly preferred embodiments, a fibritin foldon element is used to promote the antigen trimerization and may therefore promote immune responses of the encoded SARS-CoV-2 spike protein. Preferably, the foldon element is or is derived from a bacteriophage, preferably from bacteriophage T4, most preferably from fibritin of bacteriophage T4.

[0719] In embodiments where the coding sequence of the nucleic acid additionally encodes heterologous trimerization element, it is particularly preferred and suitable to generate a fusion protein comprising a trimerization element and an antigenic peptide or protein derived from SARS-CoV-2 spike. Suitably, said spike protein derived from SARS-CoV-2 is lacking the C-terminal transmembrane domain (lacking aa 1212 to aa 1273), or is lacking a part of the C-terminal transmembrane domain (TMflex), e.g. lacking aa 1148 to aa 1273.

[0720] In other embodiments, where the coding sequence of the nucleic acid additionally encodes heterologous trimerization element as defined above, it is particularly preferred and suitable to generate a fusion protein comprising an trimerization element and SARS-CoV-2 spike protein fragment S1 (lacking S2 and/or (TM and/or TMflex). Further, it may be suitable to use linker elements for separating the heterologous antigen clustering element from the antigenic peptide or protein (e.g. a linker according to SEQ ID NO: 115, 13148, 13152).

[0721] In preferred embodiments, a VLP forming sequence may be selected and fused to the SARS-CoV-2 spike as defined herein. Expressing a stably clustered SARS-CoV-2 spike protein in VLP form may increases the magnitude and breadth of neutralizing activity against SARS-CoV-2. VLPs structurally mimic infectious viruses and they can induce potent cellular and humoral immune responses.

[0722] Suitable VLP forming sequences may be selected from elements derived from Hepatitis B virus core antigen, HIV-1 Gag protein, or Woodchuck hepatitis core antigen element (WhcAg).

[0723] In particularly preferred embodiments, the at least one VLP-forming sequence is a Woodchuck hepatitis core antigen element (WhcAg). The WhcAg element is used to promote VLP formation and may therefore promote immune responses of the encoded SARS-CoV-2 spike protein.

[0724] In embodiments where the coding sequence of the nucleic acid additionally encodes heterologous VLP forming sequence, it is particularly preferred and suitable to generate a fusion protein comprising a VLP forming sequence and an antigenic peptide or protein derived from SARS-CoV-2 spike. Suitably, said SARS-CoV-2 spike protein is lacking the C-terminal transmembrane domain (lacking aa 1212 to aa 1273), or is lacking a part of the C-terminal transmembrane domain (TMflex), e.g. lacking aa 1148 to aa 1273.

[0725] Accordingly, any amino acid sequences being identical or at least 50%, 60%, 70%, 80%, 85%, 86%, 87%, 88%, 89%, 90%, 91%, 92%, 93%, 94%, 95%, 96%, 97%, 98%, or 99% identical to any one of SEQ ID NOs: 1-26, 274-1278,13521-13587, 22732, 22737-22758, 22929-22964 can be modified to lack the endogenous transmembrane element at position aa 1212 to aa 1273 and may therefore be used as “C-terminally truncated” SARS-CoV-2 spike proteins in the context of the invention. Furthermore, any amino acid sequences being identical or at least 50%, 60%, 70%, 80%, 85%, 86%, 87%, 88%, 89%, 90%, 91%, 92%, 93%, 94%, 95%, 96%, 97%, 98%, or 99% identical to any one of SEQ ID NOs: 1-26, 274-1278, 13521-13587, 22732, 22737-22758, 22929-22964 can be modified to remove a part the endogenous transmembrane domain (TMflex) at position aa 1148 to aa 1273 and may therefore be used as “C-terminally truncated” SARS-CoV-2 spike proteins in the context of the invention (amino acid positions according to reference SEQ ID NO: 1). Suitable SARS-CoV-2 spike proteins lacking the C-terminal transmembrane domain (TM or TMflex) may be selected from SEQ ID NOs: 31-39, 1614-3623, 13377-13510.

[0726] In other embodiments, where the coding sequence of the nucleic acid additionally encodes heterologous VLP-forming sequence as defined above, it is particularly preferred and suitable to generate a fusion protein comprising a VLP-forming sequence and SARS-CoV-2 spike protein fragment S1 (lacking S2 and/or (TM and/or TMflex). Further, it may be suitable to use linker elements for separating the heterologous antigen clustering element from the antigenic spike protein (e.g. a linker according to SEQ ID NO: 115, 13148, 13152).

[0727] In embodiments, the SARS-CoV-2 spike protein comprises a heterologous signal peptide as defined above. A heterologous signal peptide may be used to improve the secretion of the encoded SARS-CoV-2 spike antigen.

[0728] In embodiments where the coding sequence of the nucleic acid additionally encodes heterologous secretory signal peptide, it is particularly preferred and suitable to generate a fusion protein comprising a heterologous secretory signal peptide and an SARS-CoV-2 spike protein. Suitably, said SARS-CoV-2 spike protein is lacking the N-terminal endogenous secretory signal peptide (lacking aa 1 to aa 15). Accordingly, any amino acid sequences being identical or at least 50%, 60%, 70%, 80%, 85%, 86%, 87%, 88%, 89%, 90%, 91%, 92%, 93%, 94%, 95%, 96%, 97%, 98%, or 99% identical to any one of SEQ ID NOs: 1-26, 274-1278,13521-13587, 22732 or 22737-22758, 22929-22964 can be modified to lack the endogenous secretory signal peptide at position aa 1 to aa 15 and may therefore be used as “N-terminally truncated” SARS-CoV-2 spike proteins.

[0729] In the following List 1, suitable SARS-CoV-2 spike protein constructs as defined above are further specified in detail (e.g. nomenclature, protein elements, etc.).

[0730] List 1: Exemplary Suitable SARS-CoV-2 Antigen Designs:
[0731] Full-length spike protein (S) comprising aa 1 to aa 1273;
   [0732] see for example SEQ ID NO: 1, 274.
[0733] Stabilized S protein comprising aa1-aa1273 and K986P, V987P substitutions (S_stab_PP);
   [0734] see for example SEQ ID NO: 10, 341.
[0735] Stabilized S protein comprising aa1-aa1273 and K986P, V987P substitutions (S_stab_PP);
   [0736] see for example SEQ ID NO: 22961.
[0737] Stabilized S protein comprising aa1-aa1273 and K986P, V987P substitutions (S_stab_PP);
   [0738] see for example SEQ ID NO: 22960.
[0739] Stabilized S protein comprising aa1-aa1273 and K986P, V987P, F817P, A892P, A899P, A942P proline substitutions; S_stab_PP_hex
   [0740] see for example SEQ ID NO: 22732.
[0741] Stabilized S protein comprising aa1-aa1273 and K986P, V987P substitutions and a cavity filling mutation (T887W, A1020W); S_stab_PP_cav
   [0742] see for example SEQ ID NO: 408.
[0743] Stabilized S protein comprising aa1-aa1273 and K986P, V987P substitutions and a cavity filling mutation (P1069F); S_stab_PP_cav
   [0744] see for example SEQ ID NO: 475.
[0745] Stabilized S protein comprising aa1-aa1273 and K986P, V987P substitutions and a cavity filling mutation (H1048Q, H1064N, H1083N, H1101N); S_stab_PP_prot
   [0746] see for example SEQ ID NO: 542.
[0747] Stabilized S protein comprising aa1-aa1273 and an artificial disulfide bond (S_stab_disul) I712C, T1077C;
   [0748] see for example SEQ ID NO: 19, 609.
[0749] S without transmembrane domain comprising aa1-aa1211 (S_woTM);
   [0750] see for example SEQ ID NO: 31, 1614.
[0751] S without transmembrane domain flex comprising aa1-aa1147 (S_woTMflex);
   [0752] see for example SEQ ID NO: 2619.
[0753] S_woTM comprising K986P, V987P substitutions (S_stab_PP_woTM)
   [0754] see for example SEQ ID NO: 40, 1681.
[0755] S_woTMflex comprising K986P, V987P substitutions (S_stab_PP_woTMflex)
   [0756] see for example SEQ ID NO: 2686.
[0757] Spike protein fragment S1 comprising aa 1 to aa 681 (S1);
   [0758] see for example SEQ ID NO: 27, 1279.
[0759] S_woTM comprising a lumazine synthase;
   [0760] see for example SEQ ID NO: 58, 3624.
[0761] S_woTMflex comprising a lumazine synthase;
   [0762] see for example SEQ ID NO: 7644.
[0763] S_stab_PP_woTM comprising a lumazine synthase;
   [0764] see for example SEQ ID NO: 85, 3691.
[0765] S_stab_PP_woTMflex comprising a lumazine synthase;
   [0766] see for example SEQ ID NO: 7711.
[0767] S_woTM comprising a ferritin element;
   [0768] see for example SEQ ID NO: 67, 4629.
[0769] S_woTMflex comprising a ferritin element;
   [0770] see for example SEQ ID NO: 8649.
[0771] S_stab_PP_woTM comprising a ferritin element;
   [0772] see for example SEQ ID NO: 94, 4696.
[0773] S_stab_PP_woTMflex comprising a ferritin element;
   [0774] see for example SEQ ID NO: 8716.
[0775] S_woTM comprising a foldon element;
   [0776] see for example SEQ ID NO: 76, 5634.
[0777] S_woTMflex comprising a foldon element;
   [0778] see for example SEQ ID NO: 9654.
[0779] S_stab_PP_woTM comprising a foldon element;
   [0780] see for example SEQ ID NO: 103, 5701.
[0781] S_stab_PP_woTMflex comprising a foldon element;
   [0782] see for example SEQ ID NO: 9721.
[0783] S_woTM comprising a VLP-sequence (WhcAg);
   [0784] see for example SEQ ID NO: 6639.
[0785] S_woTMflex comprising a VLP-sequence (WhcAg);
   [0786] see for example SEQ ID NO 10659.
[0787] S_stab_PP_woTM comprising a VLP-sequence (WhcAg);
   [0788] see for example SEQ ID NO: 6706.
[0789] S_stab_PP_woTMflex comprising a VLP-sequence (WhcAg);
   [0790] see for example SEQ ID NO: 10726.
[0791] truncRBD comprising a foldon element:
   [0792] see for example SEQ ID NO: 22734.
[0793] truncRBD comprising a lumazine synthase (C-terminal)
   [0794] see for example SEQ ID NO: 22735.
[0795] truncRBD comprising a lumazine synthase (N-terminal)
   [0796] see for example SEQ ID NO: 22736
[0797] truncRBD comprising a ferritin element:
   [0798] see for example SEQ ID NO: 22733.

[0799] Amino acid positions provided in List 1 are according to reference SEQ ID NO: 1.

[0800] Preferred SARS-CoV-2 spike protein as defined above are provided in Table 2 (rows 1 to 41). Therein, each row 1 to 41 corresponds to a suitable SARS-CoV-2 spike protein constructs. Column A of Table 2 provides a short description of suitable SARS-CoV-2 spike constructs. Column B of Table 2 provides protein (amino acid) SEQ ID NOs of respective SARS-CoV-2 spike constructs. Column C of Table 2 provides SEQ ID NO of the corresponding wild type or reference nucleic acid coding sequences. Column D of Table 2 provides SEQ ID NO of the corresponding G/C optimized nucleic acid coding sequences (opt1, gc). Column E of Table 2 provides SEQ ID NO of the corresponding human codon usage adapted nucleic acid coding sequences (opt 3, human). Column F of Table 2 provides SEQ ID NO of the corresponding G/C content modified nucleic acid coding sequences (opt10, gc mod).

[0801] Notably, the description of the invention explicitly includes the information provided under <223> identifier of the ST25 sequence listing of the present application. Preferred nucleic acid constructs comprising coding sequences of Table 2, e.g. mRNA sequences comprising the coding sequences of Table 2 are provided in Table 3A and B.

TABLE 2
SARS-CoV-2 spike constructs (amino acid sequences and nucleic acid coding sequences):

| row | A | B | C | D | E | F |
|---|---|---|---|---|---|---|
| 1 | Full-length spike protein; S | 1-9, 274-340, | 116-131, | 136, 11731- | 11967- | 12034, |
| | | 22737, 22739, | 11664-11730 | 11797, 22764, | 12033 | 23041-23076 |
| | | 22741, 22743, | | 22766, 22768, | | |
| | | 22745, 22747, | | 22770, 22772, | | |
| | | 22749, 22751, | | 22774, 22776, | | |
| | | 22753, 22755, | | 22778, 22780, | | |
| | | 22757, | | 22782, 22784, | | |
| | | 22929-22946 | | 22969-23040 | | |
| 2 | Stabilized spike protein; | 10-18, 341-407, | | 137, 11798, | 142 | 146, 12035, |
| | S_stab_PP | 22738, 22740, | | 22765, 22767, | | 23149-23184 |
| | | 22742, 22744, | | 22769, 22771, | | |
| | | 22746, 22748, | | 22773, 22775, | | |
| | | 22750, 22752, | | 22777, 22779, | | |
| | | 22754, 22756, | | 22781, 22783, | | |
| | | 22758, | | 22785, 23077- | | |
| | | 22947-22964 | | 23148 | | |
| 3 | Stabilized spike protein; | 408-541 | | 11799, 11800 | | 12036, 12037 |
| | S_stab_PP_cav | | | | | |
| 4 | Stabilized spike protein; | 542-608 | | 11801 | | 12038 |
| | S_stab_PP_prot | | | | | |
| 5 | Stabilized spike protein; | 19-26, 609-1278, | | 11802-11811, | | 12039- |
| | S_stab_disul | 13521-13587 | | 14124 | | 12048, 14133 |
| 6 | Spike protein fragment S1 | 27, 1279-1345 | 132 | 138, 11812 | 143 | 147, 12049 |
| 7 | Spike protein fragment S2 | 30, 1346-1412 | 135 | 141, 11813 | | 12050 |
| 8 | Signal peptide of spike | 28, 1413-1479 | 133 | 139, 11814 | 144 | 12051 |
| | protein; SP | | | | | |
| 9 | S1 without signal peptide; | 29, 1480-1546 | 134 | 140, 11815 | 145 | 12052 |
| | S1_woSP | | | | | |
| 10 | Transmembrane domain | 49-57, 1547- | | 11816, 13511 | | 12053, 13516 |
| | of spike protein; TM/ | 1613, | | | | |
| | TMflex | 13176-13242 | | | | |
| 11 | S without transmembrane | 31-39, 1614- | | 11817, 11832 | | 12054, 12069 |
| | domain; S_woTM/ | 1680, 2619-2685 | | | | |
| | woTMflex | | | | | |
| 12 | Stabilized S without | 40-48, 1681- | | 11818, 11833 | | 12055, 12070 |
| | transmembrane domain; | 1747, 2686-2752 | | | | |
| | S_stab_PP_woTM/ | | | | | |
| | woTMflex | | | | | |
| 13 | Stabilized S without | 1748-1881, | | 11819, 11820, | | 12056, 12057, |
| | transmembrane domain; | 2753-2886 | | 11834, 11835 | | 12071, 12072 |
| | S_stab_PP_cav_woTM/ | | | | | |
| | woTMflex | | | | | |
| 14 | Stabilized S without | 1882-1948, | | 11821, 11836 | | 12058, 12073 |
| | transmembrane domain; | 2887-2953 | | | | |
| | S_stab_PP_prot_woTM/ | | | | | |
| | woTMflex | | | | | |
| 15 | Stabilized S without | 1949-2618, | | 11822-11831, | | 12059-12068, |
| | transmembrane domain; | 2954-3623, | | 11837-11846, | | 12074-12083, |
| | S_stab_disul_woTM/ | 13377-13510 | | 13514, 13515 | | 13519, 13520 |
| | woTMflex | | | | | |
| 16 | S_woTM/woTMflex | 58-66, 3624- | | 11847, 11907 | | 12084, 12144 |
| | comprising a lumazine | 3690, 7644-7710 | | | | |
| | synthase | | | | | |
| 17 | S_stab_PP_woTM/ | 85-93, 3691- | | 11848, 11908 | | 12085, 12145 |
| | woTMflex comprising a | 3757, 7711-7777 | | | | |
| | lumazine synthase | | | | | |
| 18 | S_stab_PP_cav_woTM/ | 3758-3891, | | 11849, 11850, | | 12086, 12087, |
| | woTMflex comprising a | 7778-7911 | | 11909, 11910 | | 12146, 12147 |
| | lumazine synthase | | | | | |
| 19 | S_stab_PP_prot_woTM/ | 3892-3958, | | 11851, 11911 | | 12088, 12148 |
| | woTMflex comprising a | 7912-7978 | | | | |
| | lumazine synthase | | | | | |
| 20 | S_stab_disul_woTM/ | 3959-4628, | | 11852-11861, | | 12089-12098, |
| | woTMflex comprising a | 7979-8648, | | 11912-11921, | | 12149-12158, |
| | lumazine synthase | 13588-13654, | | 14125, 14129 | | 14134, 14138 |
| | | 13856-13922 | | | | |
| 21 | S_woTM/woTMflex | 67-75, 4629- | | 11862, 11922 | | 12099, 12159 |
| | comprising a ferritin | 4695, 8649-8715 | | | | |
| 22 | S_stab_PP_woTM/ | 94-102, 4696- | | 11863, 11923 | | 12100, 12160 |
| | woTMflex comprising a | 4762, 8716-8782 | | | | |
| | ferritin | | | | | |
| 23 | S_stab_PP_cav_woTM/ | 4763-4896, | | 11864, 11865, | | 12101, 12102, |
| | woTMflex comprising a | 8783-8916 | | 11924, 11925 | | 12161, 12162 |
| | ferritin | | | | | |
| 24 | S_stab_PP_prot_woTM/ | 4897-4963, | | 11866, 11926 | | 12103, 12163 |
| | woTMflex comprising a | 8917-8983 | | | | |
| | ferritin | | | | | |
| 25 | S_stab_disul_woTM/ | 4964-5633, | | 11867-11876, | | 12104-12113, |
| | woTMflex comprising a | 8984-9653, | | 11927-11936, | | 12164-12173, |
| | ferritin | 13655-13721, | | 14126, 14130 | | 14135, 14139 |
| | | 13923-13989 | | | | |
| 26 | S_woTM/woTMflex | 76-84, 5634- | | 11877, 11937 | | 12114, 12174 |
| | comprising a foldon | 5700, 9654-9720 | | | | |
| 27 | S_stab_PP_woTM/ | 103-111, 5701- | | 11878, 11938 | | 12115, 12175 |
| | woTMflex comprising a | 5767, 9721-9787 | | | | |
| | foldon | | | | | |
| 28 | S_stab_PP_cav_woTM/ | 5768-5901, | | 11879, 11880, | | 12116, 12117, |
| | woTMflex comprising a | 9788-9921 | | 11939, 11940 | | 12176, 12177 |
| | foldon | | | | | |
| 29 | S_stab_PP_prot_woTM/ | 5902-5968, | | 11881, 11941 | | 12118, 12178 |
| | woTMflex comprising a | 9922-9988 | | | | |
| | foldon | | | | | |
| 30 | S_stab_disul_woTM/ | 5969-6638, | | 11882-11891, | | 12119-12128, |
| | woTMflex comprising a | 9989-10658, | | 11942-11951, | | 12179-12188, |
| | foldon | 13722-13788, | | 14127, 14131 | | 14136, 14140 |
| | | 13990-14056 | | | | |
| 31 | S_woTM/woTMflex | 6639-6705, | | 11892, 11952 | | 12129, 12189 |
| | comprising a WhcAg | 10659-10725 | | | | |
| | (VLP) | | | | | |
| 32 | S_stab_PP_woTM/ | 6706-6772, | | 11893, 11953 | | 12130, 12190 |
| | woTMflex comprising a | 10726-10792 | | | | |
| | WhcAg (VLP) | | | | | |
| 33 | S_stab_PP_cav_woTM/ | 6773-6906, | | 11894, 11895, | | 12131, 12132, |
| | woTMflex comprising a | 10793-10926 | | 11954, 11955 | | 12191, 12192 |
| | WhcAg (VLP) | | | | | |
| 34 | S_stab_PP_prot_woTM/ | 6907-6973, | | 11896, 11956 | | 12133, 12193 |
| | woTMflex comprising a | 10927-10993 | | | | |
| | WhcAg (VLP) | | | | | |
| 35 | S_stab_disul_woTM/ | 6974-7643, | | 11897-11906, | | 12134-12143, |
| | woTMflex comprising a | 10994-11663, | | 11957-11966, | | 12194-12203, |
| | WhcAg (VLP) | 13789-13855, | | 14128, 14132 | | 14137, 14141 |
| | | 14057-14123 | | | | |
| 36 | Receptor binding domain; | 13243-13309, | | 13512, 22914, | | 13517, 22915, |
| | RBD | 22917, 22923 | | 22918, 22919, | | 22916, 22920- |
| | | | | 22924, 22925 | | 22922, |
| | | | | | | 22926-22928 |
| 37 | Critical neutralisation | 13310-13376 | | 13513 | | 13518 |
| | domain; CND | | | | | |
| 38 | Stabilized spike protein; | 22732 | | 22759 | | |
| | S_stab_PP_hex | | | | | |
| 39 | RBD comprising a | 22735, 22736 | | 22762, 22763, | | |
| | lumazyne synthase | | | 22967, 22968 | | |
| 40 | RBD comprising a ferritin | 22733 | | 22760, 22965 | | |
| 41 | RBD comprising a foldon | 22734, | | 22761, 22966, | | |
| | | 26938, 26939 | | 26940, 26941 | | |

[0802] In preferred embodiments, the at least one antigenic peptide or protein selected or derived from SARS-CoV-2 S comprises or consists of at least one of the amino acid sequences being identical or at least 50%, 60%, 70%, 80%, 85%, 86%, 87%, 88%, 89%, 90%, 91%, 92%, 93%, 94%, 95%, 96%, 97%, 98%, or 99% identical to any one of SEQ ID NOs: 1-111, 274-11663, 13176-13510, 13521-14123, 22732-22758, 22732-22758, 22917, 22923, 22929-22964, 26938, 26939 or an immunogenic fragment or immunogenic variant of any of these. Further information regarding said amino acid sequences is also provided in Table 2 (see rows 1 to 41 of Column A and B), and under <223> identifier of the ST25 sequence listing of respective sequence SEQ ID NOs.

[0803] In preferred embodiments, the at least one antigenic peptide or protein (pre-fusion stabilized spike protein (S_stab)) selected or derived from SARS-CoV-2 S encoded by the at least one nucleic acid comprises or consists of at least one of the amino acid sequences being identical or at least 50%, 60%, 70%, 80%, 85%, 86%, 87%, 88%, 89%, 90%, 91%, 92%, 93%, 94%, 95%, 96%, 97%, 98%, or 99% identical to any one of SEQ ID NOs: 10-26, 40-48, 85-111, 341-1278, 1681-2618, 2686-3623, 3691-4628, 4696-5633, 5701-6638, 6706-7643, 7711-8648, 8716-9653, 9721-10658, 10726-11663, 13377-13510, 13521-14123, 22732, 22738, 22740, 22742, 22744, 22746, 22748, 22750, 22752, 22754, 22756, 22758, 22947-22964 or an immunogenic fragment or immunogenic variant of any of these. Further information regarding said amino acid sequences is also provided in Table 2 (see rows 2 to 5, 12-15,17-20, 22-25, 27-30, and 32-35, 38 of Column A and B), and under <223> identifier of the ST25 sequence listing of respective sequence SEQ ID NOs.

[0804] In further preferred embodiments, the at least one antigenic peptide or protein (pre-fusion stabilized spike protein (S_stab)) selected or derived from SARS-CoV-2 S encoded by the at least one nucleic acid comprises or consists of at least one of the amino acid sequences being identical or at least 50%, 60%, 70%, 80%, 85%, 86%, 87%, 88%, 89%, 90%, 91%, 92%, 93%, 94%, 95%, 96%, 97%, 98%, or 99% identical to any one of SEQ ID NOs: 26992-26995, 27007-27086, 27087-27109 of PCT patent application PCT/EP2021/069632 or an immunogenic fragment or immunogenic variant of any of these. SEQ ID NOs: 26992-26995, 27007-27086, 27087-27109 of PCT patent application PCT/EP2021/069632, and the corresponding disclosure relating thereto are herewith incorporated by reference.

[0805] In particularly preferred embodiments, the at least one antigenic peptide or protein selected or derived from SARS-CoV-2 S comprises or consists of at least one of the amino acid sequences being identical or at least 50%, 60%, 70%, 80%, 85%, 86%, 87%, 88%, 89%, 90%, 91%, 92%, 93%, 94%, 95%, 96%, 97%, 98%, or 99% identical to any one of SEQ ID NOs: 10, 21, 22, 25, 27, 274, 341, 408, 475, 542, 743, 810, 1011, 1145, 1212, 1279, 8716, 10726, 22732-22758, 22929-22942, 22947-22964 or an immunogenic fragment or immunogenic variant of any of these.

[0806] In particularly preferred embodiments, the at least one antigenic peptide or protein selected or derived from SARS-CoV-2 comprises or consists of at least one of the amino acid sequences being identical or at least 50%, 60%, 70%, 80%, 85%, 86%, 87%, 88%, 89%, 90%, 91%, 92%, 93%, 94%, 95%, 96%, 97%, 98%, or 99% identical to any one of SEQ ID NOs: 10-18, 341-407, 22738, 22740, 22742, 22744, 22746, 22748, 22750, 22752, 22754, 22756, 22758, 22947-22964 or an immunogenic fragment or immunogenic variant of any of these. Further information regarding said amino acid sequences is also provided in Table 3A (see row 2 of Column A and B), and under <223> identifier of the ST25 sequence listing of respective sequence SEQ ID NOs.

[0807] In further preferred embodiments, the at least one antigenic peptide or protein (pre-fusion stabilized spike protein (S_stab)) selected or derived from SARS-CoV-2 S encoded by the at least one nucleic acid comprises or consists of at least one of the amino acid sequences being identical or at least 50%, 60%, 70%, 80%, 85%, 86%, 87%, 88%, 89%, 90%, 91%, 92%, 93%, 94%, 95%, 96%, 97%, 98%, or 99% identical to any one of SEQ ID NOs: 27087-27109 of PCT patent application PCT/EP2021/069632 or an immunogenic fragment or immunogenic variant of any of these. SEQ ID NOs: 27087-27109 of PCT patent application PCT/EP2021/069632, and the corresponding disclosure relating thereto are herewith incorporated by reference.

[0808] In a further, more preferred embodiment, the pre-fusion stabilized spike protein (S_stab) comprises or consists of at least one of the amino acid sequences being identical or at least 50%, 60%, 70%, 80%, 85%, 86%, 87%, 88%, 89%, 90%, 91%, 92%, 93%, 94%, 95%, 96%, 97%, 98%, or 99% identical to any one of SEQ ID NOs: 22960, 22961, 22963 or an immunogenic fragment or immunogenic variant of any of these.

[0809] In a particularly preferred embodiment, the pre-fusion stabilized spike protein (S_stab) comprises or consists of at least one of the amino acid sequences being identical or at least 50%, 60%, 70%, 80%, 85%, 86%, 87%, 88%, 89%, 90%, 91%, 92%, 93%, 94%, 95%, 96%, 97%, 98%, or 99% identical to any one of SEQ ID NOs: 22961, or an immunogenic fragment or immunogenic variant of any of these.

[0810] In a further particularly preferred embodiment, the pre-fusion stabilized spike protein (S_stab) comprises or consists of at least one of the amino acid sequences being identical or at least 50%, 60%, 70%, 80%, 85%, 86%, 87%, 88%, 89%, 90%, 91%, 92%, 93%, 94%, 95%, 96%, 97%, 98%, or 99% identical to any one of SEQ ID NOs: 22959, or an immunogenic fragment or immunogenic variant of any of these.

[0811] In further particularly preferred embodiments, the pre-fusion stabilized spike protein (S_stab) comprises or consists of at least one of the amino acid sequences being identical or at least 50%, 60%, 70%, 80%, 85%, 86%, 87%, 88%, 89%, 90%, 91%, 92%, 93%, 94%, 95%, 96%, 97%, 98%, or 99% identical to any one of SEQ ID NOs: 27093-27095 of PCT patent application PCT/EP20211069632 or an immunogenic fragment or immunogenic variant of any of these. SEQ ID NOs: 27093-27095 of PCT patent application PCT/EP2021/069632, and the corresponding disclosure relating thereto are herewith incorporated by reference.

[0812] In further particularly preferred embodiments, the pre-fusion stabilized spike protein (S_stab) comprises or consists of at least one of the amino acid sequences being identical or at least 50%, 60%, 70%, 80%, 85%, 86%, 87%, 88%, 89%, 90%, 91%, 92%, 93%, 94%, 95%, 96%, 97%, 98%, or 99% identical to any one of SEQ ID NO: 27096 of PCT patent application PCT/EP2021/069632 or an immunogenic fragment or immunogenic variant of any of these. SEQ ID NO: 27096 of PCT patent application PCT/EP2021/069632, and the corresponding disclosure relating thereto are herewith incorporated by reference.

[0813] In an even more preferred embodiment, the at least one antigenic peptide or protein selected or derived from SARS-CoV-2 comprises or consists of at least one of the amino acid sequences being identical or at least 50%, 60%, 70%, 80%, 85%, 86%, 87%, 88%, 89%, 90%, 91%, 92%, 93%, 94%, 95%, 96%, 97%, 98%, or 99% identical to any one of SEQ ID NOs: 10 or 341 or an immunogenic fragment or immunogenic variant of any of these.

[0814] In preferred embodiments, the nucleic acid comprises or consists of at least one coding sequence encoding at least one antigenic peptide or protein selected or derived from a SARS-CoV-2 S as defined herein, preferably encoding any one of SEQ ID NOs: 1-111, 274-11663,13176-13510, 13521-14123, 22732-22758, 22732-22758, 22917, 22923, 22929-22964, 26938, 26939 or fragments of variants thereof. It has to be understood that, on nucleic acid level, any sequence (DNA or RNA sequence) which encodes an amino acid sequences being identical or at least 70%, 80%, 85%, 86%, 87%, 88%, 89%, 90%, 91%, 92%, 93%, 94%, 95%, 96%, 97%, 98%, or 99% identical to any one of SEQ ID NOs: 1-111, 274-11663, 13176-13510,13521-14123, 22732-22758, 22732-22758, 22917, 22923, 22929-22964, 26938, 26939 or fragments or variants thereof, may be selected and may accordingly be understood as suitable coding sequence of the invention. Further information regarding said amino acid sequences is also provided in Table 2 (see rows 1 to 41 of Column A and B), Table 3A and B, and under <223> identifier of the ST25 sequence listing of respective sequence SEQ ID NOs.

[0815] In preferred embodiments, the nucleic acid comprises a coding sequence that comprises at least one of the nucleic acid sequences encoding a SARS-CoV-2 S antigen being identical or at least 70%, 80%, 85%, 86%, 87%, 88%, 89%, 90%, 91%, 92%, 93%, 94%, 95%, 96%, 97%, 98%, or 99% identical to any one of the nucleic acid sequences selected from SEQ ID NOs: 116-132, 134-138, 140-143, 145-147, 148-175, 11664-11813, 11815, 11817-12050, 12052, 12054-13147, 13514, 13515, 13519, 13520, 14124-14177, 22759, 22764-22786, 22791-22813, 22818-22839, 22969-23184, 23189-23404, 23409-23624, 23629-23844, 23849-24064, 24069-24284, 24289-24504, 24509-24724, 24729-24944, 24949-25164, 25169-25384, 25389-25604, 25609-25824, 25829-26044, 26049-26264, 26269-26484, 26489-26704, 26709-26937 or a fragment or a fragment or variant of any of these sequences. Further information regarding said nucleic acid sequences is also provided in Table 2 (see rows 1 to 7, 9, 11-41 of Column C-F), Table 3A and B, and under <223> identifier of the ST25 sequence listing of respective sequence SEQ ID NOs.

[0816] In preferred embodiments, the at least one coding sequence is a codon modified coding sequence as defined herein, wherein the amino acid sequence, that is the SARS-CoV-2 S peptide or protein, encoded by the at least one codon modified coding sequence is preferably not being modified compared to the amino acid sequence encoded by the corresponding wild type or reference coding sequence.

[0817] The term “reference coding sequence” relates to the coding sequence, which was the origin sequence to be modified and/or optimized.

[0818] In particularly preferred embodiments, the at least one coding sequence of the (additional) nucleic acid is a codon modified coding sequence, wherein the codon modified coding sequence is selected a G/C optimized coding sequence, a human codon usage adapted coding sequence, or a G/C modified coding sequence

[0819] In preferred embodiments, the (additional) nucleic acid comprises at least one coding sequence comprising or consisting a codon modified nucleic acid sequence encoding a SARS-CoV-2 S antigen which is identical or at least 70%, 80%, 85%, 86%, 87%, 88%, 89%, 90%, 91%, 92%, 93%, 94%, 95%, 96%, 97%, 98%, or 99% identical to a codon modified nucleic acid sequence selected from the group consisting of SEQ ID NOs: 136-138, 140-143, 145-147,148-175, 11731-11813, 11815, 11817-12050, 12052, 12054-13147, 14142-14177, 22759, 22764-22786, 22791-22813, 22818-22839, 22969-23184, 23189-23404, 23409-23624, 23629-23844, 23849-24064, 24069-24284, 24289-24504, 24509-24724, 24729-24944, 24949-25164, 25169-25384, 25389-25604, 25609-25824, 25829-26044, 26049-26264, 26269-26484, 26489-26704, 26709-26937 or a fragment or variant of any of these sequences. Additional information regarding each of these suitable nucleic acid sequences encoding may also be derived from the sequence listing, in particular from the details provided therein under identifier <223>. Further information regarding said nucleic acid sequences is also provided in Table 2 (see rows 1 to 7, 9, 11-41 of Column D-F), Table 3A and B, and under <223> identifier of the ST25 sequence listing of respective sequence SEQ ID NOs.

[0820] In particularly preferred embodiments, the (additional) nucleic acid comprises at least one coding sequence comprising or consisting a G/C optimized coding sequence encoding a SARS-CoV-2 S antigen which is identical or at least 70%, 80%, 85%, 86%, 87%, 88%, 89%, 90%, 91%, 92%, 93%, 94%, 95%, 96%, 97%, 98%, or 99% identical to a codon modified nucleic acid sequence selected from the group consisting of SEQ ID NOs: 136-138, 140, 141, 148, 149, 152, 155, 156, 159, 162, 163, 166, 169, 170, 173, 11731-11813, 11815, 11817-11966, 12271-12472, 12743-12944, 13514, 13515, 14124-14132, 14142-14150, 14160-14168, 22759, 22764-22786, 22791-22813, 22818-22839, 22969-23040, 23077-23148, 23189-23260, 23297-23368, 23409-23480, 23517-23588, 23629-23700, 23737-23808, 23849-23920, 23957-24028, 24069-24140, 24177-24248, 24289-24360, 24397-24468, 24509-24580, 24617-24688, 24729-24800, 24837-24908, 24949-25020, 25057-25128, 25169-25240, 25277-25348, 25389-25460, 25497-25568, 25609-25680, 25717-25788, 25829-25900, 25937-26008, 26049-26120, 26157-26228, 26269-26340, 26377-26448, 26489-26560, 26597-26668, 26709-26780, 26817-26888, 26925-26937 or a fragment or variant of any of these sequences. Additional information regarding each of these suitable nucleic acid sequences encoding may also be derived from the sequence listing, in particular from the details provided therein under identifier <223>. Further information regarding said nucleic acid sequences is also provided in Table 2 (see rows 1 to 7, 9, 11-35 of Column D), Table 3A and B, and under <223> identifier of the ST25 sequence listing of respective sequence SEQ ID NOs.

[0821] In particularly preferred embodiments, the (additional) nucleic acid comprises at least one coding sequence comprising or consisting a human codon usage adapted coding sequence encoding a SARS-CoV-2 S which is identical or at least 70%, 80%, 85%, 86%, 87%, 88%, 89%, 90%, 91%, 92%, 93%, 94%, 95%, 96%, 97%, 98%, or 99% identical to a codon modified nucleic acid sequence selected from the group consisting of SEQ ID NOs: 142, 143, 145, 150, 153, 157, 160, 164, 167, 171, 174, 11967-12033, 12473-12539, 12945-13011 or a fragment or variant of any of these sequences. Additional information regarding each of these suitable nucleic acid sequences encoding may also be derived from the sequence listing, in particular from the details provided therein under identifier <223>. Further information regarding said nucleic acid sequences is also provided in Table 2 (see rows 1 to 7, 9, 11-41 of Column E), Table 3A and B, and under <223> identifier of the ST25 sequence listing of respective sequence SEQ ID NOs.

[0822] In particularly preferred embodiments, the (additional) nucleic acid comprises at least one coding sequence comprising or consisting a G/C modified coding sequence encoding a SARS-CoV-2 S antigen which is identical or at least 70%, 80%, 85%, 86%, 87%, 88%, 89%, 90%, 91%, 92%, 93%, 94%, 95%, 96%, 97%, 98%, or 99% identical to a codon modified nucleic acid sequence selected from the group consisting of SEQ ID NOs: 146, 147, 151, 154, 158, 161,165, 168, 172, 175, 12034-12050, 12052, 12054-12203,12540-12675, 13012-13147, 13519, 13520, 14133-14141, 14151-14159, 14169-14177, 23041-23076, 23149-23184, 23261-23296, 23369-23404, 23481-23516, 23589-23624, 23701-23736, 23809-23844, 23921-23956, 24029-24064, 24141-24176, 24249-24284, 24361-24396, 24469-24504, 24581-24616, 24689-24724, 24801-24836, 24909-24944, 25021-25056, 25129-25164, 25241-25276, 25349-25384, 25461-25496, 25569-25604, 25681-25716, 25789-25824, 25901-25936, 26009-26044, 26121-26156, 26229-26264, 26341-26376, 26449-26484, 26561-26596, 26669-26704, 26781-26816, 26889-26924 or a fragment or variant of any of these sequences. Additional information regarding each of these suitable nucleic acid sequences encoding may also be derived from the sequence listing, in particular from the details provided therein under identifier <223>. Further information regarding said nucleic acid sequences is also provided in Table 2 (see rows 1 to 7, 9, 11-35 of Column F), Table 3A and B, and under <223> identifier of the ST25 sequence listing of respective sequence SEQ ID NOs.

[0823] In even more preferred embodiments, the (additional) nucleic acid comprises at least one coding sequence comprising or consisting a G/C modified coding sequence encoding a SARS-CoV-2 S antigen which is identical or at least 70%, 80%, 85%, 86%, 87%, 88%, 89%, 90%, 91%, 92%, 93%, 94%, 95%, 96%, 97%, 98%, or 99% identical to a codon modified nucleic acid sequence selected from the group consisting of SEQ ID NOs: 136-138, 142, 143, 146, 147, 11731, 11798, 11804, 11805, 11808, 11810, 11811, 11812, 12035, 12049, 22759-22785, 22965-22982, 23077-23094, 23149 or a fragment or variant of any of these sequences. Additional information regarding each of these suitable nucleic acid sequences encoding may also be derived from the sequence listing, in particular from the details provided therein under identifier <223>. Further information regarding said nucleic acid sequences is also provided in Table 2 (see rows 1 to 7, 9, 11-41 of Column F), Table 3A and B, and under <223> identifier of the ST25 sequence listing of respective sequence SEQ ID NOs.

[0824] In further preferred embodiments, the (additional) nucleic acid comprises at least one coding sequence comprising or consisting a G/C modified coding sequence encoding a SARS-CoV-2 S antigen which is identical or at least 70%, 80%, 85%, 86%, 87%, 88%, 89%, 90%, 91%, 92%, 93%, 94%, 95%, 96%, 97%, 98%, or 99% identical to a codon modified nucleic acid sequence selected from the group consisting of SEQ ID NOs: 27110-27247 of PCT patent application PCT/EP2021/069632 or a fragment or variant of any of these sequences. SEQ ID NOs: 27110-27247 of PCT patent application PCT/EP2021/069632, and the corresponding disclosure relating thereto are herewith incorporated by reference.

[0825] In an particularly preferred embodiment, the (additional) nucleic acid comprises at least one coding sequence comprising or consisting a G/C modified coding sequence encoding a SARS-CoV-2 antigen which is identical or at least 70%, 80%, 85%, 86%, 87%, 88%, 89%, 90%, 91%, 92%, 93%, 94%, 95%, 96%, 97%, 98%, or 99% identical to a codon modified nucleic acid sequence according to SEQ ID NOs: 137 or a fragment or variant thereof.

[0826] In further particularly preferred embodiments, the (additional) nucleic acid comprises at least one coding sequence comprising or consisting a G/C modified coding sequence encoding a SARS-CoV-2 antigen which is identical or at least 70%, 80%, 85%, 86%, 87%, 88%, 89%, 90%, 91%, 92%, 93%, 94%, 95%, 96%, 97%, 98%, or 99% identical to a codon modified nucleic acid sequence according to SEQ ID NOs: 23090, 23091, 23093, 23094 or a fragment or variant thereof.

[0827] In further particularly preferred embodiments, the (additional) nucleic acid comprises at least one coding sequence comprising or consisting a G/C modified coding sequence encoding a SARS-CoV-2 antigen which is identical or at least 70%, 80%, 85%, 86%, 87%, 88%, 89%, 90%, 91%, 92%, 93%, 94%, 95%, 96%, 97%, 98%, or 99% identical to a codon modified nucleic acid sequence according to SEQ ID NOs: 23091, or a fragment or variant thereof.

[0828] In further particularly preferred embodiments, the (additional) nucleic acid comprises at least one coding sequence comprising or consisting a G/C modified coding sequence encoding a SARS-CoV-2 antigen which is identical or at least 70%, 80%, 85%, 86%, 87%, 88%, 89%, 90%, 91%, 92%, 93%, 94%, 95%, 96%, 97%, 98%, or 99% identical to a codon modified nucleic acid sequence according to SEQ ID NOs: 23089, or a fragment or variant thereof.

[0829] In further particularly preferred embodiments, the (additional) nucleic acid comprises at least one coding sequence comprising or consisting a G/C modified coding sequence encoding a SARS-CoV-2 antigen which is identical or at least 70%, 80%, 85%, 86%, 87%, 88%, 89%, 90%, 91%, 92%, 93%, 94%, 95%, 96%, 97%, 98%, or 99% identical to a codon modified nucleic acid sequence according to SEQ ID NOs: 27116-27118 of PCT patent application PCT/EP20211069632, or a fragment or variant thereof. SEQ ID NOs: 27116-27118 of PCT patent application PCT/EP2021/069632, and the corresponding disclosure relating thereto are herewith incorporated by reference.

[0830] In further particularly preferred embodiments, the (additional) nucleic acid comprises at least one coding sequence comprising or consisting a G/C modified coding sequence encoding a SARS-CoV-2 antigen which is identical or at least 70%, 80%, 85%, 86%, 87%, 88%, 89%, 90%, 91%, 92%, 93%, 94%, 95%, 96%, 97%, 98%, or 99% identical to a codon modified nucleic acid sequence according to SEQ ID NO: 27119 of PCT patent application PCT/EP20211069632, or a fragment or variant thereof. SEQ ID NO: 27119 of PCT patent application PCT/EP2021/069632, and the corresponding disclosure relating thereto are herewith incorporated by reference.

[0831] In further embodiments, the (additional) nucleic acid comprises at least one coding sequence comprising or consisting a G/C modified coding sequence encoding a SARS-CoV-2 antigen which is identical or at least 70%, 80%, 85%, 86%, 87%, 88%, 89%, 90%, 91%, 92%, 93%, 94%, 95%, 96%, 97%, 98%, or 99% identical to a codon modified nucleic acid sequence according to SEQ ID NOs: 23113, 23167 or a fragment or variant thereof.

[0832] Preferred nucleic acid sequences in that context, including particularly preferred mRNA sequences, are provided in Table 3A (column C and D). Therein, each row represents a specific suitable SARS-CoV-2 spike construct (compare with Table 2), wherein the description of the SARS-CoV-2 spike construct is indicated in column A of Table 3A and the SEQ ID NOs of the amino acid sequence of the respective SARS-CoV-2 spike construct is provided in column B. The corresponding SEQ ID NOs of the coding sequences encoding the respective SARS-CoV-2 spike constructs are provided in Table 2. Further information is provided under <223> identifier of the respective SEQ ID NOs in the sequence listing.

[0833] The corresponding nucleic acid, preferably coding RNA sequences, in particular mRNA sequences comprising preferred coding sequences are provided in columns C and D, wherein column C provides nucleic acid sequences with an UTR combination “HSD17B4/PSMB3” as defined herein, wherein column D provides nucleic acid sequences with an “alpha-globin” 3′ UTR as defined herein.

TABLE 3A
Nucleic acid, preferably mRNA constructs encoding SARS-COV-2 spike (S)

| row | A | B | C | D |
|---|---|---|---|---|
| 1 | Full-length spike protein; S | 1-9, 274-340, | 148, 155,12204-12337, | 162, 169, 12676-12809, |
| | | 22737, 22739, | 12473-12540, 22791, | 12945-13012, 22818, |
| | | 22741, 22743, | 22793, 22795, 22797, | 22820, 22822, 22824, |
| | | 22745, 22747, | 22799, 22801, 22803, | 22826, 22828, 22830, |
| | | 22749, 22751, | 22805, 22807, 22809, | 22832, 22834, 22836, |
| | | 22753, 22755, | | |
| | | 22757, 22929- | 22811, 23409-23516 | 22838, 23189-23296 |
| | | 22946 | | |
| 2 | Stabilized spike protein; S_stab_PP | 10-18, 341-407, | 149-151, 156-158, 12338, | 163-165, 170-172, |
| | | 22738, 22740, | 12541, 22792, 22794, | 12810, 13013, 22819, |
| | | 22742, 22744, | 22796, 22798, 22800, | 22821, 22823, 22825, |
| | | 22746, 22748, | 22802, 22804, 22806, | 22827, 22829, 22831, |
| | | 22750, 22752, | 22808, 22810, 22812, | 22833, 22835, 22837, |
| | | 22754, 22756, | | |
| | | 22758, 22947- | 23517-23624 | 22839, 23297-23404 |
| | | 22964 | | |
| 3 | Stabilized spike protein; S_stab_PP_cav | 408-541 | 12339, 12340, 12542, | 12811, 12812, 13014, |
| | | | 12543 | 13015 |
| 4 | Stabilized spike protein; S_stab_PP_prot | 542-608 | 12341, 12544 | 12813, 13016 |
| 5 | Stabilized spike protein; S_stab_disul | 19-26, 609- | 12342-12351, 12545- | 12814-12823, 13017- |
| | | 1278, 13521- | 12554, 14142, 14151 | 13026, 14160, 14169 |
| | | 13587 | | |
| 6 | Spike protein fragment S1 | 27, 1279-1345 | 152-154, 159-161, 12352, | 166-168, 173-175, |
| | | | 12555 | 12824, 13027 |
| 7 | S_woTM comprising a lumazine synthase | 58-66, 3624- | 12353, 12556 | 12825, 13028 |
| | | 3690 | | |
| 8 | S_stab_PP_woTM comprising a | 85-93, 3691- | 12354, 12557 | 12826, 13029 |
| | lumazine synthase | 3757 | | |
| 9 | S_stab_PP_cav_woTM comprising a | 3758-3891 | 12355, 12356, 12558, | 12827, 12828, 13030, |
| | lumazine synthase | | 12559 | 13031 |
| 10 | S_stab_PP_prot_woTM comprising a | 3892-3958 | 12357, 12560 | 12829, 13032 |
| | lumazine synthase | | | |
| 11 | S_stab_disul_woTM comprising a | 3959-4628, | 12358-12367, 12561- | 12830-12839, 13033- |
| | lumazine synthase | 13588-13654 | 12570, 14143, 14152 | 13042, 14161, 14170 |
| 12 | S_woTM comprising a ferritin | 67-75, 4629- | 12368, 12571 | 12840, 13043 |
| | | 4695 | | |
| 13 | S_stab_ PP_woTM comprising a ferritin | 94-102, 4696- | 12369, 12572 | 12841, 13044 |
| | | 4762 | | |
| 14 | S_stab_PP_cav_woTM comprising a | 4763-4896 | 12370, 12371, 12573, | 12842, 12843, 13045, |
| | ferritin | | 12574 | 13046 |
| 15 | S_stab_PP_prot_woTM comprising a | 4897-4963 | 12372, 12575 | 12844, 13047 |
| | ferritin | | | |
| 16 | S_stab_disul_woTM comprising a ferritin | 4964-5633, | 12373-12382, 12576- | 12845-12854, 13048- |
| | | 13655-13721 | 12585, 14144, 14153 | 13057, 14162, 14171 |
| 17 | S_woTM comprising a foldon | 76-84, 5634- | 12383, 12586 | 12855, 13058 |
| | | 5700 | | |
| 18 | S_stab_PP_woTM comprising a foldon | 103-111, 5701- | 12384, 12587 | 12856, 13059 |
| | | 5767 | | |
| 19 | S_stab_PP_cav_woTM comprising a | 5768-5901 | 12385, 12386, 12588, | 12857, 12858, 13060, |
| | foldon | | 12589 | 13061 |
| 20 | S_stab_PP_prot_woTM comprising a | 5902-5968 | 12387, 12590 | 12859, 13062 |
| | foldon | | | |
| 21 | S_stab_disul_woTM comprising a foldon | 5969-6638, | 12388-12397, 12591- | 12860-12869, 13063- |
| | | 13722-13788 | 12600, 14145, 14154 | 13072, 14163, 14172 |
| 22 | S_woTM comprising a WhcAg (VLP) | 6639-6705 | 12398, 12601 | 12870, 13073 |
| 23 | S_stab_ PP_woTM comprising a WhcAg | 6706-6772 | 12399, 12602 | 12871, 13074 |
| | (VLP) | | | |
| 24 | S_stab_PP_cav_woTM comprising a | 6773-6906 | 12400, 12401, 12603, | 12872, 12873, 13075, |
| | WhcAg (VLP) | | 12604 | 13076 |
| 25 | S_stab_PP_prot_woTM comprising a | 6907-6973 | 12402, 12605 | 12874, 13077 |
| | WhcAg (VLP) | | | |
| 26 | S_stab_disul_woTM comprising a WhcAg | 6974-7643, | 12403-12412, 12606- | 12875-12884, 13078- |
| | (VLP) | 13789-13855 | 12615, 14146, 14155 | 13087, 14164, 14173 |
| 27 | S_woTMflex comprising a lumazine | 7644-7710 | 12413, 12616 | 12885, 13088 |
| | synthase | | | |
| 28 | S_stab_ PP_woTMflex comprising a | 7711-7777 | 12414, 12617 | 12886, 13089 |
| | lumazine synthase | | | |
| 29 | S_stab_PP_cav_woTMflex comprising a | 7778-7911 | 12415, 12416, 12618, | 12887, 12888, 13090, |
| | lumazine synthase | | 12619 | 13091 |
| 30 | S_stab_PP_prot_woTMflex comprising a | 7912-7978 | 12417, 12620 | 12889, 13092 |
| | lumazine synthase | | | |
| 31 | S_stab_disul_woTMflex comprising a | 7979-8648, | 12418-12427, 12621- | 12890-12899, 13093- |
| | lumazine synthase | 13856-13922 | 12630, 14147, 14156 | 13102, 14165, 14174 |
| 32 | S_woTMflex comprising a ferritin | 8649-8715 | 12428, 12631 | 12900, 13103 |
| 33 | S_stab_PP_woTMflex comprising a | 8716-8782 | 12429, 12632 | 12901, 13104 |
| | ferritin | | | |
| 34 | S_stab_PP_cav_woTMflex comprising a | 8783-8916 | 12430, 12431, 12633, | 12902, 12903, 13105, |
| | ferritin | | 12634 | 13106 |
| 35 | S_stab_PP_prot_woTMflex comprising a | 8917-8983 | 12432, 12635 | 12904, 13107 |
| | ferritin | | | |
| 36 | S_stab_disul_woTMflex comprising a | 8984-9653, | 12433-12442, 12636- | 12905-12914, 13108- |
| | ferritin | 13923-13989 | 12645, 14148, 14157 | 13117, 14166, 14175 |
| 37 | S_woTMflex comprising a foldon | 9654-9720 | 12443, 12646 | 12915, 13118 |
| 38 | S_stab_ PP_woTMflex comprising a | 9721-9787 | 12444, 12647 | 12916, 13119 |
| | foldon | | | |
| 39 | S_stab_PP_cav_woTMflex comprising a | 9788-9921 | 12445, 12446, 12648, | 12917, 12918, 13120, |
| | foldon | | 12649 | 13121 |
| 40 | S_stab_PP_prot_woTMflex comprising a | 9922-9988 | 12447, 12650 | 12919, 13122 |
| | foldon | | | |
| 41 | S_stab_disul_woTMflex comprising a | 9989-10658, | 12448-12457, 12651- | 12920-12929, 13123- |
| | foldon | 13990-14056 | 12660, 14149, 14158 | 13132, 14167, 14176 |
| 42 | S_woTMflex comprising a WhcAg (VLP) | 10659-10725 | 12458, 12661 | 12930, 13133 |
| 43 | S_stab_ PP_woTMflex comprising a | 10726-10792 | 12459, 12662 | 12931, 13134 |
| | WhcAg (VLP) | | | |
| 44 | S_stab_PP_cav_woTMflex comprising a | 10793-10926 | 12460, 12461, 12663, | 12932, 12933, 13135, |
| | WhcAg (VLP) | | 12664 | 13136 |
| 45 | S_stab_PP_prot_woTMflex comprising a | 10927-10993 | 12462, 12665 | 12934, 13137 |
| | WhcAg (VLP) | | | |
| 46 | S_stab_disul_woTMflex comprising a | 10994-11663, | 12463-12472, 12666- | 12935-12944, 13138- |
| | WhcAg (VLP) | 14057-14123 | 12675, 14150, 14159 | 13147, 14168, 14177 |
| 47 | Stabilized spike protein; S_stab_PP_hex | 22732 | 22786 | 22813 |
| 48 | RBD comprising a lumazyne synthase | 22735, 22736 | 22789, 22790 | 22816, 22817 |
| 49 | RBD comprising a ferritin | 22733 | 22787 | 22814 |
| 50 | RBD comprising a foldon | 22734 | 22788 | 22815 |

[0834] Further preferred nucleic acid sequences, preferably mRNA sequences of the invention are provided in Table 3B.

[0835] In Table 31B, each column represents a specific suitable SARS-CoV-2 (nCoV-2019) construct of the invention: column B represents “Full-length spike protein; 2” (compare with Table 2 and Table 3A row 1), and column C represents the “Stabilized spike protein; S_stab_PP” (compare with Table 2 and Table 3A row 2). The SEQ ID NOs of the amino acid sequence of the respective SARS-CoV-2 construct are provided in row 1. The corresponding SEQ ID NOs of the coding sequences encoding the respective SARS-CoV-2 constructs are provided in in Table 2. Further information is provided under <223> identifier of the respective SEQ ID NOs in the sequence listing.

[0836] The corresponding nucleic acid, preferably coding RNA sequences, in particular mRNA sequences comprising preferred coding sequences are provided in rows 2-16, wherein each row provides nucleic acid sequences with UTR combinations and suitable 3′ ends.

TABLE 3B
Nucleic acid, preferably mRNA constructs encoding SARS-COV-2 spike (S)

| row | A | B | C |
|---|---|---|---|
| 1 | Protein | 1-9, 274-340, 22737, 22739, 22741, | 10-18, 341-407, 22738, 22740, 22742, |
| | | 22743, 22745, 22747, 22749, 22751, | 22744, 22746, 22748, 22750, 22752, |
| | | 22753, 22755, 22757, 22929-22946 | 22754, 22756, 22758, 22947-22964 |
| 2 | RNA i-3 | 162, 169, 12676-12809, 12945-13012, | 163-165, 170-172, 12810, 13013, 22819, |
| | (A64-N5-C30-hSL-N5) | 22818, 22820, 22822, 22824, 22826, | 22821, 22823, 22825, 22827, 22829, |
| | | 22828, 22830, 22832, 22834, 22836, | 22831, 22833, 22835, 22837, 22839, |
| | | 22838, 23189-23296 | 23297-23404 |
| 3 | RNA a-1 | 148, 155, 12204-12337, 12473-12540, | 149-151, 156-158, 12338, 12541, 22792, |
| | (hSL-A100) | 22791, 22793, 22795, 22797, 22799, | 22794, 22796, 22798, 22800, 22802, |
| | | 22801, 22803, 22805, 22807, 22809, | 22804, 22806, 22808, 22810, 22812, |
| | | 22811, 23409-23516 | 23517-23624 |
| 4 | RNA a-3 | 23629-23736 | 23737-23844 |
| | (hSL-A100) | | |
| 5 | RNA e-2 | 23849-23956 | 23957-24064 |
| | (hSL-A100) | | |
| 6 | RNA i-3 | 24069-24176, 24289-24396, | 24177-24284, 24397-24504, |
| | (hSL-A100) | 24509-24616 | 24617-24724 |
| 7 | RNA a-1 | 24729-24836 | 24837-24944 |
| | (A100) | | |
| 8 | RNA a-3 | 24949-25056 | 25057-25164 |
| | (A100) | | |
| 9 | RNA e-2 | 25169-25276 | 25277-25384 |
| | (A100) | | |
| 10 | RNA i-3 | 25389-25496, 25609-25716, | 25497-25604, 25717-25824, |
| | (A100) | 25829-25936 | 25937-26044 |
| 13 | RNA x-1 | 26049-26156 | 26157-26264 |
| | (A100) | | |
| 14 | RNA x-2 | 26269-26376 | 26377-26484 |
| | (A100) | | |
| 15 | RNA x-1 | 26489-26596 | 26597-26704 |
| | (A100-N5) | | |
| 16 | RNA x-2 | 26709-26816 | 26817-26924 |
| | (A30-N10-A70) | | |

[0837] In preferred embodiments, the (additional) nucleic acid, preferably the RNA, comprises or consists of a nucleic acid sequence encoding a SARS-CoV-2 S antigen which is identical or at least 70%, 80%, 85%, 86%, 87%, 88%, 89%, 90%, 91%, 92%, 93%, 94%, 95%, 96%, 97%, 98%, or 99% identical to a nucleic acid sequence selected SEQ ID NOs: 148-175, 12204-13147,14142-14177, 22786-22839, 23189-23404, 23409-23624, 23629-23844, 23849-24064, 24069-24284, 24289-24504, 24509-24724, 24729-24944, 24949-25164, 25169-25384, 25389-25604, 25609-25824, 25829-26044, 26049-26264, 26269-26484, 26489-26704, 26709-26937 or a fragment or variant of any of these sequences. Further information regarding respective nucleic acid sequences is provided under <223> identifier of the respective SEQ ID NO in the sequence listing, and in Table 3A (see in particular Column C and D) and 3B (see in particular rows 2-16).

[0838] In particularly preferred embodiments, the (additional) nucleic acid, preferably the RNA, comprises or consists of a nucleic acid sequence encoding a SARS-CoV-2 S antigen which is identical or at least 70%, 80%, 85%, 86%, 87%, 88%, 89%, 90%, 91%, 92%, 93%, 94%, 95%, 96%, 97%, 98%, or 99% identical to a nucleic acid sequence selected from SEQ ID NOs: 162-175, 12676-13147, 14160-14177, 22813-22839, 23189-23404 or a fragment or variant of any of these sequences. Further information regarding respective nucleic acid sequences is provided under <223> identifier of the respective SEQ ID NO in the sequence listing, and in Table 3A (see in particular Column D) and 3B (row 2)

[0839] In particularly preferred embodiments, the (additional) nucleic acid, preferably the RNA, comprises or consists of a nucleic acid sequence encoding a SARS-CoV-2 S antigen which is identical or at least 70%, 80%, 85%, 86%, 87%, 88%, 89%, 90%, 91%, 92%, 93%, 94%, 95%, 96%, 97%, 98%, or 99% identical to a nucleic acid sequence selected from SEQ ID NOs: 148-161, 12204-12675, 14142-14159, 22786-22812, 23409-23624, 24729-24944 or a fragment or variant of any of these sequences. Further information regarding respective nucleic acid sequences is provided under <223> identifier of the respective SEQ ID NO in the sequence listing, and in Table 3A (see in particular Column C) and Table 3B (see rows 3, 7).

[0840] In particularly preferred embodiments, the (additional) nucleic acid, preferably the RNA, comprises or consists of a nucleic acid sequence encoding a SARS-CoV-2 S antigen which is identical or at least 70%, 80%, 85%, 86%, 87%, 88%, 89%, 90%, 91%, 92%, 93%, 94%, 95%, 96%, 97%, 98%, or 99% identical to a nucleic acid sequence selected from SEQ ID NOs: 149-154, 156-161, 163-168, 170-175, 12338, 12352, 12541, 12555, 12810, 12824, 13013, 13027, 22786, 22792, 22794, 22796, 22798, 22800, 22802, 22804, 22806, 22808, 22810, 22812, 22813, 22819, 22821, 22823, 22825, 22827, 22829, 22831, 22833, 22835, 22837, 22839, 23517-23624, 23297-23404, 24837-24944 or a fragment or variant of any of these sequences. Further information regarding respective nucleic acid sequences is provided under <223> identifier of the respective SEQ ID NO in the sequence listing and in Table 3A (see Column C and D, rows 2 and 6) and Table 3B (see Column C)

[0841] In even more preferred embodiments, the (additional) nucleic acid, preferably the RNA, comprises or consists of a nucleic acid sequence encoding a SARS-CoV-2 S antigen which is identical or at least 70%, 80%, 85%, 86%, 87%, 88%, 89%, 90%, 91%, 92%, 93%, 94%, 95%, 96%, 97%, 98%, or 99% identical to a nucleic acid sequence selected from SEQ ID NOs: 149, 156, 12338, 150, 157, 151, 158, 12541, 163, 170, 12810, 164,171, 165, 172, 13013, 12342-12351,12545-12554, 12814-12823,13017-13026, 14133, or a fragment or variant of any of these sequences. Further information regarding respective nucleic acid sequences is provided under <223> identifier of the respective SEQ ID NO in the sequence listing and in Table 3A and 38.

[0842] In even more preferred embodiments, the (additional) nucleic acid, preferably the RNA, comprises or consists of a nucleic acid sequence encoding a SARS-CoV-2 S antigen selected from SEQ ID NOs: 149, 150, 163, 164, 165, 24837, 23311, 23531, 24851, 23310, 23530, 24850, 23313, 23533, 24853, 23314, 23534, 24854, or a fragment or variant of any of these sequences. Further information regarding respective nucleic acid sequences is provided under <223> identifier of the respective SEQ ID NO in the sequence listing and in Table 3A and B.

[0843] In further preferred embodiments, the (additional) nucleic acid, preferably the RNA, comprises or consists of a nucleic acid sequence encoding a SARS-CoV-2 S antigen selected from SEQ ID NOs: 27248-27385, 27662-27907 of PCT patent application PCT/EP2021/069632, or a fragment or variant of any of these sequences. SEQ ID NOs: 27248-27385, 27662-27907 of PCT patent application PCT/EP2021/069632, and the corresponding disclosure relating thereto are herewith incorporated by reference.

[0844] In further preferred embodiments, the (additional) nucleic acid, preferably the RNA, comprises or consists of a nucleic acid sequence encoding a SARS-CoV-2 S antigen selected from SEQ ID NOs: 27386-27661 of PCT patent application PCT/EP20211069632, or a fragment or variant of any of these sequences. SEQ ID NOs: 27386-27661 of PCT patent application PCT/EP2021/069632, and the corresponding disclosure relating thereto are herewith incorporated by reference.

[0845] In a particularly preferred embodiment, the (additional) nucleic acid, preferably the RNA, comprises or consists of a nucleic acid sequence encoding a SARS-CoV-2 antigen selected from SEQ ID NOs: 163 or a fragment or variant of that sequence.

[0846] In a particularly preferred embodiment, the (additional) nucleic acid, preferably the RNA, comprises or consists of a nucleic acid sequence encoding a SARS-CoV-2 antigen selected from SEQ ID NOs: 149 or a fragment or variant of that sequence.

[0847] In a further particularly preferred embodiment, the (additional) nucleic acid, preferably the RNA, comprises or consists of a nucleic acid sequence which is identical or at least 70%, 80%, 85%, 86%, 87%, 88%, 89%, 90%, 91%, 92%, 93%, 94%, 95%, 96%, 97%, 98%, or 99% identical to a nucleic acid sequence of SEQ ID NO: 24837.

[0848] In a further preferred embodiment, the (additional nucleic acid, preferably the RNA, comprises or consists of a nucleic acid sequence which is identical or at least 70%, 80%, 85%, 86%, 87%, 88%, 89%, 90%, 91%, 92%, 93%, 94%, 95%, 96%, 97%, 98%, or 99% identical to a nucleic acid sequence of SEQ ID NO: 23311, 23531, 24851.

[0849] In a further preferred embodiment, the (additional) nucleic acid, preferably the RNA, comprises or consists of a nucleic acid sequence which is identical or at least 70%, 80%, 85%, 86%, 87%, 88%, 89%, 90%, 91%, 92%, 93%, 94%, 95%, 96%, 97%, 98%, or 99% identical to a nucleic acid sequence of SEQ ID NO: 23310, 23530, 24850.

[0850] In a further preferred embodiment, the (additional) nucleic acid, preferably the RNA, comprises or consists of a nucleic acid sequence which is identical or at least 70%, 80%, 85%, 86%, 87%, 88%, 89%, 90%, 91%, 92%, 93%, 94%, 95%, 96%, 97%, 98%, or 99% identical to a nucleic acid sequence of SEQ ID NO: 23309, 23529, 24849.

[0851] In further preferred embodiments, the (additional) nucleic acid, preferably the RNA, comprises or consists of a nucleic acid sequence encoding a SARS-CoV-2 S antigen selected from SEQ ID NOs: 27254, 27255, 27256, 27277, 27278, 27279, 27300, 27301, 27302, 27323, 27324, 27325, 27346, 27347, 27348, 27369, 27370, 27371, 27392, 27393, 27394, 27415, 27416, 27417, 27438, 27439, 27440, 27461, 27462, 27463, 27484, 27485, 27486, 27507, 27508, 27509, 27530, 27531, 27532, 27553, 27554, 27555, 27576, 27577, 27578, 27599, 27600, 27601, 27622, 27623, 27624, 27645, 27646, 27647, 27686, 27687, 27688, 27727, 27728, 27729, 27768, 27769, 27770, 27809, 27810, 27811, 27850, 27851, 27852, 27891, 27892, 27893 of PCT patent application PCT/EP2021/069632, or a fragment or variant of any of these sequences, wherein SEQ ID NOs: 27254-27256, 27392-27394, 27530-27532, or a fragment or variant of these sequences are particularly preferred. SEQ ID NOs: 27254, 27255, 27256, 27277, 27278, 27279, 27300, 27301, 27302, 27323, 27324, 27325, 27346, 27347, 27348, 27369, 27370, 27371, 27392, 27393, 27394, 27415, 27416, 27417, 27438, 27439, 27440, 27461, 27462, 27463, 27484, 27485, 27486, 27507, 27508, 27509, 27530, 27531, 27532, 27553, 27554, 27555, 27576, 27577, 27578, 27599, 27600, 27601, 27622, 27623, 27624, 27645, 27646, 27647, 27686, 27687, 27688, 27727, 27728, 27729, 27768, 27769, 27770, 27809, 27810, 27811, 27850, 27851, 27852, 27891, 27892, 27893 of PCT patent application PCT/EP2021/069632, and the corresponding disclosure relating thereto are herewith incorporated by reference.

[0852] In further preferred embodiments, the (additional) nucleic acid, preferably the RNA, comprises or consists of a nucleic acid sequence encoding a SARS-CoV-2 S antigen selected from SEQ ID NOs: 27257, 27280, 27303, 27326, 27349, 27372, 27689, 27730, 27771, 27812, 27853, 27894, 27395, 27418, 27441, 27464, 27487, 27510, 27533, 27556, 27579, 27602, 27625, 27648 of PCT patent application PCT/EP2021/069632 or a fragment or variant of any of these sequences. SEQ ID NOs: 27257, 27280, 27303, 27326, 27349, 27372, 27689, 27730, 27771, 27812, 27853, 27894, 27395, 27418, 27441, 27464, 27487, 27510, 27533, 27556, 27579, 27602, 27625, 27648 of PCT patent application PCT/EP2021/069632, and the corresponding disclosure relating thereto are herewith incorporated by reference.

[0853] In a further preferred embodiment, the (additional) nucleic acid, preferably the RNA, comprises or consists of a nucleic acid sequence which is identical or at least 70%, 80%, 85%, 86%, 87%, 88%, 89%, 90%, 91%, 92%, 93%, 94%, 95%, 96%, 97%, 98%, or 99% identical to a nucleic acid sequence of SEQ ID NO: 23313, 23533, 24853, 23314, 23534, 24854.

[0854] In a further preferred embodiment, the (additional) nucleic acid, preferably the RNA, comprises or consists of a nucleic acid sequence which is identical or at least 70%, 80%, 85%, 86%, 87%, 88%, 89%, 90%, 91%, 92%, 93%, 94%, 95%, 96%, 97%, 98%, or 99% identical to a nucleic acid sequence of SEQ ID NO: 26633.

[0855] In a further preferred embodiment, the (additional) nucleic acid, preferably the RNA, comprises or consists of a nucleic acid sequence which is identical or at least 70%, 80%, 85%, 86%, 87%, 88%, 89%, 90%, 91%, 92%, 93%, 94%, 95%, 96%, 97%, 98%, or 99% identical to a nucleic acid sequence of SEQ ID NO: 26907.

[0856] In further preferred embodiments, the (additional) nucleic acid, preferably the RNA, comprises or consists of a nucleic acid sequence encoding a SARS-CoV-2 S antigen which is identical or at least 70%, 80%, 85%, 86%, 87%, 88%, 89%, 90%, 91%, 92%, 93%, 94%, 95%, 96%, 97%, 98%, or 99% identical to a nucleic acid sequence selected from SEQ ID NOs: 148-175,12204-13147, 14142-14177, 22786-22839, 23189-23404, 23409-23624, 23629-23844, 23849-24064, 24069-24284, 24289-24504, 24509-24724, 24729-24944, 24949-25164, 25169-25384, 25389-25604, 25609-25824, 25829-26044, 26049-26264, 26269-26484, 26489-26704, 26709-26937 optionally, wherein said RNA sequences comprise a cap1 structure as defined herein, and, optionally, wherein at least one, preferably all uracil nucleotides in said RNA sequences are replaced by pseudouridine (ψ) nucleotides and/or N1-methylpseudouridine (m1ψ) nucleotides.

[0857] In further preferred embodiments, the (additional) nucleic acid, preferably the RNA, comprises or consists of a nucleic acid sequence encoding a SARS-CoV-2 S antigen selected from SEQ ID NOs: 27248-27385, 27662-27907, 27386-27661 of PCT patent application PCT/EP2021/069632 or a fragment or variant of any of these sequences, wherein said RNA sequences comprise a cap1 structure as defined herein, and, optionally, wherein at least one, preferably all uracil nucleotides in said RNA sequences are replaced by pseudouridine (ψ) nucleotides and/or N1-methylpseudouridine (m1ψ) nucleotides.

[0858] In specific embodiments, the pharmaceutical composition comprises a plurality or at least 2, 3, 4, 5, 6, 7, 8, 9, 10 or even more of the nucleic acid species, e.g. RNA species encoding SARS-CoV-2 S.

[0859] In embodiments, the pharmaceutical composition comprises 2, 3, 4 or 5 nucleic acid species (e.g. DNA or RNA), preferably RNA species, wherein said nucleic acid species comprise or consist of a nucleic acid sequence which is identical or at least 70%, 80%, 85%, 86%, 87%, 88%, 89%, 90%, 91%, 92%, 93%, 94%, 95%, 96%, 97%, 98%, or 99% identical to a nucleic acid sequence selected from the group consisting of SEQ ID NOs: 116-132, 134-138, 140-143, 145-175, 11664-11813, 11815, 11817-12050, 12052, 12054-13147, 13514, 13515, 13519, 13520, 14124-14177, 22759, 22764-22786, 22791-22813, 22818-22839, 22969-23184, 23189-23404, 23409-23624, 23629-23844, 23849-24064, 24069-24284, 24289-24504, 24509-24724, 24729-24944, 24949-25164, 25169-25384, 25389-25604, 25609-25824, 25829-26044, 26049-26264, 26269-26484, 26489-26704, 26709-26937 and, optionally, at least one pharmaceutically acceptable carrier or excipient, wherein each of the 2, 3, 4 or 5 nucleic acid species encode a different antigenic peptide or protein of a SARS-CoV-2 coronavirus.

[0860] Accordingly, in embodiments, the pharmaceutical composition comprises two nucleic acid species (e.g. DNA or RNA), preferably RNA species, wherein the nucleic acid species comprise or consist of a nucleic acid sequence which is identical or at least 70%, 80%, 85%, 86%, 87%, 88%, 89%, 90%, 91%, 92%, 93%, 94%, 95%, 96%, 97%, 98%, or 99% identical to a nucleic acid sequence selected from the group consisting of SEQ ID NOs: 148-175, 12204-13147, 14142-14177, 22786-22839, 23189-23404, 23409-23624, 23629-23844, 23849-24064, 24069-24284, 24289-24504, 24509-24724, 24729-24944, 24949-25164, 25169-25384, 25389-25604, 25609-25824, 25829-26044, 26049-26264, 26269-26484, 26489-26704, 26709-26937, and, optionally, at least one pharmaceutically acceptable carrier or excipient, wherein each of the two nucleic acid species encode a different antigenic peptide or protein of a SARS-CoV-2 coronavirus.

[0861] In embodiments, the pharmaceutical composition comprises three nucleic acid species (e.g. DNA or RNA), preferably RNA species, wherein the nucleic acid comprises or consists of a nucleic acid sequence which is identical or at least 70%, 80%, 85%, 86%, 87%, 88%, 89%, 90%, 91%, 92%, 93%, 94%, 95%, 96%, 97%, 98%, or 99% identical to a nucleic acid sequence selected from the group consisting 148-175, 12204-13147, 14142-14177, 22786-22839, 23189-23404, 23409-23624, 23629-23844, 23849-24064, 24069-24284, 24289-24504, 24509-24724, 24729-24944, 24949-25164, 25169-25384, 25389-25604, 25609-25824, 25829-26044, 26049-26264, 26269-26484, 26489-26704, 26709-26937, and, optionally, at least one pharmaceutically acceptable carrier or excipient, wherein each of the 2, 3, 4 or 5 nucleic acid species encode a different antigenic peptide or protein of a SARS-CoV-2 coronavirus.

[0862] Preferably, the at least 2, 3, 4, 5, 6, 7, 8, 9, 10 or even more different nucleic acid species encoding SARS-CoV-2 S of the composition each encode a different prefusion stabilized spike protein (as defined in the first aspect). Preferably, stabilization of the perfusion conformation is obtained by introducing two consecutive proline substitutions at residues K986 and V987 in the spike protein (Amino acid positions according to reference SEQ ID NO: 1). Accordingly, in preferred embodiments, the at least 2, 3, 4, 5, 6, 7, 8, 9, 10 pre-fusion stabilized spike proteins (S_stab) each comprises at least one pre-fusion stabilizing mutation, wherein the at least one pre-fusion stabilizing mutation comprises the following amino acid substitutions: K986P and V987P (amino acid positions according to reference SEQ ID NO: 1).

[0863] Suitably, the different spike proteins or prefusion stabilized spike proteins are derived from at least B.1.1.7, B.1.351, P.1, or CAL.20C.

[0864] Suitably, the different spike proteins or prefusion stabilized spike proteins have amino acid changes in the S protein comprising:
[0865] (i) delH69, delV70, Y453F, D614G, I692V and M1229I;
[0866] (ii) delH69, delV70, delY144, N501Y, A570D, D614G, P681H, T716I, S982A and D1118H;
[0867] (iii) L18F, D80A, D215G, delL242, delA243, delL244, R246I, K417N, E484K, N501Y, D614G and A701V;
[0868] (iv) L18F, T20N, P26S, D138Y, R190S, K417T, E484K, N501Y, D614G, H655Y and T1027I; and/or
[0869] (v) S13I, W152C, L452R, and D614G.

[0870] Accordingly, the at least 2, 3, 4, 5, 6, 7, 8, 9, 10 or even more different nucleic acid species encoding SARS-CoV-2 S of the composition each encode a different prefusion stabilized spike protein, wherein the at least 2, 3, 4, 5, 6, 7, 8, 9, 10 or even more stabilized spike proteins are selected from amino acid sequences being identical or at least 70%, 80%, 85%, 86%, 87%, 88%, 89%, 90%, 91%, 92%, 93%, 94%, 95%, 96%, 97%, 98%, or 99% identical to any one of SEQ ID NOs: 10-26, 341-407, 609-1278,13521-13587, 22738, 22740, 22742, 22744, 22746, 22748, 22750, 22752, 22754, 22756, 22758, 22947-22964, or an immunogenic fragment or immunogenic variant of any of these.

[0871] In preferred embodiments, the composition comprises at 2, 3, 4, or 5 nucleic acid species comprising a coding sequence encoding an amino acid sequence being identical or at least 70%, 80%, 85%, 86%, 87%, 88%, 89%, 90%, 91%, 92%, 93%, 94%, 95%, 96%, 97%, 98%, or 99% identical to any one of SEQ ID NOs: 10, 22961; 22960, 22963, 22941, 22964.

[0872] In preferred embodiments, the composition comprises one nucleic acid species comprising a coding sequence encoding an amino acid sequence being identical or at least 70%, 80%, 85%, 86%, 87%, 88%, 89%, 90%, 91%, 92%, 93%, 94%, 95%, 96%, 97%, 98%, or 99% identical to any one of SEQ ID NOs: 10, wherein the multivalent composition additionally comprises at least 2, 3, 4 further RNA species selected from
[0873] i) one nucleic acid species comprises a coding sequence encoding an amino acid sequence being identical or at least 70%, 80%, 85%, 86%, 87%, 88%, 89%, 90%, 91%, 92%, 93%, 94%, 95%, 96%, 97%, 98%, or 99% identical to any one of SEQ ID NOs: 22961; and/or
[0874] ii) one nucleic acid species comprises a coding sequence encoding an amino acid sequence being identical or at least 70%, 80%, 85%, 86%, 87%, 88%, 89%, 90%, 91%, 92%, 93%, 94%, 95%, 96%, 97%, 98%, or 99% identical to any one of SEQ ID NOs: 22960; and/or
[0875] iii) one nucleic acid species comprises a coding sequence encoding an amino acid sequence being identical or at least 70%, 80%, 85%, 86%, 87%, 88%, 89%, 90%, 91%, 92%, 93%, 94%, 95%, 96%, 97%, 98%, or 99% identical to any one of SEQ ID NOs: 22963; and/or
[0876] iv) one nucleic acid species comprises a coding sequence encoding an amino acid sequence being identical or at least 70%, 80%, 85%, 86%, 87%, 88%, 89%, 90%, 91%, 92%, 93%, 94%, 95%, 96%, 97%, 98%, or 99% identical to any one of SEQ ID NOs: 22941; and/or
[0877] v) one nucleic acid species comprises a coding sequence encoding an amino acid sequence being identical or at least 70%, 80%, 85%, 86%, 87%, 88%, 89%, 90%, 91%, 92%, 93%, 94%, 95%, 96%, 97%, 98%, or 99% identical to any one of SEQ ID NOs: 22964.

[0878] Preferably, the at least 2, 3, 4, 5, 6, 7, 8, 9, 10 or even more different nucleic acid species encoding SARS-CoV-2 S of the composition comprise nucleic acid coding sequences each encoding a different prefusion stabilized spike protein, wherein the at least 2, 3, 4, 5, 6, 7, 8, 9, 10 or even more nucleic acid coding sequences are selected from nucleic acid sequences being identical or at least 70%, 80%, 85%, 86%, 87%, 88%, 89%, 90%, 91%, 92%, 93%, 94%, 95%, 96%, 97%, 98%, or 99% identical to any one of SEQ ID NOs: 136-138, 140-143, 145-175, 11731-11813, 11815, 11817-12050, 12052, 12054-12203, 13514, 13515, 13519, 13520, 14124-14141, 22759, 22764-22785, 22969-23184 or fragments or variants of any of these.

[0879] In preferred embodiments, the composition comprises one nucleic acid species comprising a coding sequence being identical or at least 70%, 80%, 85%, 86%, 87%, 88%, 89%, 90%, 91%, 92%, 93%, 94%, 95%, 96%, 97%, 98%, or 99% identical to any one of SEQ ID NOs: 137, wherein the multivalent composition additionally comprises at least 2, 3, 4 further RNA species selected from
[0880] i) one nucleic acid species comprises a coding sequence being identical or at least 70%, 80%, 85%, 86%, 87%, 88%, 89%, 90%, 91%, 92%, 93%, 94%, 95%, 96%, 97%, 98%, or 99% identical to any one of SEQ ID NOs: 23091; and/or
[0881] ii) one nucleic acid species comprises a coding sequence being identical or at least 70%, 80%, 85%, 86%, 87%, 88%, 89%, 90%, 91%, 92%, 93%, 94%, 95%, 96%, 97%, 98%, or 99% identical to any one of SEQ ID NOs: 23090; and/or
[0882] iii) one nucleic acid species comprises a coding sequence being identical or at least 70%, 80%, 85%, 86%, 87%, 88%, 89%, 90%, 91%, 92%, 93%, 94%, 95%, 96%, 97%, 98%, or 99% identical to any one of SEQ ID NOs: 23093; and/or
[0883] iv) one nucleic acid species comprises a coding sequence being identical or at least 70%, 80%, 85%, 86%, 87%, 88%, 89%, 90%, 91%, 92%, 93%, 94%, 95%, 96%, 97%, 98%, or 99% identical to any one of SEQ ID NOs: 22999; and/or
[0884] v) one nucleic acid species comprises a coding sequence being identical or at least 70%, 80%, 85%, 86%, 87%, 88%, 89%, 90%, 91%, 92%, 93%, 94%, 95%, 96%, 97%, 98%, or 99% identical to any one of SEQ ID NOs: 23094.

[0885] Preferably, the at least 2, 3, 4, 5, 6, 7, 8, 9, 10 or even more different nucleic acid species encoding SARS-CoV-2 S of the composition comprise nucleic acid coding sequences each encoding a different prefusion stabilized spike protein, wherein the at least 2, 3, 4, 5, 6, 7, 8, 9, 10 or even more nucleic acid coding sequences are selected from RNA sequences being identical or at least 70%, 80%, 85%, 86%, 87%, 88%, 89%, 90%, 91%, 92%, 93%, 94%, 95%, 96%, 97%, 98%, or 99% identical to any one of SEQ ID NOs: 149-151, 163-165, 12338, 12541, 12810-12813, 12901, 12931, 13013, 22792, 22794, 22796, 22798, 22802, 22804, 22806, 22810, 22813, 22819, 22821, 22823, 22825, 22827, 22829, 22831, 22833, 22835, 22837, 22839, 23297-23314, 23369, 23517-23520, 23523-23525, 23527, 23529, 23530, 23589, 23737, 23957, 24397, 24837, 25057, 25277, 25717, 26925-26937 or fragments or variants of any of these.

[0886] In preferred embodiments, the composition comprises one RNA species comprising or consisting of an RNA sequence being identical or at least 70%, 80%, 85%, 86%, 87%, 88%, 89%, 90%, 91%, 92%, 93%, 94%, 95%, 96%, 97%, 98%, or 99% identical to any one of SEQ ID NOs: 163, wherein the composition additionally comprises at least 2, 3, 4 further RNA species selected from
[0887] i) one RNA species comprising or consisting of an RNA sequence being identical or at least 70%, 80%, 85%, 86%, 87%, 88%, 89%, 90%, 91%, 92%, 93%, 94%, 95%, 96%, 97%, 98%, or 99% identical to any one of SEQ ID NOs: 23311; and/or
[0888] ii) one RNA species comprises a coding sequence being identical or at least 70%, 80%, 85%, 86%, 87%, 88%, 89%, 90%, 91%, 92%, 93%, 94%, 95%, 96%, 97%, 98%, or 99% identical to any one of SEQ ID NOs: 23310; and/or
[0889] iii) one RNA species comprises a coding sequence being identical or at least 70%, 80%, 85%, 86%, 87%, 88%, 89%, 90%, 91%, 92%, 93%, 94%, 95%, 96%, 97%, 98%, or 99% identical to any one of SEQ ID NOs: 23313; and/or
[0890] iv) one RNA species comprises a coding sequence being identical or at least 70%, 80%, 85%, 86%, 87%, 88%, 89%, 90%, 91%, 92%, 93%, 94%, 95%, 96%, 97%, 98%, or 99% identical to any one of SEQ ID NOs: 23219; and/or
[0891] v) one RNA species comprises a coding sequence being identical or at least 70%, 80%, 85%, 86%, 87%, 88%, 89%, 90%, 91%, 92%, 93%, 94%, 95%, 96%, 97%, 98%, or 99% identical to any one of SEQ ID NOs: 23314;
   wherein, preferably, each of the mRNA species comprise a Cap1 structure, and, optionally, each of the mRNA species do not comprise modified nucleotides.

[0892] In preferred embodiments, the composition comprises one RNA species comprising or consisting of an RNA sequence being identical or at least 70%, 80%, 85%, 86%, 87%, 88%, 89%, 90%, 91%, 92%, 93%, 94%, 95%, 96%, 97%, 98%, or 99% identical to any one of SEQ ID NOs: 149 or 24837, wherein the multivalent composition additionally comprises at least 2, 3, 4 further RNA species selected from
[0893] i) one RNA species comprising or consisting of an RNA sequence being identical or at least 70%, 80%, 85%, 86%, 87%, 88%, 89%, 90%, 91%, 92%, 93%, 94%, 95%, 96%, 97%, 98%, or 99% identical to any one of SEQ ID NOs: 23531 or 24851; and/or
[0894] ii) one RNA species comprises a coding sequence being identical or at least 70%, 80%, 85%, 86%, 87%, 88%, 89%, 90%, 91%, 92%, 93%, 94%, 95%, 96%, 97%, 98%, or 99% identical to any one of SEQ ID NOs: 23530 or 24850; and/or
[0895] iii) one RNA species comprises a coding sequence being identical or at least 70%, 80%, 85%, 86%, 87%, 88%, 89%, 90%, 91%, 92%, 93%, 94%, 95%, 96%, 97%, 98%, or 99% identical to any one of SEQ ID NOs: 23533 or 24853; and/or
[0896] iv) one RNA species comprises a coding sequence being identical or at least 70%, 80%, 85%, 86%, 87%, 88%, 89%, 90%, 91%, 92%, 93%, 94%, 95%, 96%, 97%, 98%, or 99% identical to any one of SEQ ID NOs: 23439 or 24759; and/or
[0897] v) one RNA species comprises a coding sequence being identical or at least 70%, 80%, 85%, 86%, 87%, 88%, 89%, 90%, 91%, 92%, 93%, 94%, 95%, 96%, 97%, 98%, or 99% identical to any one of SEQ ID NOs: 23534 or 24854;
   wherein, preferably, each of the mRNA species comprise a Cap1 structure, and, optionally, each of the mRNA species do not comprise modified nucleotides.

[0898] In further preferred embodiments, the composition comprises at least two RNA species being identical or at least 70%, 80%, 85%, 86%, 87%, 88%, 89%, 90%, 91%, 92%, 93%, 94%, 95%, 96%, 97%, 98%, or 99% identical to any one of SEQ ID NOs: 149 or 24837, 23531 or 24851, 23530 or 24850, 23533 or 24853, 23439 or 24759 or 23534 or 24854.

[0899] Nucleic Acid Encoding SARS-CoV-1 Spike Protein

[0900] In a particularly preferred embodiment, the Coronavirus spike protein (S) is selected or derived from at least one SARS-associated virus spike protein, preferably a SARS-CoV-1 spike protein (S1, S2, or S1 and S2), or an immunogenic fragment or immunogenic variant thereof.

[0901] In a particularly preferred embodiment, the Coronavirus spike protein (S) is selected from a SARS-CoV-1 virus.

[0902] It has to be understood that generic embodiments and features that have been described paragraph “Nucleic acid encoding a Coronavirus spike protein” may also apply to a nucleic acid encoding a SARS-CoV-1 spike protein.

[0903] Suitable antigenic peptide or protein sequences that are provided by the (additional) nucleic acid are disclosed in Table 4, rows 1 to 45, Column A and B. In addition, further information regarding said suitable antigenic peptide or protein sequences selected or derived from SARS-associated virus, preferably a SARS-CoV-1 are provided under <223> identifier of the ST25 sequence listing.

[0904] In particularly preferred embodiments, the encoded at least one antigenic peptide or protein comprises or consists of a SARS-associated virus spike protein (S), preferably a SARS-CoV-1 spike protein (S), wherein the spike protein (S) comprises or consists of a spike protein fragment S1, or an immunogenic fragment or immunogenic variant thereof.

[0905] In particularly preferred embodiments, the encoded at least one antigenic peptide or protein comprises or consists of a full-length SARS-associated virus spike protein (S), preferably a SARS-CoV-1 spike protein (S) or an immunogenic fragment or immunogenic variant of any of these.

[0906] In particularly preferred embodiments, the SARS-associated virus spike protein (S), preferably a SARS-CoV-1 spike protein (S) that is provided by the nucleic acid is designed or adapted to stabilize the antigen in pre-fusion conformation. A pre-fusion conformation is particularly advantageous in the context of an efficient Coronavirus vaccine, as several potential epitopes for neutralizing antibodies may merely be accessible in said pre-fusion protein conformation. Furthermore, remaining of the protein in the pre-fusion conformation is aimed to avoid immunopathological effects, like e.g. enhanced disease and/or antibody dependent enhancement (ADE).

[0907] Accordingly, in preferred embodiments, the (additional) nucleic acid of comprises at least one coding sequence encoding at least one antigenic peptide or protein that is selected or derived from an SARS-associated virus spike protein (S), preferably a SARS-CoV-1 spike protein (S), wherein the spike protein (S) is a pre-fusion stabilized spike protein (S_stab). Suitably, said pre-fusion stabilized spike protein comprises at least one pre-fusion stabilizing mutation.

[0908] Stabilization of the SARS-CoV-1 spike protein may be obtained by substituting at least one amino acids at position K968 and/or V969 with amino acids that stabilize the spike protein in a perfusion conformation (amino acid positions according to reference SEQ ID NO: 14906).

[0909] In embodiments, the pre-fusion stabilizing mutation of SARS-CoV-1 spike protein comprises an amino acid substitution at position K968, wherein the amino acids K968 is substituted with one selected from A, I, L, M, F, V, G, or P (amino acid positions according to reference SEQ ID NO: 14906), preferably wherein the amino acids K968 is substituted with P. In embodiments, the pre-fusion stabilizing mutation comprises an amino acid substitution at position V969, wherein the amino acids V969 is substituted with one selected from A, I, L, M, F, V, G, or P (amino acid positions according to reference SEQ ID NO: 14906), preferably wherein the amino acids V969 is substituted with P.

[0910] Accordingly, in preferred embodiments, the pre-fusion stabilized spike protein (S_stab) of SARS-CoV-1 comprises at least one pre-fusion stabilizing mutation, wherein the at least one pre-fusion stabilizing mutation comprises the following amino acid substitutions: K968P and V969P (amino acid positions according to reference SEQ ID NO: 14906).

[0911] Any SARS-associated virus spike protein or fragments or variants thereof can be chosen by the skilled person to introduce such amino acid changes (e.g. such a double Proline mutation). Examples comprise HCoV/OC43 spike protein (1-1353)(A1070P_L1071P), HCoV/OC43/1783A_10 spike protein (1-1362)(A1079P_L1080P), HCoV/HKU1/N5 spike protein (1-1351)(N1067P_L1068P), HCoV/229E/BN1/GER/2015 spike protein (1-1171)(I869P_I870P), HCoV/NL63/RPTEC/2004 spike protein (1-1356)(S1052P_I1053P), Bat SARS-like CoV/WIV1 spike protein (1-1256)(K969P_V970P), BatCoV/HKU9-1 BF_005I spike protein (1-1274)(G983P_L984P), PDCoV/Swine/Thailand/S5011/2015 spike protein (1-1160)((E855P_V856P), PEDV/NPL-PEDv/2013/P10 spike protein (1-1386)(I1076P_L1077P), MHV/S spike protein (1-1361)(A1073P_L1074P).

[0912] In embodiments, the at least one pre-fusion stabilizing mutation of SARS-associated virus spike protein, preferably a SARS-CoV-1 spike protein comprises a cavity filling mutation.

[0913] In embodiments, the at least one pre-fusion stabilizing mutation of SARS-associated virus spike protein, preferably a SARS-CoV-1 spike protein comprises a mutated protonation site.

[0914] In embodiments, the at least one pre-fusion stabilizing mutation of the SARS-associated virus spike protein, preferably a SARS-CoV-1 spike protein comprises an artificial intramolecular disulfide bond. Such an artificial intramolecular disulfide bond can be introduced to further stabilize the membrane distal portion of the S protein (including the N-terminal region) in the pre-fusion conformation; that is, in a conformation that specifically binds to one or more pre-fusion specification antibodies, and/or presents a suitable antigenic site that is present on the pre-fusion conformation but not in the post fusion conformation of the S protein.

[0915] Preferred antigenic peptide or proteins selected or derived from a SARS-associated virus spike protein, preferably a SARS-CoV-1 spike protein as defined above are provided in Table 4 (rows 1 to 45). Therein, each row to 45 corresponds to a suitable SARS-CoV-1 constructs or a SARS-associated virus construct. Column A of Table 4 provides a short description of suitable antigen constructs. Column B of Table 4 provides protein (amino acid) SEQ ID NOs of respective antigen constructs. Column D of Table 4 provides SEQ ID NO of the corresponding G1P optimized nucleic acid coding sequences (opt1, gc). Column E of Table 4 provides SEQ ID NO of the corresponding human codon usage adapted nucleic acid coding sequences (opt 3, human).

[0916] Notably, the description of the invention explicitly includes the information provided under <223> identifier of the ST25 sequence listing of the present application. Preferred nucleic acid constructs comprising coding sequences of Table 4, e.g. mRNA sequences comprising the coding sequences of Table 4 are provided in Table 5.

TABLE 4
SARS-COV-1 and SARS-associated spike protein constructs (amino acid
sequences and nucleic acid coding sequences):

| Row | A | B | D | E |
|---|---|---|---|---|
| 1 | SARS-COV spike protein (1-1255) | 14906 | 14951 | 14996 |
| 2 | SARS-COV spike protein (1-1255)(K968P_V969P) | 14907 | 14952 | 14997 |
| 3 | SARS-COV spike protein (1-17_747-1255) | 14908 | 14953 | 14998 |
| 4 | SARS-COV/Tor2 spike protein (1-1255) | 14909 | 14954 | 14999 |
| 5 | SARS-COV/Tor2 spike protein (1-1255)(K968P_V969P) | 14910 | 14955 | 15000 |
| 6 | SARS-COV/Tor2 spike protein (variant) | 14911 | 14956 | 15001 |
| 7 | SARS-COV/Tor2 spike protein (variant) | 14912 | 14957 | 15002 |
| 8 | HCoV/OC43 spike protein (1-1353) | 14913 | 14958 | 15003 |
| 9 | HCoV/OC43 spike protein (1-1353)(A1070P_L1071P) | 14914 | 14959 | 15004 |
| 10 | HCoV/OC43/1783A_10 spike protein (1-1362) | 14915 | 14960 | 15005 |
| 11 | HCoV/OC43/1783A_10 spike protein (1-1362)(A1079P_L1080P) | 14916 | 14961 | 15006 |
| 12 | HCoV/OC43/1783A_10 spike protein (variant) | 14917 | 14962 | 15007 |
| 13 | HCoV/OC43/1783A_10 spike protein (variant) | 14918 | 14963 | 15008 |
| 14 | HCoV/HKU1/N5 spike protein (1-1351) | 14919 | 14964 | 15009 |
| 15 | HCoV/HKU1/N5 spike protein (1-1351)(N1067P_L1068P) | 14920 | 14965 | 15010 |
| 16 | HCoV/HKU1/N5 spike protein (variant) | 14921 | 14966 | 15011 |
| 17 | HCoV/HKU1/N5 spike protein (variant) | 14922 | 14967 | 15012 |
| 18 | HCoV/229E/BN1/GER/2015 spike protein (1-1171) | 14923 | 14968 | 15013 |
| 19 | HCoV/229E/BN1/GER/2015 spike protein (1-1171)(1869P_I870P) | 14924 | 14969 | 15014 |
| 20 | HCoV/229E/BN1/GER/2015 spike protein (variant) | 14925 | 14970 | 15015 |
| 21 | HCoV/229E/BN1/GER/2015 spike protein (variant) | 14926 | 14971 | 15016 |
| 22 | HCoV/NL63/RPTEC/2004 spike protein (1-1356) | 14927 | 14972 | 15017 |
| 23 | HCoV/NL63/RPTEC/2004 spike protein (1-1356)(S1052P_I1053P) | 14928 | 14973 | 15018 |
| 24 | HCoV/NL63/RPTEC/2004 spike protein (variant) | 14929 | 14974 | 15019 |
| 25 | HCoV/NL63/RPTEC/2004 spike protein (variant) | 14930 | 14975 | 15020 |
| 26 | Bat SARS-like CoV/WIV1 spike protein (1-1256) | 14931 | 14976 | 15021 |
| 27 | Bat SARS-like CoV/WVIV1 spike protein (1-1256)(K969P_V970P) | 14932 | 14977 | 15022 |
| 28 | Bat SARS-like CoV/WIV1 spike protein (variant) | 14933 | 14978 | 15023 |
| 29 | Bat SARS-like CoV/WIV1 spike protein (variant) | 14934 | 14979 | 15024 |
| 30 | BatCoV/HKU9-1 BF_0051 spike protein (1-1274) | 14935 | 14980 | 15025 |
| 31 | BatCoV/HKU9-1 BF_0051 spike protein (1-1274)(G983P_L984P) | 14936 | 14981 | 15026 |
| 32 | BatCoV/HKU9-1 BF_005l spike protein (variant) | 14937 | 14982 | 15027 |
| 33 | BatCoV/HKU9-1 BF_005l spike protein (variant) | 14938 | 14983 | 15028 |
| 34 | PDCoV/Swine/Thailand/S5011/2015 spike protein (1-1160) | 14939 | 14984 | 15029 |
| 35 | PDCoV/Swine/Thailand/S5011/2015 spike protein (1-1160)((E855P_V856P) | 14940 | 14985 | 15030 |
| 36 | PDCoV/Swine/Thailand/S5011/2015 spike protein (variant) | 14941 | 14986 | 15031 |
| 37 | PDCoV/Swine/Thailand/S5011/2015 spike protein (variant) | 14942 | 14987 | 15032 |
| 38 | PEDV/NPL-PEDv/2013/P10 spike protein (1-1386) | 14943 | 14988 | 15033 |
| 39 | PEDV/NPL-PEDv/2013/P10 spike protein (1-1386)(I1076P_L1077P) | 14944 | 14989 | 15034 |
| 40 | PEDV/NPL-PEDv/2013/P10 spike protein (variant) | 14945 | 14990 | 15035 |
| 41 | PEDV/NPL-PEDv/2013/P10 spike protein (variant) | 14946 | 14991 | 15036 |
| 42 | MHV/S spike protein (1-1361) | 14947 | 14992 | 15037 |
| 43 | MHV/S spike protein (1-1361)(A1073P_L1074P) | 14948 | 14993 | 15038 |
| 44 | MHV/S spike protein (variant) | 14949 | 14994 | 15039 |
| 45 | MHV/S spike protein (variant) | 14950 | 14995 | 15040 |

[0917] In preferred embodiments, the at least one antigenic peptide or protein selected or derived from a SARS associated virus S, preferably SARS-CoV-1 S encoded by the at least one (additional) nucleic acid comprises or consists of at least one of the amino acid sequences being identical or at least 50%, 60%, 70%, 80%, 85%, 86%, 87%, 88%, 89%, 90%, 91%, 92%, 93%, 94%, 95%, 96%, 97%, 98%, or 99% identical to any one of SEQ ID NOs: 14906-14950 or an immunogenic fragment or immunogenic variant of any of these. Further information regarding said amino acid sequences is also provided in Table 4 (see rows 1 to 45 of Column A and B), and under <223> identifier of the ST25 sequence listing of respective sequence SEQ ID NOs.

[0918] In further embodiments, the at least one antigenic peptide or protein selected or derived from SARS-CoV-1 comprises or consists of at least one of the amino acid sequences being identical or at least 50%, 60%, 70%, 80%, 85%, 86%, 87%, 88%, 89%, 90%, 91%, 92%, 93%, 94%, 95%, 96%, 97%, 98%, or 99% identical to any one of SEQ ID NOs: 29, 32 or 34 of published PCT patent application WO2017070626 or an immunogenic fragment or immunogenic variant of any of these. SEQ ID NOs: 29, 32 or 34 of WO2017070626, and the corresponding disclosure relating thereto are herewith incorporated by reference. In further embodiments, the at least one antigenic peptide or protein selected or derived from SARS-CoV-1 comprises or consists of at least one of the amino acid sequences being identical or at least 50%, 60%, 70%, 80%, 85%, 86%, 87%, 88%, 89%, 90%, 91%, 92%, 93%, 94%, 95%, 96%, 97%, 98%, or 99% identical to any one of SEQ ID NOs: 7 or 30 of published PCT patent application WO2018081318 or an immunogenic fragment or immunogenic variant of any of these. SEQ ID NOs: 7 or 30 of WO2018081318, and the corresponding disclosure relating thereto are herewith incorporated by reference. Further suitable antigenic peptide or proteins selected or derived from SARS-CoV-1 can be selected or derived from Table 12 of WO2017070626. Accordingly, the full content of Table 12 of WO2017070626 herewith incorporated by reference.

[0919] In preferred embodiments, the at least one antigenic peptide or protein (pre-fusion stabilized spike protein (S_stab)) selected or derived from a SARS associated virus, preferably a SARS-CoV-1 encoded by the at least one (additional) nucleic acid comprises or consists of at least one of the amino add sequences being identical or at least 50%, 60%, 70%, 80%, 85%, 86%, 87%, 88%, 89%, 90%, 91%, 92%, 93%, 94%, 95%, 96%, 97%, 98%, or 99% identical to any one of SEQ ID NOs: 14907, 14910, 14914, 14916, 14920, 14924, 14928, 14932, 14936, 14940, 14944, 14948, or an immunogenic fragment or immunogenic variant of any of these. Further information regarding said amino acid sequences is also provided in Table 4, and under <223> identifier of the ST25 sequence listing of respective sequence SEQ ID NOs.

[0920] According to preferred embodiments, the (additional) nucleic acid comprises at least one coding sequence encoding at least one antigenic peptide or protein derived from SARS associated virus S, preferably a SARS-CoV-1 S as defined above, or fragments and variants thereof. In that context, any coding sequence encoding at least one SARS associated virus S, preferably a SARS-CoV-1 S antigenic protein as defined herein, or fragments and variants thereof may be understood as suitable coding sequence and may therefore be comprised in the nucleic acid.

[0921] In preferred embodiments, the (additional) nucleic acid comprises or consists of at least one coding sequence encoding at least one antigenic peptide or protein selected or derived from a SARS-associated virus as defined herein, preferably encoding any one of SEQ ID NOs: 14906-14950; SEQ ID NOs: 1-152, 1448-1548 of WO2018115527; SEQ ID NOs: 29, 32 or 34 of WO2017070626; SEQ ID NOs: 7 or 30 of WO2018081318, or fragments of variants thereof. It has to be understood that, on nucleic acid level, any sequence (DNA or RNA sequence) which encodes an amino acid sequences being identical or at least 70%, 80%, 85%, 86%, 87%, 88%, 89%, 90%, 91%, 92%, 93%, 94%, 95%, 96%, 97%, 98%, or 99% identical to any one of SEQ ID NOs: 14906-14950; SEQ ID NOs: 1-152, 1448-1548 of WO2018115527; SEQ ID NOs: 29, 32 or 34 of WO2017070626; SEQ ID NOs: 7 or 30 of WO2018081318, or fragments or variants thereof, may be selected and may accordingly be understood as suitable coding sequence of the invention. Further information regarding said amino acid sequences is also provided in Table 4 (see rows 1 to 45 of Column A and B), Table 5, and under <223> identifier of the ST25 sequence listing of respective sequence SEQ ID NOs.

[0922] In preferred embodiments, the (additional) nucleic acid comprises a coding sequence that comprises at least one of the nucleic acid sequences encoding a SARS-associated virus S antigen, preferably a SARS-CoV-1 S antigen, being identical or at least 70%, 80%, 85%, 86%, 87%, 88%, 89%, 90%, 91%, 92%, 93%, 94%, 95%, 96%, 97%, 98%, or 99% identical to any one of the nucleic acid sequences selected from SEQ ID NOs: 14951-15220, or a fragment or a fragment or variant of any of these sequences. Further information regarding said nucleic acid sequences is also provided in Table 4 (see rows 1 to 45), Table 5, and under <223> identifier of the ST25 sequence listing of respective sequence SEQ ID NOs.

[0923] In preferred embodiments, the at least one coding sequence of the (additional) nucleic acid is a codon modified coding sequence as defined herein, wherein the amino acid sequence, that is the SARS-associated virus S, encoded by the at least one codon modified coding sequence, is preferably not being modified compared to the amino acid sequence encoded by the corresponding wild type or reference coding sequence.

[0924] In particularly preferred embodiments, the at least one coding sequence of the nucleic is a codon modified coding sequence, wherein the codon modified coding sequence is selected a G/C optimized coding sequence, a human codon usage adapted coding sequence, or a G/C modified coding sequence.

[0925] Preferred nucleic acid sequences, including particularly preferred mRNA sequences, are provided in Table 5 (column C and D). Therein, each row represents a specific suitable SARS-associated virus spike protein construct of the invention (compare with Table 4), wherein the description of the SARS-associated virus spike protein construct is indicated in column A of Table 5 and the SEQ ID NOs of the amino acid sequence of the respective SARS-associated virus construct is provided in column B. The corresponding SEQ ID NOs of the coding sequences encoding the respective SARS-associated virus constructs are provided in Table 4. Further information is provided under <223> identifier of the respective SEQ ID NOs in the sequence listing.

TABLE 5
Nucleic acid, preferably mRNA constructs encoding SARS-associated or SARS-COV-1 spike

| A | B | C | D |
|---|---|---|---|
| SARS-COV spike protein (1-1255) | 14906 | 15041, 15086 | 15131, 15176 |
| SARS-COV spike protein (1-1255)(K968P_V969P) | 14907 | 15042, 15087 | 15132, 15177 |
| SARS-COV spike protein (1-17_747-1255) | 14908 | 15043, 15088 | 15133, 15178 |
| SARS-COV/Tor2 spike protein (1-1255) | 14909 | 15044, 15089 | 15134, 15179 |
| SARS-COV/Tor2 spike protein (1-1255)(K968P_V969P) | 14910 | 15045, 15090 | 15135, 15180 |
| SARS-COV/Tor2 spike protein (variant) | 14911 | 15046, 15091 | 15136, 15181 |
| SARS-COV/Tor2 spike protein (variant) | 14912 | 15047, 15092 | 15137, 15182 |
| HCoV/OC43 spike protein (1-1353) | 14913 | 15048, 15093 | 15138, 15183 |
| HCoV/OC43 spike protein (1-1353)(A1070P_L1071P) | 14914 | 15049, 15094 | 15139, 15184 |
| HCoV/OC43/1783A_10 spike protein (1-1362) | 14915 | 15050, 15095 | 15140, 15185 |
| HCoV/OC43/1783A_10 spike protein (1-1362)(A1079P_L1080P) | 14916 | 15051, 15096 | 15141, 15186 |
| HCoV/OC43/1783A_10 spike protein (variant) | 14917 | 15052, 15097 | 15142, 15187 |
| HCoV/OC43/1783A_10 spike protein (variant) | 14918 | 15053, 15098 | 15143, 15188 |
| HCoV/HKU1/N5 spike protein (1-1351) | 14919 | 15054, 15099 | 15144, 15189 |
| HCoV/HKU1/N5 spike protein (1-1351)(N1067P_L1068P) | 14920 | 15055, 15100 | 15145, 15190 |
| HCOV/HKU1/N5 spike protein (variant) | 14921 | 15056, 15101 | 15146, 15191 |
| HCoV/HKU1/N5 spike protein (variant) | 14922 | 15057, 15102 | 15147, 15192 |
| HCoV/229E/BN1/GER/2015 spike protein (1-1171) | 14923 | 15058, 15103 | 15148, 15193 |
| HCoV/229E/BN1/GER/2015 spike protein (1-1171)(I869P_I870P) | 14924 | 15059, 15104 | 15149, 15194 |
| HCoV/229E/BN1/GER/2015 spike protein (variant) | 14925 | 15060, 15105 | 15150, 15195 |
| HCoV/229E/BN1/GER/2015 spike protein (variant) | 14926 | 15061, 15106 | 15151, 15196 |
| HCoV/NL63/RPTEC/2004 spike protein (1-1356) | 14927 | 15062, 15107 | 15152, 15197 |
| HCoV/NL63/RPTEC/2004 spike protein (1-1356)(S1052P_I1053P) | 14928 | 15063, 15108 | 15153, 15198 |
| HCoV/NL63/RPTEC/2004 spike protein (variant) | 14929 | 15064, 15109 | 15154, 15199 |
| HCoV/NL63/RPTEC/2004 spike protein (variant) | 14930 | 15065, 15110 | 15155, 15200 |
| Bat SARS-like CoV/WIV1 spike protein (1-1256) | 14931 | 15066, 15111 | 15156, 15201 |
| Bat SARS-like CoV/WIV1 spike protein (1-1256)(K969P_V970P) | 14932 | 15067, 15112 | 15157, 15202 |
| Bat SARS-like CoV/WIV1 spike protein (variant) | 14933 | 15068, 15113 | 15158, 15203 |
| Bat SARS-like CoV/WVIV1 spike protein (variant) | 14934 | 15069, 15114 | 15159, 15204 |
| BatCoV/HKU9-1 BF_0051 spike protein (1-1274) | 14935 | 15070, 15115 | 15160, 15205 |
| BatCoV/HKU9-1 BF_0051 spike protein (1-1274)(G983P_L984P) | 14936 | 15071, 15116 | 15161, 15206 |
| BatCoV/HKU9-1 BF_0051 spike protein (variant) | 14937 | 15072, 15117 | 15162, 15207 |
| BatCoV/HKU9-1 BF_0051 spike protein (variant) | 14938 | 15073, 15118 | 15163, 15208 |
| PDCoV/Swine/Thailand/S5011/2015 spike protein (1-1160) | 14939 | 15074, 15119 | 15164, 15209 |
| PDCoV/Swine/Thailand/S5011/2015 spike protein (1-1160)((E855P_V856P) | 14940 | 15075, 15120 | 15165, 15210 |
| PDCoV/Swine/Thailand/S5011/2015 spike protein (variant) | 14941 | 15076, 15121 | 15166, 15211 |
| PDCoV/Swine/Thailand/S5011/2015 spike protein (variant) | 14942 | 15077, 15122 | 15167, 15212 |
| PEDV/NPL-PEDv/2013/P10 spike protein (1-1386) | 14943 | 15078, 15123 | 15168, 15213 |
| PEDV/NPL-PEDv/2013/P10 spike protein (1-1386)(I1076P_L1077P) | 14944 | 15079, 15124 | 15169, 15214 |
| PEDV/NPL-PEDv/2013/P10 spike protein (variant) | 14945 | 15080, 15125 | 15170, 15215 |
| PEDV/NPL-PEDv/2013/P10 spike protein (variant) | 14946 | 15081, 15126 | 15171, 15216 |
| MHV/S spike protein (1-1361) | 14947 | 15082, 15127 | 15172, 15217 |
| MHV/S spike protein (1-1361)(A1073P_L1074P) | 14948 | 15083, 15128 | 15173, 15218 |
| MHV/S spike protein (variant) | 14949 | 15084, 15129 | 15174, 15219 |
| MHV/S spike protein (variant) | 14950 | 15085, 15130 | 15175, 15220 |

[0926] In preferred embodiments, the (additional) nucleic acid, preferably the RNA, comprises or consists of a nucleic acid sequence encoding a SARS-associated virus spike protein which is identical or at least 70%, 80%, 85%, 86%, 87%, 88%, 89%, 90%, 91%, 92%, 93%, 94%, 95%, 96%, 97%, 98%, or 99% identical to a nucleic acid sequence selected from SEQ ID NOs: 15041-15220 or a fragment or variant of any of these sequences. Further information regarding respective nucleic acid sequences is provided under <223> identifier of the respective SEQ ID NO in the sequence listing, and in Table 5 (see in particular Column C and D). Optionally, said nucleic acid sequences comprise a cap1 structure as defined herein, and/or at least one, preferably all uracil nucleotides in said RNA sequences are replaced by pseudouridine (ψ) nucleotides and/or N1-methylpseudouridine (m1ψ) nucleotides.

[0927] Nucleic Acid Encoding MERS-CoV Spike Protein

[0928] In a particularly preferred embodiment, the Coronavirus spike protein (S) is selected or derived from at least one MERS-associated virus spike protein, preferably a MERS-CoV spike protein (S1, S2, or S1 and S2), or an immunogenic fragment or immunogenic variant thereof.

[0929] In a particularly preferred embodiment, the Coronavirus spike protein (S) is selected from a MERS-CoV virus.

[0930] It has to be understood that generic embodiments and features that have been described paragraph “Nucleic acid encoding a Coronavirus spike protein” may also apply to a nucleic acid encoding a MERS-CoV spike protein.

[0931] Suitable antigenic peptide or protein sequences that are provided by the (additional) nucleic acid are disclosed in Table 6, rows 1 to 16, Column A and B. In addition, further information regarding said suitable antigenic peptide or protein sequences selected or derived from MERS-associated virus, preferably a MERS-CoV are provided under <223> identifier of the ST25 sequence listing.

[0932] In particularly preferred embodiments, the encoded at least one antigenic peptide or protein comprises or consists of a MERS-associated virus spike protein (S), preferably a MERS-CoV spike protein (S), wherein the spike protein (S) comprises or consists of a spike protein fragment S1, or an immunogenic fragment or immunogenic variant thereof.

[0933] In particularly preferred embodiments, the encoded at least one antigenic peptide or protein comprises or consists of a full-length MERS-associated virus spike protein (S), preferably a MERS-CoV spike protein (S) or an immunogenic fragment or immunogenic variant of any of these.

[0934] In particularly preferred embodiments, the MERS-associated virus spike protein (S), preferably a MERS-CoV spike protein (S) that is provided by the nucleic acid is designed or adapted to stabilize the antigen in pre-fusion conformation. A pre-fusion conformation is particularly advantageous in the context of an efficient Coronavirus vaccine, as several potential epitopes for neutralizing antibodies may merely be accessible in said pre-fusion protein conformation. Furthermore, remaining of the protein in the pre-fusion conformation is aimed to avoid immunopathological effects, like e.g. enhanced disease and/or antibody dependent enhancement (ADE).

[0935] Accordingly, in preferred embodiments, the (additional) nucleic acid of comprises at least one coding sequence encoding at least one antigenic peptide or protein that is selected or derived from an MERS-associated virus spike protein (S), preferably a MERS-CoV-1 spike protein (S), wherein the spike protein (S) is a pre-fusion stabilized spike protein (S_stab). Suitably, said pre-fusion stabilized spike protein comprises at least one pre-fusion stabilizing mutation.

[0936] Stabilization of the MERS-CoV spike protein may be obtained by substituting at least one amino acids at position V1060 and/or L1061 with amino acids that stabilize the spike protein in a perfusion conformation (amino acid positions according to reference SEQ ID NO: 14794).

[0937] In embodiments, the pre-fusion stabilizing mutation of MERS-CoV spike protein comprises an amino acid substitution at position V1060, wherein the amino acids V1060 is substituted with one selected from A, I, L, M, F, V, G, or P (amino acid positions according to reference SEQ ID NO: 14794), preferably wherein the amino acids V1060 is substituted with P. In embodiments, the pre-fusion stabilizing mutation comprises an amino acid substitution at position L1061, wherein the amino acids L1061 is substituted with one selected from A, I, L, M, F, V, G, or P (amino acid positions according to reference SEQ ID NO: 14794), preferably wherein the amino acids L1061 is substituted with P.

[0938] Accordingly, in preferred embodiments, the pre-fusion stabilized spike protein (S_stab) of MERS-CoV comprises at least one pre-fusion stabilizing mutation, wherein the at least one pre-fusion stabilizing mutation comprises the following amino acid substitutions: V1060P and L1061P (amino acid positions according to reference SEQ ID NO: 14794).

[0939] Any MERS-CoV spike protein or fragments or variants thereof can be chosen by the skilled person to introduce such amino acid changes, preferably amino acid substitutions: V1060P and L1061P (amino acid positions according to reference SEQ ID NO: 14794).

[0940] Any MERS-CoV spike protein or fragments or variants thereof can be chosen by the skilled person to introduce such amino acid changes (e.g. such a double Proline mutation). Examples comprise MERS-CoV/MERS-CoV-Jeddah-human-1 spike protein (1-1353)(V1060P_L1061P), MERS-CoV/AI-Hasa_4_2013 spike protein (1-1353)(V1060P_L1061P), MERS-CoV/Riyadh_14_2013 spike protein (1-1353)(V1060P_L1061P), MERS-CoV/England 1 spike protein (1-1353)(V1060P_L1061P).

[0941] In embodiments, the at least one pre-fusion stabilizing mutation of MERS-CoV spike protein comprises a cavity filling mutation. In some embodiments, the cavity filling substitutions to stabilize the MERS-CoV S ectodomain the prefusion conformation, may be selected from the following amino acid substitutions: N1072F and A1083I; N1072F and L1086F; N1072F and V1087I; N1072F and E1090I; T1076F and A1083I; T1076F and L1086F; T1076F and V1087I; T1076F and EI 0901; T1076I and A1083I; T1076I and L1086F; T1076I and V1087I; T1076I and E10901; A1018V; or A1018I.

[0942] In embodiments, the at least one pre-fusion stabilizing mutation of MERS-CoV spike protein comprises a mutated protonation site (R1020Q).

[0943] In embodiments, the at least one pre-fusion stabilizing mutation of MERS-CoV spike protein comprises a repacking substitution to stabilize the S ectodomain the prefusion conformation, such as one of: E793M and K1102F; E793M, K1102F, and H1138F; D1068M and R1069W; A1083L; A1083L and V1087I; A1083L, V1087, and E1090L; A834L and Q1084M; Q1066M; S454F; R921W; S612F and G1052F; or P476V, T477A, and R1057W.

[0944] In embodiments, the at least one pre-fusion stabilizing mutation of the MERS-CoV spike protein comprises an artificial intramolecular disulfide bond. Such an artificial intramolecular disulfide bond can be introduced to further stabilize the membrane distal portion of the MERS-CoV spike protein (including the N-terminal region) in the pre-fusion conformation; that is, in a conformation that specifically binds to one or more pre-fusion specification antibodies, and/or presents a suitable antigenic site that is present on the pre-fusion conformation but not in the post fusion conformation of the MERS-CoV spike protein.

[0945] In some embodiments, the disulfide bond substitutions to stabilize the MERS-CoV S ectodomain the prefusion conformation, may be selected from the following amino acid substitutions: T63C and V631C; T63C and Q638C; Q733C and D940C; S676C and D910C; V1087C (which forms a disulfide bond with a cysteine present in the native sequence); A432C and L1058C; or A432C and D1059C to stabilize the S ectodomain the prefusion conformation.

[0946] Preferred antigenic peptide or proteins selected or derived from a MERS-CoV as defined above are provided in Table 6 (rows 1 to 16). Therein, each row 1 to 16 corresponds to a suitable MERS-CoV S constructs. Column A of Table 6 provides a short description of suitable MERS-CoV S antigen constructs. Column B of Table 6 provides protein (amino acid) SEQ ID NOs of respective MERS-CoV S constructs. Column D of Table 6 provides SEQ ID NO of the corresponding G/C optimized nucleic acid coding sequences (opt1, gc). Column E of Table 6 provides SEQ ID NO of the corresponding human codon usage adapted nucleic acid coding sequences (opt 3, human).

[0947] Notably, the description of the invention explicitly includes the information provided under <223> identifier of the ST25 sequence listing of the present application. Preferred nucleic acid constructs comprising coding sequences of Table 6, e.g. mRNA sequences comprising the coding sequences of Table 6 are provided in Table 7.

TABLE 6
Preferred MERS-COV constructs (amino acid sequences and nucleic acid coding sequences);

| row | A | B | D | E |
|---|---|---|---|---|
| 1 | MERS-COV/MERS-COV-Jeddah-human-1 spike protein (1-1353) | 14794 | 14810 | 14826 |
| 2 | MERS-COV/MERS-COV-Jeddah-human-1 | 14795 | 14811 | 14827 |
| | spike protein (1-1353)(V1060P_L1061P) | | | |
| 3 | MERS-COV/Al-Hasa_4_2013 spike protein (1-1353) | 14796 | 14812 | 14828 |
| 4 | MERS-COV/Al-Hasa_4_2013 spike protein (1-1353)(V1060P_L1061P) | 14797 | 14813 | 14829 |
| 5 | MERS-COV/Riyadh_14_2013 spike protein (1-1353) | 14798 | 14814 | 14830 |
| 6 | MERS-COV/Riyadh_14_2013 spike protein (1-1353)(V1060P_L1061P) | 14799 | 14815 | 14831 |
| 7 | MERS-COV/Riyadh_14_2013 spike protein (1-1353)(R1020Q) | 14800 | 14816 | 14832 |
| 8 | MERS-COV/Riyadh_14_2013 spike protein (1-17_726-1296)(R1020Q) | 14801 | 14817 | 14833 |
| 9 | MERS-COV/Riyadh_14_2013 spike protein (1-17_726- | 14802 | 14818 | 14834 |
| | 1296)(R1020Q)_LeucineZipper | | | |
| 10 | MERS-COV/England 1 spike protein (1-1353) | 14803 | 14819 | 14835 |
| 11 | MERS-COV/England 1 spike protein (1-1353)(V1060P_L1061P) | 14804 | 14820 | 14836 |
| 12 | MERS-COV/England 1 spike protein (variant) | 14805 | 14821 | 14837 |
| 13 | MERS-COV/England 1 spike protein (variant) | 14806 | 14822 | 14838 |
| 14 | MERS-COV/England 1 spike protein (variant) | 14807 | 14823 | 14839 |
| 15 | MERS-COV/England 1 spike protein (variant) | 14808 | 14824 | 14840 |
| 16 | MERS-COV/England 1 spike protein (variant) | 14809 | 14825 | 14841 |

[0948] In preferred embodiments, the at least one antigenic peptide or protein selected or derived from MERS-CoV spike protein encoded by the at least one nucleic acid comprises or consists of at least one of the amino acid sequences being identical or at least 50%, 60%, 70%, 80%, 85%, 86%, 87%, 88%, 89%, 90%, 91%, 92%, 93%, 94%, 95%, 96%, 97%, 98%, or 99% identical to any one of SEQ ID NOs: 14794-14809 or an immunogenic fragment or immunogenic variant of any of these. Further information regarding said amino acid sequences is also provided in Table 6 (see rows 1 to 16 of Column A and B), and under <223> identifier of the ST25 sequence listing of respective sequence SEQ ID NOs.

[0949] In further embodiments, the at least one antigenic peptide or protein selected or derived from at least one MERS-CoV spike comprises or consists of at least one of the amino acid sequences being identical or at least 70%, 80%, 85%, 86%, 87%, 88%, 89%, 90%, 91%, 92%, 93%, 94%, 95%, 96%, 97%, 98%, or 99% identical to any one of SEQ ID NOs: 1-152 or 1448 to 1548 of published PCT application WO2018115527, or an immunogenic fragment or immunogenic variant of any of these. Accordingly, SEQ ID NOs: 1-152 or 1448 to 1548 of WO2018115527 and the corresponding disclosure relating thereto (e.g. information in the respective sequence listing, column 1 or 2 of Tables 1-4 and Table 7) are herewith incorporated by reference. In further embodiments, the at least one antigenic peptide or protein selected or derived from at least one MERS-CoV spike comprises or consists of at least one of the amino acid sequences being identical or at least 70%, 80%, 85%, 86%, 87%, 88%, 89%, 90%, 91%, 92%, 93%, 94%, 95%, 96%, 97%, 98%, or 99% identical to any one of SEQ ID NOs: 2-4, 28-29 of published PCT application WO2018081318, or an immunogenic fragment or immunogenic variant of any of these. Accordingly, SEQ ID NOs: 2-4, 28-29 of WO2018081318 and the corresponding disclosure relating thereto are herewith incorporated by reference. In further embodiments, the at least one antigenic peptide or protein selected or derived from at least one MERS-CoV spike comprises or consists of at least one of the amino acid sequences being identical or at least 70%, 80%, 85%, 86%, 87%, 88%, 89%, 90%, 91%, 92%, 93%, 94%, 95%, 96%, 97%, 98%, or 99% identical to any one of SEQ ID NO: 24-28 or 33 of published PCT application WO2017070626, or an immunogenic fragment or immunogenic variant of any of these. Accordingly, SEQ ID NO: 24-28 or 33 of WO2017070626 and the corresponding disclosure relating thereto are herewith incorporated by reference. Further suitable antigenic peptide or proteins selected or derived from MERS-CoV spike can be selected or derived from Table 12 of WO2017070626. Accordingly, the full content of Table 12 of WO2017070626 herewith incorporated by reference.

[0950] In preferred embodiments, the at least one antigenic peptide or protein (pre-fusion stabilized spike protein (S_stab)) selected or derived from MERS-CoV encoded by the at least one (additional) nucleic acid comprises or consists of at least one of the amino acid sequences being identical or at least 50%, 60%, 70%, 80%, 85%, 86%, 87%, 88%, 89%, 90%, 91%, 92%, 93%, 94%, 95%, 96%, 97%, 98%, or 99% identical to any one of SEQ ID NOs: 14795, 14797, 14799-14802, 14804 or an immunogenic fragment or immunogenic variant of any of these. Further information regarding said amino acid sequences is also provided in Table 6 (Column A and B), and under <223> identifier of the ST25 sequence listing of respective sequence SEQ ID NOs.

[0951] According to preferred embodiments, the (additional) nucleic acid comprises at least one coding sequence encoding at least one antigenic peptide or protein derived from MERS-CoV as defined above, or fragments and variants thereof. In that context, any coding sequence encoding at least one MERS-CoV antigenic protein as defined herein, or fragments and variants thereof may be understood as suitable coding sequence and may therefore be comprised in the nucleic acid.

[0952] In preferred embodiments, the (additional) nucleic acid comprises or consists of at least one coding sequence encoding at least one antigenic peptide or protein selected or derived from a MERS-CoV as defined herein, preferably encoding any one of SEQ ID NOs: 14794-14809; SEQ ID NOs: 1-152, 1448-1548 of WO2018115527; SEQ ID NOs: 2-4, 28-29 of WO2018081318; SEQ ID NO: 24-28 or 33 of WO2017070626, or fragments of variants thereof. It has to be understood that, on nucleic acid level, any sequence (DNA or RNA sequence) which encodes an amino acid sequences being identical or at least 70%, 80%, 85%, 86%, 87%, 88%, 89%, 90%, 91%, 92%, 93%, 94%, 95%, 96%, 97%, 98%, or 99% identical to any one of SEQ ID NOs: 14794-14809; SEQ ID NOs: 1-152, 1448-1548 of WO2018115527; SEQ ID NOs: 2-4, 28-29 of WO2018081318; SEQ ID NO: 24-28 or 33 of WO2017070626, or fragments or variants thereof, may be selected and may accordingly be understood as suitable coding sequence of the invention. Further information regarding said amino acid sequences is also provided in Table 6, Table 7, and under <223> identifier of the ST25 sequence listing of respective sequence SEQ ID NOs.

[0953] In preferred embodiments, the (additional) nucleic acid comprises a coding sequence that comprises at least one of the nucleic acid sequences encoding a MERS-CoV spike antigen being identical or at least 70%, 80%, 85%, 86%, 87%, 88%, 89%, 90%, 91%, 92%, 93%, 94%, 95%, 96%, 97%, 98%, or 99% identical to any one of the nucleic acid sequences SEQ ID NOs: 14810-14905 or a fragment or a fragment or variant of any of these sequences. Further information regarding said nucleic acid sequences is also provided in Table 6, Table 7, and under <223> identifier of the ST25 sequence listing of respective sequence SEQ ID NOs.

[0954] In further embodiments, the at least one coding sequence of the at least one (additional) nucleic acid comprises or consists at least one nucleic acid sequence encoding a MERS-CoV spike antigen being identical or at least 70%, 80%, 85%, 86%, 87%, 88%, 89%, 90%, 91%, 92%, 93%⁰, 94%, 95%, 96%, 97%, 98%, or 99% identical to any one of the nucleic acid sequences SEQ ID NO: 153-304 or 1549-1649, 305-1368,1650-2356, 2365, 2366, 2373-2378 of published PCT application WO2018115527, or an immunogenic fragment or immunogenic variant of any of these. Notably, SEQ ID NO: 153-304 or 1549-1649, 305-1368, 1650-2356, 2365, 2366, 2373-2378 of WO2018115527 and the corresponding disclosure relating thereto (e.g. information in the respective sequence listing, column 4 or 4 of Tables 1-4 and Table 7) are herewith incorporated by reference. In further embodiments, the at least one coding sequence of the at least one (additional) nucleic acid comprises or consists at least one nucleic acid sequence encoding a MERS-CoV spike antigen being identical or at least 70%, 80%, 85%, 86%, 87%, 88%, 89%, 90%, 91%, 92%, 93%, 94%, 95%, 96%, 97%, 98%, or 99% identical to any one of the nucleic acid sequences SEQ ID NO: 20-23, 65-68 of published PCT application WO2017070626, or an immunogenic fragment or immunogenic variant of any of these. Notably, SEQ ID NO: 20-23, 65-68 of WO2017070626 and the corresponding disclosure relating thereto (e.g. information in the respective sequence listing, Tables 1-4 and Table 7) are herewith incorporated by reference.

[0955] In preferred embodiments, the at least one coding sequence of the (additional) nucleic acid is a codon modified coding sequence as defined herein, wherein the amino acid sequence, that is the MERS-CoV peptide or protein, encoded by the at least one codon modified coding sequence, is preferably not being modified compared to the amino acid sequence encoded by the corresponding wild type or reference coding sequence.

[0956] In particularly preferred embodiments, the at least one coding sequence of the (additional) nucleic acid is a codon modified coding sequence, wherein the codon modified coding sequence is selected a G/C optimized coding sequence, a human codon usage adapted coding sequence, or a G/C modified coding sequence.

[0957] Preferred nucleic acid sequences, including particularly preferred mRNA sequences, are provided in Table 7 (column C and D). Therein, each row represents a specific suitable MERS-CoV spike construct of the invention (compare with Table 6), wherein the description of the MERS-CoV spike construct is indicated in column A of Table 7 and the SEQ ID NOs of the amino acid sequence of the respective MERS-CoV spike construct is provided in column B. The corresponding SEQ ID NOs of the coding sequences encoding the respective MERS-CoV spike constructs are provided in in Table 6. Further information is provided under <223> identifier of the respective SEQ ID NOs in the sequence listing.

TABLE 7
Nucleic acid, preferably mRNA constructs encoding MERS-COV spike

| A | B | C | D |
|---|---|---|---|
| MERS-COV/MERS-COV-Jeddah-human-1 spike protein (1-1353) | 14794 | 14842, 14858 | 14874, 14890 |
| MERS-COV/MERS-COV-Jeddah-human-1 spike protein (1- | 14795 | 14843, 14859 | 14875, 14891 |
| 1353)(V1060P_L1061P) | | | |
| MERS-COV/AI-Hasa_4_2013 spike protein (1-1353) | 14796 | 14844, 14860 | 14876, 14892 |
| MERS-COV/Al-Hasa_4_2013 spike protein (1-1353)(V1060P_L1061P) | 14797 | 14845, 14861 | 14877, 14893 |
| MERS-COV/Riyadh_14_2013 spike protein (1-1353) | 14798 | 14846, 14862 | 14878, 14894 |
| MERS-COV/Riyadh_14_2013 spike protein (1-1353)(V1060P_L1061P) | 14799 | 14847, 14863 | 14879, 14895 |
| MERS-COV/Riyadh_14_2013 spike protein (1-1353)(R1020Q) | 14800 | 14848, 14864 | 14880, 14896 |
| MERS-COV/Riyadh_14_2013 spike protein (1-17_726-1296)(R1020Q) | 14801 | 14849, 14865 | 14881, 14897 |
| MERS-COV/Riyadh_14_2013 spike protein (1-17_726- | 14802 | 14850, 14866 | 14882, 14898 |
| 1296)(R1020Q)_LeucineZipper | | | |
| MERS-COV/England 1 spike protein (1-1353) | 14803 | 14851, 14867 | 14883, 14899 |
| MERS-COV/England 1 spike protein (1-1353)(V1060P_L1061P) | 14804 | 14852, 14868 | 14884, 14900 |
| MERS-COV/England 1 spike protein (variant) | 14805 | 14853, 14869 | 14885, 14901 |
| MERS-COV/England 1 spike protein (variant) | 14806 | 14854, 14870 | 14886, 14902 |
| MERS-COV/England 1 spike protein (variant) | 14807 | 14855, 14871 | 14887, 14903 |
| MERS-COV/England 1 spike protein (variant) | 14808 | 14856, 14872 | 14888, 14904 |
| MERS-COV/England 1 spike protein (variant) | 14809 | 14857, 14873 | 14889, 14905 |

[0958] In preferred embodiments, the (additional) nucleic acid, preferably the RNA, comprises or consists of a nucleic acid sequence encoding a MERS-CoV spike protein which is identical or at least 70%, 80%, 85%, 86%, 87%, 88%, 89%, 90%, 91%, 92%, 93%, 94%, 95%, 96%, 97%, 98%, or 99% identical to a nucleic acid sequence seceded from SEQ ID NOs: 14842-14905 or a fragment or variant of any of these sequences. Further information regarding respective nucleic acid sequences is provided under <223> identifier of the respective SEQ ID NO in the sequence listing, and in Table 7 (see in particular Column C and D). Optionally, said nucleic acid sequences comprise a cap1 structure as defined herein, and/or at least one, preferably all uracil nucleotides in said RNA sequences are replaced by pseudouridine (ψ) nucleotides and/or N1-methylpseudouridine (m1ψ) nucleotides

[0959] In further embodiments, the (additional) nucleic acid, preferably the RNA, comprises or consists of a nucleic acid sequence encoding a MERS-CoV spike protein which is identical or at least 70%, 80%, 85%, 86%, 87%, 88%, 89%, 90%, 91%, 92%, 93%, 94%, 95%, 96%, 97%, 98%, or 99% identical to a nucleic acid sequence selected from SEQ ID NOs: 2373-2378 of WO2018115527 and SEQ ID NOs: 65-68 of WO2017070626, or a fragment or variant of any of these sequences. Further information regarding respective nucleic acid sequences is provided under <223> identifier of the respective SEQ ID NOs in the sequence listing of WO2018115527 or WO2017070626, and in Tables 1-4 and Table 7 of WO2018115527. Optionally, said nucleic acid sequences comprise a cap1 structure as defined herein, and/or at least one, preferably all uracil nucleotides in said RNA sequences are replaced by pseudouridine (ψ) nucleotides and/or N1-methylpseudouridine (m1ψ) nucleotides.

[0960] Combinations of M, N, NSP3, NSP4, NSP6, NSP13, NSP14, ORF3A, ORF8, E and/or S (Multivalent Composition)

[0961] In preferred embodiments, the pharmaceutical composition comprises at least two nucleic acids, wherein the at least two nucleic acids are selected from (a) at least one nucleic acid encoding Coronavirus M, N, M, N, NSP3, NSP4, NSP6, NSP13, NSP14, ORF3A, ORF8, E (as defined herein), and (b) at least one (additional) nucleic acid encoding Coronavirus S.

[0962] Accordingly, in embodiments, the pharmaceutical composition comprises 2, 3, 4, 5, 6, 7, or more of M, N, NSP3, NSP4, NSP6, NSP13, NSP14, ORF3A, ORF8, E, additionally comprising S, wherein the antigenic peptide or proteins are selected or derived from the same Coronavirus, preferably from SARS-CoV-2 or a SARS-Cov-2 variant.

[0963] In embodiments, the pharmaceutical composition comprises 2, 3, 4, 5, 6, 7, or more of M, N, NSP3, NSP4, NSP6, NSP13, NSP14, ORF3A, ORF8, E, additionally comprising S, wherein the antigenic peptide or proteins are selected or derived from different Coronaviruses, preferably different pandemic Coronaviruses, e.g. SARS-CoV-2, SARS-CoV-1, and/or MERS-CoV or more preferably derived from different SARS-CoV-2 and SARS-CoV-2 variants.

[0964] Suitable combinations of the above mentioned nucleic acids encoding Coronavirus antigens, preferably SARS-CoV-2 or SARS-CoV2 variant antigens, are provided in the following.

[0965] In preferred embodiments, the pharmaceutical composition comprises at least two nucleic acid sequences (encoding M, N, NSP3, NSP4, NSP6, NSP13, NSP14, ORF3A, ORF8, E, and/or S) according to the following combinations:
[0966] M and S; N and S; NSP3 and S; NSP4 and S; NSP6 and S; NSP14 and S; NSP14 and S, ORF3A and S; or ORF8 and S.

[0967] In preferred embodiments, the pharmaceutical composition comprises at least three nucleic acid sequences (encoding M, N, NSP3, NSP4, NSP6, NSP13, NSP14, ORF3A, ORF8, and/or S) according to the following combinations:
[0968] M and N and S; M and NSP3 and S; M and NSP4 and S; M and NSP6 and S; M and SNP13 and S; M and SNSP14 and S; M and ORF3A and S; M and ORF8 and S; N and NSP3 and S; N and NSP4 and S; N and NSP6 and S; N and NSP13 and S; N and NSP14 and S; N and ORF3A and S; N and ORF8 and S; NSP3 and NSP4 and S; NSP3 and NSP6 and S; NSP3 and NSP13 and S; NSP3 and NSP14 and S; NSP3 and ORF3A and S; NSP3 and ORF8 and S; NSP4 and NSP6 and S; NSP4 and NSP13 and S; NSP4 and NSP14 and S; NSP4 and ORF3A and S; NSP4 and ORF8 and S; NSP6 and NSP13 and S; NSP6 and NSP14 and S; NSP6 and ORF3A and S; NSP6 and ORF8 and S; NSP13 and NSP14 and S; NSP13 and ORF3A and S; NSP13 and ORF8 and S; NSP14 and ORF3A and S; NSP14 and ORF8 and S; or ORF3A and ORF8 and S.

[0969] In preferred embodiments, the pharmaceutical composition comprises at least four nucleic acid sequences (encoding M, N, NSP3, NSP4, NSP6, NSP13 and NSP14, ORF3A, ORF8, and/or S) according to the following combinations:
[0970] M and N and NSP3 and S; M and N and NSP4 and S; M and N and NSP6 and S; M and N and NSP13 and S; M and N and NSP14 and S; M and N and ORF3A and S; M and N and ORF8 and S; M and NSP3 and NSP4 and S; M and NSP3 and NSP6 and S; M and NSP3 and NSP13 and S; M and NSP3 and NSP14 and S; M and NSP3 and ORF3A and S; M and NSP3 and ORF8 and S; M and NSP4 and NSP6 and S; M and NSP4 and SNP13 and S; M and NSP4 and NSP14 and S; M and NSP4 and ORF3A and S; M and NSP4 and ORF8 and S; M and NSP6 and NSP13 and S; M and NSP6 and NSP14 and S; M and NSP6 and ORF3A and S; M and NSP6 and ORF8 and S; M and NSP13 and NSP14 and S; M and NSP13 and ORF3a and S; M and NSP13 and ORF8 and S; M and NSP14 and ORF3A and S; M and NSP14 and ORF8 and S; M and ORF3A and ORF8 and S; N and NSP3 and NSP4 and S; N and NSP3 and NSP6 and S; N and NSP3 and NSP13 and S; N and NSP3 and NSP14 and S; N and NSP3 and ORF3A and S; N and NSP3 and ORF8 and S; N and NSP4 and NSP6 and S; N and NSP4 and NSP13 and S; N and NSP4 and NSP14 and S; N and NSP4 and ORF3A and S; N and NSP4 and ORF8 and S; N and NSP6 and ORF3A and S; N and NSP6 and ORF8 and S; N and NSP6 and NSP13 and S; N and NSP6 and NSP14 and S; N and NSP13 and NSP14 and S; N and NSP13 and ORF3A and S; N and NSP13 and ORF8 and S; N and NSP14 and ORF3a and S; N and NSP14 and ORF8 and S; N and ORF3A and ORF8 and S; NSP3 and NSP4 and NSP6 and S; NSP3 and NSP4 and NSP13 and S; NSP3 and NSP4 and NSP14 and S; NSP3 and NSP4 and ORF3A and S; NSP3 and NSP4 and ORF8 and S; NSP3 and NSP6 and NSP13 and S; NSP3 and NSP6 and NSP14 and S; NSP3 and NSP6 and ORF3A and S; NSP3 and NSP6 and ORF8 and S; NSP3 and NSP13 and NSP14 and S; NSP3 and NSP13 and ORF3A and S; NSP3 and NSP13 and ORF8 and S; NSP3 and ORF3A and ORF8 and S; NSP4 and NSP6 and NSP13 and S; NSP4 and NSP6 and NSP14 and S; NSP4 and NSP6 and ORF3A and S; NSP4 and NSP6 and ORF8 and S; NSP4 and NSP13 and NSP14 and S; NSP4 and NSP13 and ORF3A and S; NSP4 and NSP13 an ORF8 and S; NSP4 and NSP14 and ORF3A and S; NSP4 and NSP14 and ORF8 and S; NSP4 and ORF3A and ORF8 and S; NSP6 and NSP13 and NSP14 and S; NSP6 and NSP13 and ORF3A and S; NSP6 and NSP13 and ORF8 and S; NSP6 and NSP14 and ORF3A and S; NSP6 and NSP14 and ORF8 and S; NSP6 and ORF3A and ORF8 and S; NSP13 and NSP14 and ORF3A and S; NSP13 and NSP14 and ORF8 and S; NSP13 and ORF3A and ORF8 and S; NSP14 and ORF3A and ORF8 and S.

[0971] In preferred embodiments, the pharmaceutical composition comprises at least five nucleic acid sequences (encoding M, N, NSP3, NSP4, NSP6, NSP13, NSP14, ORF3A, ORF8, and/or S) according to the following combinations:
[0972] NSP3 and NSP4 and NSP6 and M and S; NSP3 and NSP4 and ORF3A and M and S;
[0973] NSP3 and NSP4 and ORF8 and M and S; NSP3 and NSP6 and ORF3A and M and S;
[0974] NSP3 and NSP6 and ORF8 and M and S; NSP3 and ORF3A and ORF8 and M and S;
[0975] NSP4 and NSP6 and ORF3A and M and S; NSP4 and NSP6 and ORF8 and M and S;
[0976] NSP4 and ORF3A and ORF8 and M and S; NSP6 and ORF3A and ORF8 and M and S;
[0977] NSP3 and NSP4 and NSP6 and N and S; NSP3 and NSP4 and ORF3A and N and S;
[0978] NSP3 and NSP4 and ORF8 and N and S; NSP3 and NSP6 and ORF3A and N and S;
[0979] NSP3 and NSP6 and ORF8 and N and S; NSP3 and ORF3A and ORF8 and N and S;
[0980] NSP4 and NSP6 and ORF3A and N and S; NSP4 and NSP6 and ORF8 and N and S; or
[0981] NSP4 and ORF3A and ORF8 and N and S; NSP6 and ORF3A and ORF8 and N and S.

[0982] In preferred embodiments, the pharmaceutical composition comprises at least six nucleic acid sequences (encoding M, N, NSP3, NSP4, NSP6, ORF3A, ORF8, and/or S) according to the following combinations:
[0983] NSP3 and NSP4 and NSP6 and M and N and S; NSP3 and NSP4 and ORF3A and M and N and S;
[0984] NSP3 and NSP4 and ORF8 and M and N and S; NSP3 and NSP6 and ORF3A and M and N and S;
[0985] NSP3 and NSP6 and ORF8 and M and N and S; NSP3 and ORF3A and ORF8 and M and N and S;
[0986] NSP4 and NSP6 and ORF3A and M and N and S; NSP4 and NSP6 and ORF8 and M and N and S; or
[0987] NSP4 and ORF3A and ORF8 and M and N and S; NSP6 and ORF3A and ORF8 and M and N and S.

[0988] Nucleic Acid Features and Embodiments:

[0989] In the following, suitable features and embodiments relating to nucleic acid comprised in the pharmaceutical composition are further specified. It has to be understood that suitable features and embodiments provided herein may relate to any of the at least one nucleic acid comprising at least one coding sequence encoding at least one antigenic peptide or protein from at least one Coronavirus M, N, non-structural protein, and/or accessory protein as defined herein. Further, suitable features and embodiments provided herein may relate to any of the at least one (additional) nucleic acid comprising at least one coding sequence encoding at least one antigenic peptide or protein selected or derived from at least one Coronavirus spike protein (S) as defined herein.

[0990] In preferred embodiments, the at least one nucleic acid is an artificial nucleic acid, e.g. an artificial DNA or an artificial RNA.

[0991] The term “artificial nucleic acid” as used herein is intended to refer to a nucleic acid that does not occur naturally. In other words, an artificial nucleic acid may be understood as a non-natural nucleic acid molecule. Such nucleic acid molecules may be non-natural due to its individual sequence (e.g. G/C content modified coding sequence, UTRs) and/or due to other modifications, e.g. structural modifications of nucleotides. Typically, artificial nucleic acid may be designed and/or generated by genetic engineering to correspond to a desired artificial sequence of nucleotides. In this context, an artificial nucleic acid is a sequence that may not occur naturally, i.e. a sequence that differs from the wild type sequence/the naturally occurring sequence or reference sequence by at least one nucleotide (via e.g. codon modification as further specified below). The term “artificial nucleic acid” is not restricted to mean “one single molecule” but is understood to comprise an ensemble of essentially identical nucleic acid molecules. Accordingly, it may relate to a plurality of essentially identical nucleic acid molecules. The term “artificial nucleic acid” as used herein may for example relate to an artificial DNA or, preferably, to an artificial RNA.

[0992] In preferred embodiments, at least one nucleic acid, e.g. the DNA or RNA, is a modified and/or stabilized nucleic acid, preferably a modified and/or stabilized artificial nucleic acid.

[0993] According to preferred embodiments, at least one nucleic acid may thus be provided as a “stabilized artificial nucleic acid” or “stabilized coding nucleic acid” that is to say a nucleic acid showing improved resistance to in vivo degradation and/or a nucleic acid showing improved stability in vivo, and/or a nucleic acid showing improved translatability in vivo. In the following, specific suitable modifications/adaptations in this context are described which are suitably to “stabilize” the nucleic acid. Preferably, the nucleic acid of the present invention may be provided as a “stabilized RNA”, “stabilized coding RNA”, “stabilized DNA” or “stabilized coding DNA”.

[0994] In the following, suitable modifications are described that are capable of “stabilizing” the at least one nucleic acid.

[0995] In preferred embodiments, the at least one nucleic acid, e.g. the RNA or DNA, comprises at least one codon modified coding sequence.

[0996] In preferred embodiments, the at least one coding sequence of the at least one nucleic acid is a codon modified coding sequence. Suitably, the amino acid sequence encoded by the at least one codon modified coding sequence is not being modified compared to the amino acid sequence encoded by the corresponding wild type coding sequence or reference coding sequence.

[0997] The term “codon modified coding sequence” relates to coding sequences that differ in at least one codon (triplets of nucleotides coding for one amino acid) compared to the corresponding wild type or reference coding sequence. Suitably, a codon modified coding sequence in the context of the invention may show improved resistance to in vivo degradation and/or improved stability in vivo, and/or improved translatability in vivo. Codon modifications in the broadest sense make use of the degeneracy of the genetic code wherein multiple codons may encode the same amino acid and may be used interchangeably (cf. Table 8 or Table 1 of WO2020002525) to optimize/modify the coding sequence for in vivo applications.

[0998] In preferred embodiments, the at least one coding sequence of the at least one nucleic acid is a codon modified coding sequence, wherein the codon modified coding sequence is selected from C maximized coding sequence, CAI maximized coding sequence, human codon usage adapted coding sequence, G/C content modified coding sequence, and G/C optimized coding sequence, or any combination thereof.

[0999] In preferred embodiments, the at least one coding sequence of the at least one nucleic acid has a G/C content of at least about 50%, 55%, or 60%. In particular embodiments, the at least one coding sequence of the nucleic acid of has a G/C content of at least about 50%, 51%, 52%, 53%, 54%, 55%, 56%, 57%, 58%, 59%, 60%, 61%, 62%, 63%, 64%, 65%, 66%, 67%, 68%, 69%, or 70%.

[1000] When transfected into mammalian host cells, the at least one nucleic acid comprising a codon modified coding sequence has a stability of between 12-18 hours, or greater than 18 hours, e.g., 24, 36, 48, 60, 72, or greater than 72 hours and are capable of being expressed by the mammalian host cell (e.g. a muscle cell).

[1001] When transfected into mammalian host cells, the at least one nucleic acid comprising a codon modified coding sequence is translated into protein, wherein the amount of protein is at least comparable to, or preferably at least 10% more than, or at least 20% more than, or at least 30% more than, or at least 40% more than, or at least 50% more than, or at least 100% more than, or at least 200% or more than the amount of protein obtained by a naturally occurring or wild type or reference coding sequence transfected into mammalian host cells.

[1002] In embodiments, the at least one nucleic acid may be modified, wherein the C content of the at least one coding sequence may be increased, preferably maximized, compared to the C content of the corresponding wild type or reference coding sequence (herein referred to as “C maximized coding sequence”). The amino acid sequence encoded by the C maximized coding sequence of the nucleic acid is preferably not modified compared to the amino acid sequence encoded by the respective wild type or reference coding sequence. The generation of a C maximized nucleic acid sequences may suitably be carried out using a modification method according to WO2015062738. In this context, the disclosure of WO2015062738 is included herewith by reference.

[1003] In preferred embodiments, the at least one nucleic acid may be modified, wherein the G/C content of the at least one coding sequence may be optimized compared to the G/C content of the corresponding wild type or reference coding sequence (herein referred to as “G/C content optimized coding sequence”). “Optimized” in that context refers to a coding sequence wherein the G/C content is preferably increased to the essentially highest possible G/C content. The amino acid sequence encoded by the G/C content optimized coding sequence of the nucleic acid is preferably not modified as compared to the amino acid sequence encoded by the respective wild type or reference coding sequence. The generation of a G/C content optimized nucleic acid sequence (RNA or DNA) may be carried out using a method according to WO2002098443. In this context, the disclosure of WO2002098443 is included in its full scope in the present invention. Throughout the description, including the <223> identifier of the sequence listing, G/C optimized coding sequences are indicated by the abbreviations “opt1” or “gc”.

[1004] In preferred embodiments, the at least one nucleic acid may be modified, wherein the codons in the at least one coding sequence may be adapted to human codon usage (herein referred to as “human codon usage adapted coding sequence”). Codons encoding the same amino acid occur at different frequencies in humans. Accordingly, the coding sequence of the nucleic acid is preferably modified such that the frequency of the codons encoding the same amino acid corresponds to the naturally occurring frequency of that codon according to the human codon usage. For example, in the case of the amino acid Ala, the wild type or reference coding sequence is preferably adapted in a way that the codon “GCC” is used with a frequency of 0.40, the codon “GCT” is used with a frequency of 0.28, the codon “GCA” is used with a frequency of 0.22 and the codon “GCG” is used with a frequency of 0.10 etc. (see Table 8). Accordingly, such a procedure (as exemplified for Ala) is applied for each amino acid encoded by the coding sequence of the nucleic acid to obtain sequences adapted to human codon usage. Throughout the description, including the <223> identifier of the sequence listing, human codon usage adapted coding sequences are indicated by the abbreviation “opt3” or “human”.

TABLE 8
Human codon usage table with frequencies indicated for each amino acid

| Amino acid | codon | frequency | Amino acid | codon | frequency |
|---|---|---|---|---|---|
| Ala | GCG | 0.10 | Pro | CCG | 0.11 |
| Ala | GCA | 0.22 | Pro | CCA | 0.27 |
| Ala | GCT | 0.28 | Pro | CCT | 0.29 |
| Ala | GCC* | 0.40 | Pro | CCC* | 0.33 |
| Cys | TGT | 0.42 | Gln | CAG* | 0.73 |
| Cys | TGC* | 0.58 | Gln | CAA | 0.27 |
| Asp | GAT | 0.44 | Arg | AGG | 0.22 |
| Asp | GAC* | 0.56 | Arg | AGA* | 0.21 |
| Glu | GAG* | 0.59 | Arg | CGG | 0.19 |
| Glu | GAA | 0.41 | Arg | CGA | 0.10 |
| Phe | TTT | 0.43 | Arg | CGT | 0.09 |
| Phe | TTC* | 0.57 | Arg | CGC | 0.19 |
| Gly | GGG | 0.23 | Ser | AGT | 0.14 |
| Gly | GGA | 0.26 | Ser | AGC* | 0.25 |
| Gly | GGT | 0.18 | Ser | TCG | 0.06 |
| Gly | GGC* | 0.33 | Ser | TCA | 0.15 |
| His | CAT | 0.41 | Ser | TCT | 0.18 |
| His | CAC* | 0.59 | Ser | TCC | 0.23 |
| Ile | ATA | 0.14 | Thr | ACG | 0.12 |
| Ile | ATT | 0.35 | Thr | ACA | 0.27 |
| Ile | ATC* | 0.52 | Thr | ACT | 0.23 |
| Lys | AAG* | 0.60 | Thr | ACC* | 0.38 |
| Lys | AAA | 0.40 | Val | GTG* | 0.48 |
| Leu | TTG | 0.12 | Val | GTA | 0.10 |
| Leu | TTA | 0.06 | Val | GTT | 0.17 |
| Leu | CTG* | 0.43 | Val | GTC | 0.25 |
| Leu | CTA | 0.07 | Trp | TGG* | 1 |
| Leu | CTT | 0.12 | Tyr | TAT | 0.42 |
| Leu | CTC | 0.20 | Tyr | TAC* | 0.58 |
| Met | ATG* | 1 | Stop | TGA* | 0.61 |
| Asn | AAT | 0.44 | Stop | TAG | 0.17 |
| Asn | AAC* | 0.56 | Stop | TAA | 0.22 |

*most frequent human codon

[1005] In embodiments, the at least one nucleic acid may be modified, wherein the G/C content of the at least one coding sequence may be modified compared to the 010 content of the corresponding wild type or reference coding sequence (herein referred to as “G/C content modified coding sequence”). In this context, the terms “G/C optimization” or “G/C content modification” relate to a nucleic acid that comprises a modified, preferably an increased number of guanosine and/or cytosine nucleotides as compared to the corresponding wild type or reference coding sequence. Such an increased number may be generated by substitution of codons containing adenosine or thymidine nucleotides by codons containing guanosine or cytosine nucleotides. Advantageously, nucleic acid sequences having an increased G/C content are more stable or show a better expression than sequences having an increased A/U. The amino acid sequence encoded by the G/C content modified coding sequence of the at least one nucleic acid is preferably not modified as compared to the amino acid sequence encoded by the respective wild type or reference sequence. Preferably, the G/C content of the coding sequence of the at least one nucleic acid is increased by at least 10%, 20%, 30%, preferably by at least 40% compared to the G/C content of the coding sequence of the corresponding wild type or reference nucleic acid sequence (herein referred to “opt 10” or “gc mod”)

[1006] In some embodiments, the at least one nucleic acid may be modified, wherein the codon adaptation index (CAI) may be increased or preferably maximised in the at least one coding sequence (herein referred to as “CAI maximized coding sequence”). It is preferred that all codons of the wild type or reference nucleic acid sequence that are relatively rare in e.g. a human are exchanged for a respective codon that is frequent in the e.g. a human, wherein the frequent codon encodes the same amino acid as the relatively rare codon. Suitably, the most frequent codons are used for each amino acid of the encoded protein (see Table 8, most frequent human codons are marked with asterisks). Suitably, the nucleic acid comprises at least one coding sequence, wherein the codon adaptation index (CAI) of the at least one coding sequence is at least 0.5, at least 0.8, at least 0.9 or at least 0.95. Most preferably, the codon adaptation index (CAI) of the at least one coding sequence is 1 (CAI=1). For example, in the case of the amino acid Ala, the wild type or reference coding sequence may be adapted in a way that the most frequent human codon “GCC” is always used for said amino acid. Accordingly, such a procedure (as exemplified for Ala) may be applied for each amino acid encoded by the coding sequence of the nucleic acid to obtain CAI maximized coding sequences.

[1007] In embodiments, the at least one nucleic acid may be modified by altering the number of A and/or U nucleotides in the nucleic acid sequence with respect to the number of A and/or U nucleotides in the original nucleic acid sequence (e.g. the wild type or reference sequence). Preferably, such an AU alteration is performed to modify the retention time of the individual nucleic acids in a composition, to (i) allow co-purification using a HPLC method, and/or to allow analysis of the obtained nucleic acid composition. Such a method is described in detail in published PCT application WO2019092153A1. Claims 1 to 70 of WO2019092153A1 herewith incorporated by reference.

[1008] In particularly preferred embodiments, the at least one coding sequence of the at least one nucleic acid is a codon modified coding sequence, wherein the codon modified coding sequence is selected from a G/C optimized coding sequence, a human codon usage adapted coding sequence, or a G/C modified coding sequence, preferably a G/C optimized coding sequence.

[1009] In preferred embodiments, the at least one nucleic acid comprises at least one heterologous untranslated region (UTR).

[1010] The term “untranslated region” or “UTR” or “UTR element” will be recognized and understood by the person of ordinary skill in the art, and are e.g. intended to refer to a part of a nucleic acid molecule typically located 5′ or 3′ of a coding sequence. An UTR is not translated into protein. An UTR may be part of a nucleic acid, e.g. a DNA or an RNA. An UTR may comprise elements for controlling gene expression, also called regulatory elements. Such regulatory elements may be, e.g., ribosomal binding sites, miRNA binding sites, promotor elements etc.

[1011] In preferred embodiments, the at least one nucleic acid comprises a protein-coding region (“coding sequence” or “ods”), and 5′-UTR and/or 3′-UTR. Notably, UTRs may harbor regulatory sequence elements that determine nucleic acid, e.g. RNA turnover, stability, and localization. Moreover, UTRs may harbor sequence elements that enhance translation. In medical application of nucleic acid sequences (including DNA and RNA), translation of the nucleic acid into at least one peptide or protein is of paramount importance to therapeutic efficacy. Certain combinations of 3′-UTRs and/or 5′-UTRs may enhance the expression of operably linked coding sequences encoding peptides or proteins of the invention. Nucleic acid molecules harboring said UTR combinations advantageously enable rapid and transient expression of antigenic peptides or proteins after administration to a subject, preferably after intramuscular administration. Accordingly, the at least one nucleic acid comprising certain combinations of 3′-UTRs and/or 5′-UTRs as provided herein is particularly suitable for administration as a vaccine, in particular, suitable for administration into the muscle, the dermis, or the epidermis of a subject.

[1012] Suitably, the at least one nucleic acid comprises at least one heterologous 5′-UTR and/or at least one heterologous 3′-UTR. Said heterologous 5′-UTRs or 3′-UTRs may be derived from naturally occurring genes or may be synthetically engineered. In preferred embodiments, the nucleic acid, preferably the RNA comprises at least one coding sequence as defined herein operably linked to at least one (heterologous) 3′-UTR and/or at least one (heterologous) 5′-UTR.

[1013] In preferred embodiments, the at least one nucleic acid, e.g. the RNA or DNA, comprises at least one heterologous 3′-UTR.

[1014] Preferably, the RNA comprises a 3′-UTR, which may be derivable from a gene that relates to an RNA with enhanced half-life (i.e. that provides a stable RNA).

[1015] The term “3′-untranslated region” or “3′-UTR” or “3′-UTR element” will be recognized and understood by the person of ordinary skill in the art, and are e.g. intended to refer to a part of a nucleic acid molecule located 3′ (i.e. downstream) of a coding sequence and which is not translated into protein. A 3′-UTR may be part of a nucleic acid, e.g. a DNA or an RNA, located between a coding sequence and an (optional) terminal poly(A) sequence. A 3′-UTR may comprise elements for controlling gene expression, also called regulatory elements. Such regulatory elements may be, e.g., ribosomal binding sites, miRNA binding sites etc.

[1016] Preferably, the at least one nucleic acid comprises a 3′-UTR, which may be derivable from a gene that relates to an RNA with enhanced half-life (i.e. that provides a stable RNA).

[1017] In some embodiments, a 3′-UTR comprises one or more of a polyadenylation signal, a binding site for proteins that affect a nucleic acid stability of location in a cell, or one or more miRNA or binding sites for miRNAs.

[1018] MicroRNAs (or miRNA) are 19-25 nucleotide long noncoding RNAs that bind to the 3′-UTR of nucleic acid molecules and down-regulate gene expression either by reducing nucleic acid molecule stability or by inhibiting translation. E.g., microRNAs are known to regulate RNA, and thereby protein expression, e.g. in liver (miR-122), heart (miR-Id, miR-149), endothelial cells (miR-17-92, miR-126), adipose tissue (let-7, miR-30c), kidney (miR-192, miR-194, miR-204), myeloid cells (miR-142-3p, miR-142-5p, miR-16, miR-21, miR-223, miR-24, miR-27), muscle (miR-133, miR-206, miR-208), and lung epithelial cells (let-7, miR-133, miR-126). The RNA may comprise one or more microRNA target sequences, microRNA sequences, or microRNA seeds. Such sequences may e.g. correspond to any known microRNA such as those taught in US2005/0261218 and US2005/0059005.

[1019] Accordingly, miRNA, or binding sites for miRNAs as defined above may be removed from the 3′-UTR or may be introduced into the 3′-UTR in order to tailor the expression of the nucleic acid, e.g. the DNA or RNA to desired cell types or tissues (e.g. muscle cells).

[1020] In preferred embodiments, the at least one nucleic acid comprises at least one heterologous 3′-UTR, wherein the at least one heterologous 3′-UTR comprises a nucleic acid sequence is derived or selected from a 3′-UTR of a gene selected from PSMB3, ALB7, alpha-globin (referred to as “muag”), CASP1, COX6B1, GNAS, NDUFA1 and RPS9, or from a homolog, a fragment or variant of any one of these genes, preferably according to nucleic acid sequences being identical or at least 70%, 80%, 85%, 86%, 87%, 88%, 89%, 90%, 91%, 92%, 93%, 94%, 95%, 96%, 97%, 98%, or 99% identical to SEQ ID NOs: 253-268, 22902-22905, 22892-22895 or a fragment or a variant of any of these. Particularly preferred nucleic acid sequences in that context can be derived from published PCT application WO2019077001A1, in particular, claim 9 of WO2019077001A1. The corresponding 3′-UTR sequences of claim 9 of WO2019077001A1 are herewith incorporated by reference (e.g., SEQ ID NOs: 23-34 of WO2019077001A1, or fragments or variants thereof).

[1021] In preferred embodiments, the at least one nucleic acid comprises a 3′-UTR derived from an alpha-globin gene. Said 3′-UTR derived from a alpha-globin gene (“muag”) may comprise or consist of a nucleic acid sequence being identical or at least 70%, 80%, 85%, 86%, 87%, 88%, 89%, 90%, 91%, 92%, 93%, 94%, 95%, 96%, 97%, 98%, or 99% identical to SEQ ID NOs: 267, 268, 22896-22901, 22906-22911 or a fragment or a variant thereof.

[1022] In further embodiments, the at least one nucleic acid comprises a 3-UTR derived from a RPS9 gene. Said 3-UTR derived from a RPS9 gene may comprise or consist of a nucleic acid sequence being identical or at least 70%, 80%, 85%, 86%, 87%, 88%, 89%, 90%, 91%, 92%, 93%, 94%, 95%, 96%, 97%, 98%, or 99% identical to SEQ ID NOs: 263, 264, 22894, 22895, 22904, or 22905 or a fragment or a variant thereof.

[1023] In other embodiments, the nucleic acid comprise a 3′-UTR which comprise or consist of a nucleic acid sequence being identical or at least 70%, 80%, 85%, 86%, 87%, 88%, 89%, 90%, 91%, 92%, 93%, 94%, 95%, 96%, 97%, 98%, or 99% identical to SEQ ID NO: 22876-22891 or a fragment or a variant thereof.

[1024] In preferred embodiments, the at least one nucleic acid comprises a 3′-UTR derived from a PSMB3 gene. Said 3′-UTR derived from a PSMB3 gene may comprise or consist of a nucleic acid sequence being identical or at least 70%, 80%, 85%, 86%, 87%, 88%, 89%, 90%, 91%, 92%, 93%, 94%, 95%, 96%, 97%, 98%, or 99% identical to SEQ ID NOs: 253 or 254 or a fragment or a variant thereof.

[1025] In other embodiments, the at least one nucleic acid may comprise a 3′-UTR as described in WO2016107877, the disclosure of WO2016107877 relating to 3′-UTR sequences herewith incorporated by reference. Suitable 3′-UTRs are SEQ ID NOs: 1-24 and SEQ ID NOs: 49-318 of WO2016107877, or fragments or variants of these sequences. In other embodiments, the nucleic acid comprises a 3′-UTR as described in WO2017036580, the disclosure of WO2017036580 relating to 3′-UTR sequences herewith incorporated by reference. Suitable 3′-UTRs are SEQ ID NOs: 152-204 of WO2017036580, or fragments or variants of these sequences. In other embodiments, the nucleic acid comprises a 3′-UTR as described in WO2016022914, the disclosure of WO2016022914 relating to 3′-UTR sequences herewith incorporated by reference. Particularly preferred 3′-UTRs are nucleic acid sequences according to SEQ ID NOs: 20-36 of WO2016022914, or fragments or variants of these sequences.

[1026] In preferred embodiments, the at least one nucleic acid, e.g. the RNA or DNA, comprises at least one heterologous 5′-UTR.

[1027] The terms “5-untranslated region” or “5′-UTR” or “5′-UTR element” will be recognized and understood by the person of ordinary skill in the art, and are e.g. intended to refer to a part of a nucleic acid molecule located 5′ (i.e. “upstream”) of a coding sequence and which is not translated into protein. A 5′-UTR may be part of a nucleic acid located 5′ of the coding sequence. Typically, a 5′-UTR starts with the transcriptional start site and ends before the start codon of the coding sequence. A 5′-UTR may comprise elements for controlling gene expression, also called regulatory elements. Such regulatory elements may be, e.g., ribosomal binding sites, miRNA binding sites etc. The 5′-UTR may be post-transcriptionally modified, e.g. by enzymatic or post-transcriptional addition of a 5′-cap structure (e.g. for mRNA as defined below).

[1028] Preferably, the at least one nucleic acid comprises a 5′-UTR, which may be derivable from a gene that relates to an RNA with enhanced half-life (i.e. that provides a stable RNA).

[1029] In some embodiments, a 5′-UTR comprises one or more of a binding site for proteins that affect an RNA stability or RNA location in a cell, or one or more miRNA or binding sites for miRNAs (as defined above).

[1030] Accordingly, miRNA or binding sites for miRNAs as defined above may be removed from the 5′-UTR or introduced into the 5′-UTR in order to tailor the expression of the nucleic acid to desired cell types or tissues (e.g. muscle cells).

[1031] In preferred embodiments, the at least one nucleic acid comprises at least one heterologous 5′-UTR, wherein the at least one heterologous 5′-UTR comprises a nucleic acid sequence is derived or selected from a 5′-UTR of gene selected from HSD17B4, RPL32, ASAH1, ATP5A1, MP68, NDUFA4, NOSIP, RPL31, SLC7A3, TUBB4B, and UBQLN2, or from a homolog, a fragment or variant of any one of these genes according to nucleic acid sequences being identical or at least 70%, 80%, 85%, 86%, 87%, 88%, 89%, 90%, 91%, 92%, 93%, 94%, 95%, 96%, 97%, 98%, or 99% identical to SEQ ID NOs: 231-252, 22870-22875 or a fragment or a variant of any of these. Particularly preferred nucleic acid sequences in that context can be selected from published PCT application WO2019077001A1, in particular, claim 9 of WO2019077001A1. The corresponding 5′-UTR sequences of claim 9 of WO2019077001A1 are herewith incorporated by reference (e.g., SEQ ID NOs: 1-20 of WO2019077001A1, or fragments or variants thereof).

[1032] In preferred embodiments, the at least one nucleic acid comprises comprises a 5′-UTR derived from a RPL31 gene, wherein said 5′-UTR derived from a RPL31 gene comprises or consists of a nucleic acid sequence being identical or at least 70%, 80%, 85%, 86%, 87%, 88%, 89%, 90%, 91%, 92%, 93%, 94%, 95%, 96%, 97%, 98%, or 99% identical to SEQ ID NOs: 243, 244, 22872, 22873 or a fragment or a variant thereof.

[1033] In embodiments, the at least one nucleic acid comprises may comprise a 5′-UTR derived from a SLC7A3 gene, wherein said 5′-UTR derived from a SLC7A3 gene comprises or consists of a nucleic acid sequence being identical or at least 70%, 80%, 85%, 86%, 87%, 88%, 89%, 90%, 91%, 92%, 93%, 94%, 95%, 96%, 97%, 98%, or 99% identical to SEQ ID NOs: 245, 246, 22874, 22875 or a fragment or a variant thereof.

[1034] In particularly preferred embodiments, the at least one nucleic acid comprises a 5′-UTR derived or selected from a HSD17B4 gene, wherein said 5′-UTR derived from a HSD17B4 gene comprises or consists of a nucleic acid sequence being identical or at least 70%, 80%, 85%, 86%, 87%, 88%, 89%, 90%, 91%, 92%, 93%, 94%, 95%, 96%, 97%, 98%, or 99% identical to SEQ ID NOs: 231, 232, 22870, 22871 or a fragment or a variant thereof.

[1035] In other embodiments, the at least one nucleic acid comprises a 5′-UTR which comprises or consists of a nucleic acid sequence being identical or at least 70%, 80%, 85%, 86%, 87%, 88%, 89%, 90%, 91%, 92%, 93%, 94%, 95%, 96%, 97%, 98%, or 99% identical to SEQ ID NO: 22848-22869 or a fragment or a variant thereof.

[1036] In other embodiments, the at least one nucleic acid may comprise a 5′-UTR as described in WO2013143700, the disclosure of WO2013143700 relating to 5′-UTR sequences herewith incorporated by reference. Particularly preferred 5′-UTRs are nucleic acid sequences derived from SEQ ID NOs: 1-1363, SEQ ID NO: 1395, SEQ ID NO: 1421 and SEQ ID NO: 1422 of WO2013143700, or fragments or variants of these sequences. In other embodiments, the nucleic acid comprises a 5′-UTR as described in WO2016107877, the disclosure of WO2016107877 relating to 5′-UTR sequences herewith incorporated by reference. Particularly preferred 5′-UTRs are nucleic acid sequences according to SEQ ID NOs: 25-30 and SEQ ID NOs: 319-382 of WO2016107877, or fragments or variants of these sequences. In other embodiments, the nucleic acid comprises a 5′-UTR as described in WO2017036580, the disclosure of WO2017036580 relating to 5′-UTR sequences herewith incorporated by reference. Particularly preferred 5′-UTRs are nucleic acid sequences according to SEQ ID NOs: 1-151 of WO2017036580, or fragments or variants of these sequences. In other embodiments, the nucleic acid comprises a 5′-UTR as described in WO2016022914, the disclosure of WO2016022914 relating to 5′-UTR sequences herewith incorporated by reference. Particularly preferred 5′-UTRs are nucleic acid sequences according to SEQ ID NOs: 3-19 of WO2016022914, or fragments or variants of these sequences.

[1037] In preferred embodiments, the at least one nucleic acid comprises at least one coding sequence as specified herein encoding at least one antigenic protein as defined herein, operably linked to a 3′-UTR and/or a 5′-UTR selected from the following 5′UTR/3′UTR combinations (“also referred to UTR designs”):
[1038] a-1 (HSD17B4/PSMB3), a-2 (NDUFA4/PSMB3), a-3 (SLC7A3/PSMB3), a-4 (NOSIP/PSMB3), a-5 (MP68/PSMB3), b-1 (UBQLN2/RPS9), b-2 (ASAH1/RPS9), b-3 (HSD17B4/RPS9), b-4 (HSD17B4/CASP1), b-5 (NOSIP/COX6B1), c-1 (NDUFA4/RPS9), c-2 (NOSIP/NDUFA1), c-3 (NDUFA4/COX6B1), c-4 (NDUFA4/NDUFA1), c-5 (ATP5A1/PSMB3), d-1 (Rpl31/PSMB3), d-2 (ATP5A1/CASP1), d-3 (SLC7A3/GNAS), d-4 (HSD17B4/NDUFA1), d-5 (Slc7a3/Ndufa1), e-1 (TUBB4B/RPS9), e-2 (RPL31/RPS9), e-3 (MP68/RPS9), e-4 (NOSIP/RPS9), e-5 (ATP5A1/RPS9), e-6 (ATP5A1/COX6B1), f-1 (ATP5A1/GNAS), f-2 (ATP5A1/NDUFA1), f-3 (HSD17B4/COX6B1), f-4 (HSD17B4/GNAS), f-5 (MP68/COX6B1), g-1 (MP68/NDUFA1), g-2 (NDUFA4/CASP1), g-3 (NDUFA4/GNAS), g-4 (NOSIP/CASP1), g-5 (RPL31/CASP1), h-1 (RPL31/COX6B1), h-2 (RPL31/GNAS), h-3 (RPL31/NDUFA1), h-4 (Slc7a3/CASP1), h-5 (SLC7A3/COX6B1), i-1 (SLC7A3/RPS9), i-2 (RPL32/ALB7), i-2 (RPL32/ALB7), or i-3 (alpha-globin gene).

[1039] In particularly preferred embodiments, the at least one nucleic acid comprises at least one coding sequence as defined herein encoding at least one antigenic protein as defined herein, wherein said coding sequence is operably linked to a HSD17B4 5′-UTR and a PSMB3 3′-UTR (HSD17B4/PSMB3 (UTR design a-1)).

[1040] In further preferred embodiments, the at least one nucleic acid comprises at least one coding sequence as specified herein encoding at least one antigenic protein as defined herein, preferably derived from SARS-CoV-2 (nCoV-2019) coronavirus, wherein said coding sequence is operably linked to a SLC7A3 5′-UTR and a PSMB3 3′-UTR (SLC7A3/PSMB3 (UTR design a-3)).

[1041] In further preferred embodiments, the at least one nucleic acid comprises at least one coding sequence as specified herein encoding at least one antigenic protein as defined herein, preferably derived from SARS-CoV-2 (nCoV-2019) coronavirus, wherein said coding sequence is operably linked to a RPL31 5′-UTR and a RPS9 3′-UTR (RPL31/RPS9 (UTR design e-2)).

[1042] In particularly preferred embodiments, the at least one nucleic acid comprises at least one coding sequence as defined herein encoding at least one antigenic protein as defined herein, wherein said coding sequence is operably linked to an alpha-globin (“muag”) 3′-UTR.

[1043] In embodiments, the at least one nucleic acid, e.g. the DNA or RNA may be monocistronic, bicistronic, or multicistronic.

[1044] The term “monocistronic” will be recognized and understood by the person of ordinary skill in the art, and is e.g. intended to refer to a nucleic acid that comprises only one coding sequence. The terms “bicistronic”, or “multicistronic” as used herein will be recognized and understood by the person of ordinary skill in the art, and are e.g. intended to refer to a nucleic acid that may comprise two (bicistronic) or more (multicistronic) coding sequences.

[1045] In preferred embodiments, the at least one nucleic acid is monocistronic.

[1046] In embodiments, the at least one nucleic acid is monocistronic and the coding sequence of said nucleic acid encodes at least two different antigenic peptides or proteins. Accordingly, said coding sequence may encode at least two, three, four, five, six, seven, eight and more antigenic peptides or proteins, linked with or without an amino acid linker sequence, wherein said linker sequence can comprise rigid linkers, flexible linkers, cleavable linkers, or a combination thereof. Such constructs are herein referred to as “multi-antigen-constructs”.

[1047] In embodiments, the nucleic acid of at least one nucleic acid may be bicistronic or multicistronic and comprises at least two coding sequences, wherein the at least two coding sequences encode two or more different antigenic peptides or proteins as specified herein. Accordingly, the coding sequences in a bicistronic or multicistronic nucleic acid suitably encodes distinct antigenic proteins or peptides as defined herein or immunogenic fragments or immunogenic variants thereof. Preferably, the coding sequences in said bicistronic or multicistronic constructs may be separated by at least one IRES (internal ribosomal entry site) sequence. Thus, the term “encoding two or more antigenic peptides or proteins” may mean, without being limited thereto, that the bicistronic or multicistronic nucleic acid encodes e.g. at least two, three, four, five, six or more (preferably different) antigenic peptides or proteins of virus isolates. Alternatively, the bicistronic or multicistronic nucleic acid may encode e.g. at least two, three, four, five, six or more (preferably different) antigenic peptides or proteins derived from the same virus. In that context, suitable IRES sequences may be selected from the list of nucleic acid sequences according to SEQ ID NOs: 1566-1662 of the patent application WO2017081082, or fragments or variants of these sequences. In this context, the disclosure of WO2017081082 relating to IRES sequences is herewith incorporated by reference.

[1048] It has to be understood that, in the context of the invention, certain combinations of coding sequences may be generated by any combination of monocistronic, bicistronic and multicistronic DNA and/or RNA constructs and/or multi-antigen-constructs to obtain a nucleic acid set encoding multiple antigenic peptides or proteins as defined herein.

[1049] In embodiments, the A/U (A/T) content in the environment of the ribosome binding site of the at least one nucleic acid may be increased compared to the A/U (A/T) content in the environment of the ribosome binding site of its respective wild type or reference nucleic acid. This modification (an increased A/U (A/T) content around the ribosome binding site) increases the efficiency of ribosome binding to the nucleic acid, e.g. to an RNA. An effective binding of the ribosomes to the ribosome binding site in turn has the effect of an efficient translation the nucleic acid.

[1050] Accordingly, in a particularly preferred embodiment, the at least one nucleic acid comprises a ribosome binding site, also referred to as “Kozak sequence” identical to or at least 80%, 85%, 90%, 95% identical to any one of the sequences SEQ ID NOs: 180, 181, 22845-22847 or fragments or variants thereof.

[1051] In preferred embodiments, the at least one nucleic acid comprises at least one poly(N) sequence, e.g. at least one poly(A) sequence, at least one poly(U) sequence, at least one poly(C) sequence, or combinations thereof.

[1052] In preferred embodiments, the at least one nucleic acid, preferably the RNA comprises at least one poly(A) sequence.

[1053] The terms “poly(A) sequence”, “poly(A) tail” or “3′-poly(A) tail” as used herein will be recognized and understood by the person of ordinary skill in the art, and are e.g. intended to be a sequence of adenosine nucleotides, typically located at the 3′-end of a linear RNA (or in a circular RNA), of up to about 1000 adenosine nucleotides. Preferably, said poly(A) sequence is essentially homopolymeric, e.g. a poly(A) sequence of e.g. 100 adenosine nucleotides has essentially the length of 100 nucleotides. In other embodiments, the poly(A) sequence may be interrupted by at least one nucleotide different from an adenosine nucleotide, e.g. a poly(A) sequence of e.g. 100 adenosine nucleotides may have a length of more than 100 nucleotides (comprising 100 adenosine nucleotides and in addition said at least one nucleotide—or a stretch of nucleotides—different from an adenosine nucleotide). It has to be understood that “poly(A) sequence” as defined herein typically relates to RNA—however in the context of the invention, the term likewise relates to corresponding sequences in a DNA molecule (e.g. a “poly(T) sequence”).

[1054] The poly(A) sequence may comprise about 10 to about 500 adenosine nucleotides, about 10 to about 200 adenosine nucleotides, about 40 to about 200 adenosine nucleotides, or about 40 to about 150 adenosine nucleotides. Suitably, the length of the poly(A) sequence may be at least about or even more than about 10, 50, 64, 75, 100, 200, 300, 400, or 500 adenosine nucleotides. In certain embodiments the RNA comprises at least one poly(A) sequence comprising 30 to 200 adenosine nucleotides, wherein the 3′ terminal nucleotide of said RNA is an adenosine.

[1055] In preferred embodiments, the at least one nucleic acid comprises at least one poly(A) sequence comprising about 30 to about 200 adenosine nucleotides. In particularly preferred embodiments, the poly(A) sequence comprises about 64 adenosine nucleotides (A64). In other particularly preferred embodiments, the poly(A) sequence comprises about 100 adenosine nucleotides (A100). In other embodiments, the poly(A) sequence comprises about 150 adenosine nucleotides.

[1056] In further embodiments, the at least one nucleic acid comprises at least one poly(A) sequence comprising about 100 adenosine nucleotides, wherein the poly(A) sequence is interrupted by non-adenosine nucleotides, preferably by 10 non-adenosine nucleotides (A30-N10-A70).

[1057] The poly(A) sequence as defined herein may be located directly at the 3′ terminus of the at least one nucleic acid, preferably directly located at the 3′ terminus of an RNA.

[1058] In preferred embodiments, the 3-terminal nucleotide (that is the last 3′-terminal nucleotide in the polynucleotide chain) is the 3-terminal A nucleotide of the at least one poly(A) sequence. The term “directly located at the 3′ terminus” has to be understood as being located exactly at the 3′ terminus—in other words, the 3′ terminus of the nucleic acid consists of a poly(A) sequence terminating with an A nucleotide.

[1059] In a particularly preferred embodiment the nucleic acid sequence, preferably the RNA comprises a poly(A) sequence of at least 70 adenosine nucleotides, preferably consecutive at least 70 adenosine nucleotides, wherein the 3′-terminal nucleotide is an adenosine nucleotide.

[1060] In this context it has been shown that ending on an adenosine nucleotide decreases the induction of IFNalpha by the RNA vaccine. This is particularly important as the induction of IFNalpha is thought to be the main factor for induction of fever in vaccinated subjects, which of course has to be avoided.

[1061] In embodiments where the at least one nucleic acid is an RNA, the poly(A) sequence of the nucleic acid is preferably obtained from a DNA template during RNA in vitro transcription. In other embodiments, the poly(A) sequence is obtained in vitro by common methods of chemical synthesis without being necessarily transcribed from a DNA template. In other embodiments, poly(A) sequences are generated by enzymatic polyadenylation of the RNA (after RNA in vitro transcription) using commercially available polyadenylation kits and corresponding protocols known in the art, or alternatively, by using immobilized poly(A)polymerases e.g. using a methods and means as described in WO2016174271.

[1062] The at least one nucleic acid may comprise a poly(A) sequence obtained by enzymatic polyadenylation, wherein the majority of nucleic acid molecules comprise about 100 (+/−20) to about 500 (+/−50), preferably about 250 (+/−20) adenosine nucleotides.

[1063] In embodiments, the at least one nucleic acid comprises a poly(A) sequence derived from a template DNA and, optionally, additionally comprises at least one additional poly(A) sequence generated by enzymatic polyadenylation, e.g. as described in WO2016091391.

[1064] In embodiments, the at least one nucleic acid comprises at least one polyadenylation signal.

[1065] In embodiments, the at least one nucleic acid comprises at least one poly(C) sequence.

[1066] The term “poly(C) sequence” as used herein is intended to be a sequence of cytosine nucleotides of up to about 200 cytosine nucleotides. In preferred embodiments, the poly(C) sequence comprises about 10 to about 200 cytosine nucleotides, about 10 to about 100 cytosine nucleotides, about 20 to about 70 cytosine nucleotides, about 20 to about 60 cytosine nucleotides, or about 10 to about 40 cytosine nucleotides. In a particularly preferred embodiment, the poly(C) sequence comprises about 30 cytosine nucleotides.

[1067] In preferred embodiments, the at least one nucleic acid comprises at least one histone stem-loop (hSL) or histone stem loop structure.

[1068] The term “histone stem-loop” (abbreviated as “hSL” in e.g. the sequence listing) is intended to refer to nucleic acid sequences that form a stem-loop secondary structure predominantly found in histone mRNAs.

[1069] Histone stem-loop sequences/structures may suitably be selected from histone stem-loop sequences as disclosed in WO2012019780, the disclosure relating to histone stem-loop sequences/histone stem-loop structures incorporated herewith by reference. A histone stem-loop sequence that may be used within the present invention may preferably be derived from formulae (I) or (II) of WO2012019780. According to a further preferred embodiment, the at least one nucleic acid comprises at least one histone stem-loop sequence derived from at least one of the specific formulae (Ia) or (IIa) of the patent application WO2012019780.

[1070] In preferred embodiments, the at least one nucleic acid comprises at least one histone stem-loop, wherein said histone stem-loop (hSL) comprises or consists a nucleic acid sequence identical or at least 70%, 80%, 90%, 91%, 92%, 93%, 94%, 95%, 96%, 97%, 98%, or 99% identical to SEQ ID NOs: 178 or 179, or fragments or variants thereof.

[1071] In other embodiments, the at least one nucleic acid does not comprise a histone stem-loop as defined herein

[1072] In embodiments, in particular in embodiments that relate to RNA, the at least one nucleic acid comprises a 3′-terminal sequence element. Said 3-terminal sequence element comprises a poly(A) sequence and a histone-stem-loop sequence. Accordingly, the at least one nucleic acid comprises at least one 3′-terminal sequence element comprising or consisting of a nucleic acid sequence being identical or at least 70%, 80%, 90%, 91%, 92%, 93%, 94%, 95%, 96%, 97%, 98%, or 99% identical to SEQ ID NOs: 182-230, 22912, 22913 or a fragment or variant thereof.

[1073] In embodiments, in particular in embodiments that relate to RNA, the at least one nucleic acid comprises a 3-terminal sequence element. Said 3′-terminal sequence element comprises a poly(A). Accordingly, the at least one nucleic acid comprises at least one 3-terminal sequence element comprising or consisting of a nucleic acid sequence being identical or at least 70%, 80%, 90%, 91%, 92%, 93%, 94%, 95%, 96%, 97%, 98%, or 99% identical to SEQ ID NOs: 182-230, 22912, 22913 or a fragment or variant thereof.

[1074] In preferred embodiments, in particular in embodiments that relate to RNA, the nucleic acid comprises a 3′-terminal sequence element. Said 3-terminal sequence element may comprise a poly(A) sequence and optionally a histone-stem-loop sequence. Accordingly, the nucleic acid of the invention comprises at least one 3-terminal sequence element comprising or consisting of a nucleic acid sequence being identical or at least 70%, 80%, 90%, 91%, 92%, 93%, 94%, 95%, 96%, 97%, 98%, or 99% identical to SEQ ID NOs: 182, 187, 189, 192, 199, 207, or a fragment or variant thereof.

[1075] In various embodiments, in particular in embodiments that relate to RNA, the at least one nucleic acid may comprise a 5′-terminal sequence element according to SEQ ID NOs: 176, 177, 22840-22844, or a fragment or variant thereof. Such a 5′-terminal sequence element comprises e.g. a binding site for T7 RNA polymerase. Further, the first nucleotide of said 5′-terminal start sequence may preferably comprise a 2′O methylation, e.g. 2′O methylated guanosine or a 2′O methylated adenosine.

[1076] In preferred embodiments, the nucleic acid comprises at least one heterologous 5′-UTR that comprises or consists of a nucleic acid sequence derived from a 5′-UTR from HSD17B4 and at least one heterologous 3′-UTR comprises or consists of a nucleic acid sequence derived from a 3′-UTR of PSMB3. In certain embodiments, the 5′-UTR from HSD17B4 is at least about 95%, 96%, 97%, 98% to 99% identical to SEQ ID NO: 232. In some embodiments, the 3′-UTR of PSMB3 is at least about 95%, 96%, 97%, 98% to 99% identical to SEQ ID NO: 254. In especially preferred embodiments the nucleic acid, preferably the RNA comprises, from 5′ to 3′: i) 5′-cap1 structure; ii) 5′-UTR derived from a 5′-UTR of a HSD17B4 gene, preferably according to SEQ ID NO: 232; iii) the at least one coding sequence (encoding a Coroanavirus antigen according to the invention); iv) 3′-UTR derived from a 3′-UTR of a PSMB3 gene, preferably according to SEQ ID NO: 254; v) optionally, a histone stem-loop sequence; and vi) poly(A) sequence comprising about 100 A nucleotides, wherein the 3′ terminal nucleotide of said RNA is an adenosine.

[1077] Preferably, the at least one nucleic acid, e.g. the RNA or DNA, typically comprises about 50 to about 20000 nucleotides, or about 500 to about 10000 nucleotides, or about 1000 to about 10000 nucleotides, or preferably about 1000 to about 5000 nucleotides, or even more preferably about 2000 to about 5000 nucleotides.

[1078] In embodiments, the at least one nucleic acid is a DNA or an RNA.

[1079] In embodiments, the DNA is a plasmid DNA or a linear coding DNA construct, wherein the DNA comprises or consists of the nucleic acid elements as defined herein (e.g. including coding sequences, UTRs, poly(A/T), polyadenylation signal, a promoter).

[1080] In embodiments, the at least one nucleic acid is a DNA expression vector. Such a DNA expression vector may be selected from the group consisting of a bacterial plasmid, an Adenovirus, a Poxvirus, a Parapoxivirus (orf virus), a Vaccinia virus, a Fowlpox virus, a Herpes virus, an Adeno-associated virus (AAV), an Alphavirus, a Lentivirus, a Lambda phage, a Lymphocytic choriomeningitis virus, a Listeria sp and Salmonella sp.

[1081] Suitably, the DNA may also comprise a promoter that is operably linked to the respective antigen coding sequence of the at least one nucleic acid. The promoter operably linked to the antigen coding sequence can be e.g. a promoter from simian virus 40 (SV40), a mouse mammary tumor virus (MMTV) promoter, a human immunodeficiency virus (HIV) promoter such as the bovine immunodeficiency virus (BIV) long terminal repeat (LTR) promoter, a Moloney virus promoter, an avian leukosis virus (ALV) promoter, a cytomegalovirus (CMV) promoter such as the CMV immediate early promoter, Epstein Barr virus (EBV) promoter, or a Rous sarcoma virus (RSV) promoter. The promoter can also be a promoter from a human gene such as human actin, human myosin, human hemoglobin, human muscle creatine, or human metalothionein. The promoter can also be a tissue specific promoter, such as a muscle or skin specific promoter, natural or synthetic. Examples of such promoters are described in US patent application publication no. US20040175727. In preferred embodiments, the vector can be pVAX, pcDNA3.0, or provax, or any other expression vector capable of expressing DNA encoding the coronavirus antigen and enabling a cell to translate the sequence to an antigen that is recognized by the immune system.

[1082] Further suitable plasmid DNA may be generated to allow efficient production of the encoded antigens in cell lines, e.g. in insect cell lines, for example using vectors as described in WO2009150222A2 and as defined in PCT claims 1 to 33, the disclosure relating to claim 1 to 33 of WO2009150222A2 herewith incorporated by reference.

[1083] In embodiments, the at least one nucleic acid is an adenovirus based vector. Such an adenovirus based vector may comprise at least one coding sequence encoding at least one antigenic peptide or protein as defined herein (e.g. at least one Coronavirus antigen).

[1084] In the context of the invention, any suitable adenovirus based vector may be used such as those described in WO2005071093 or WO2006048215. Suitably, the adenovirus based vector used is a simian adenovirus, thereby avoiding dampening of the immune response after vaccination by pre-existing antibodies to common human entities such as AdHu5. Suitable simian adenovirus vectors include AdCh63 (see WO2005071093) or AdCh68 but others may also be used. Suitably the adenovirus vector will have the E1 region deleted, rendering it replication-deficient in human cells. Other regions of the adenovirus such as E3 and E4 may also be deleted.

[1085] In embodiments, the at least one nucleic acid is an orf virus based vector. Such an orf virus based vector may comprise at least one coding sequence encoding at least one antigenic peptide or protein as defined.

[1086] In particularly preferred embodiments of the invention, the at least one nucleic acid is an RNA.

[1087] Preferably, the RNA typically comprises about 50 to about 20000 nucleotides, or about 500 to about 10000 nucleotides, or about 1000 to about 10000 nucleotides, or preferably about 1000 to about 5000 nucleotides, or even more preferably about 2000 to about 5000 nucleotides.

[1088] According to preferred embodiments, the at least one nucleic acid is an RNA, preferably a coding RNA.

[1089] In preferred embodiments, the (coding) RNA is selected from an mRNA, a (coding) self-replicating RNA, a (coding) circular RNA, a (coding) viral RNA, or a (coding) replicon RNA.

[1090] In embodiments, the RNA is a circular RNA. As used herein, “circular RNA” or “circRNAs” have to be understood as a circular polynucleotide constructs that encode at least one antigenic peptide or protein as defined herein. Preferably, such a circRNA is a single stranded RNA molecule. In preferred embodiments, said circRNA comprises at least one coding sequence encoding at least one antigenic protein as defined herein, or an immunogenic fragment or an immunogenic variant thereof.

[1091] In embodiments, the RNA is a replicon RNA. The term “replicon RNA” will be recognized and understood by the person of ordinary skill in the art, and is e.g. intended to be an optimized self-replicating RNA. Such constructs may include replicase elements derived from e.g. alphaviruses (e.g. SFV, SIN, VEE, or RRV) and the substitution of the structural virus proteins with the nucleic acid of interest (that is, the coding sequence encoding an antigenic peptide or protein as defined herein). Alternatively, the replicase may be provided on an independent coding RNA construct or a coding DNA construct. Downstream of the replicase may be a sub-genomic promoter that controls replication of the replicon RNA.

[1092] In particularly preferred embodiments, the at least one nucleic acid is not a replicon RNA or a self-replicating RNA.

[1093] In particularly preferred embodiments, the at least one nucleic acid is an mRNA.

[1094] Preferably, the mRNA does not comprise a replicase element (e.g. a nucleic acid encoding a replicase).

[1095] The terms “RNA” and “mRNA” will be recognized and understood by the person of ordinary skill in the art, and are e.g. intended to be a ribonucleic acid molecule, i.e. a polymer consisting of nucleotides. These nucleotides are usually adenosine-monophosphate, uridine-monophosphate, guanosine-monophosphate and cytidine-monophosphate monomers which are connected to each other along a so-called backbone. The backbone is formed by phosphodiester bonds between the sugar, i.e. ribose, of a first and a phosphate moiety of a second, adjacent monomer. The specific succession of the monomers is called the RNA-sequence. The mRNA (messenger RNA) provides the nucleotide coding sequence that may be translated into an amino-acid sequence of a particular peptide or protein.

[1096] In the context of the invention, the RNA, preferably the mRNA, provides at least one coding sequence encoding an antigenic protein as defined herein that is translated into a (functional) antigen after administration (e.g. after administration to a subject, e.g. a human subject).

[1097] Accordingly, the RNA, preferably the mRNA, is suitable for a vaccine, preferably a multivalent vaccine of the invention.

[1098] In preferred embodiments, the RNA, preferably the mRNA is suitable for a SARS-CoV-2 vaccine, preferably a SARS-CoV-2 vaccine against at least one of the following SARS-CoV-2 isolates: B.1.351 (South Africa), B.1.1.7 (UK), P.1 (Brazil), B.1.429 (California), B.1.525 (Nigeria), B.1.258 (Czech republic), B.1.526 (New York), A.23.1 (Uganda), B.1.617.1 (India), B.1.617.2 (India), B.1.617.3 (India), P.2 (Brazil), C37.1 (Peru).

[1099] In particularly preferred embodiments, the RNA, preferably the mRNA is suitable for a SARS-CoV-2 vaccine, preferably a SARS-CoV-2 vaccine against B.1.351 (South Africa).

[1100] In particularly preferred embodiments, the RNA, preferably the mRNA is suitable for a SARS-CoV-2 vaccine, 40 preferably a SARS-CoV-2 vaccine against B.1.617.1 (India), B.1.617.2 (India), and/or B.1.617.3 (India). In further particularly preferred embodiments, the RNA, preferably the mRNA is suitable for a SARS-CoV-2 vaccine, preferably a SARS-CoV-2 vaccine against C37.1 (Peru).

[1101] Suitably, the RNA may be modified by the addition of a 5′-cap structure, which preferably stabilizes the RNA and/or 45 enhances expression of the encoded antigen and/or reduces the stimulation of the innate immune system (after administration to a subject). A 5′-cap structure is of particular importance in embodiments where the nucleic acid is an RNA, in particular a linear coding RNA, e.g. a linear mRNA or a linear coding replicon RNA.

[1102] Accordingly, in preferred embodiments, the at least one nucleic acid comprises a 5′-cap structure, preferably m7G, cap0, cap1, cap2, a modified cap0 or a modified cap1 structure.

[1103] The term “5′-cap structure” as used herein will be recognized and understood by the person of ordinary skill in the art, and is e.g. intended to refer to a 5′ modified nucleotide, particularly a guanine nucleotide, positioned at the 5-end of an RNA, e.g. an mRNA. Preferably, the 5′-cap structure is connected via a 5′-5′-triphosphate linkage to the RNA.

[1104] 5′-cap structures which may be suitable in the context of the present invention are cap0 (methylation of the first nucleobase, e.g. m7GpppN), cap1 (additional methylation of the ribose of the adjacent nucleotide of m7GpppN), cap2 (additional methylation of the ribose of the 2nd nucleotide downstream of the m7GpppN), cap3 (additional methylation of the ribose of the 3rd nucleotide downstream of the m7GpppN), cap4 (additional methylation of the ribose of the 4th nucleotide downstream of the m7GpppN), ARCA (anti-reverse cap analogue), modified ARCA (e.g. phosphothioate modified ARCA), inosine, N1-methyl-guanosine, 2′-fluoro-guanosine, 7-deaza-guanosine, 8-oxo-guanosine, 2-amino-guanosine, LNA-guanosine, and 2-azido-guanosine.

[1105] A 5′-cap (cap0 or cap1) structure may be formed in chemical RNA synthesis or in RNA in vitro transcription (co-transcriptional capping) using cap analogues.

[1106] The term “cap analogue” as used herein will be recognized and understood by the person of ordinary skill in the art, and is e.g. intended to refer to a non-polymerizable di-nucleotide or tri-nucleotide that has cap functionality in that it facilitates translation or localization, and/or prevents degradation of a nucleic acid molecule, particularly of an RNA molecule, when incorporated at the 5′-end of the nucleic acid molecule. Non-polymerizable means that the cap analogue will be incorporated only at the 5-terminus because it does not have a 5′ triphosphate and therefore cannot be extended in the 3′-direction by a template-dependent polymerase, particularly, by template-dependent RNA polymerase. Examples of cap analogues include, but are not limited to, a chemical structure selected from the group consisting of m7GpppG, m7GpppA, m7GpppC; unmethylated cap analogues (e.g. GpppG); dimethylated cap analogue (e.g. m2,7GpppG), trimethylated cap analogue (e.g. m2,2,7GpppG), dimethylated symmetrical cap analogues (e.g. m7Gpppm7G), or anti reverse cap analogues (e.g. ARCA; m7,2′OmeGpppG, m7,2′dGpppG, m7,3′OmeGpppG, m7,3′dGpppG and their tetraphosphate derivatives). Further cap analogues have been described previously (WO2008016473, WO2008157688, WO2009149253, WO2011015347, and WO2013059475). Further suitable cap analogues in that context are described in WO2017066793, WO2017066781, WO2017066791, WO2017066789, WO2017053297, WO2017066782, WO2018075827 and WO2017066797 wherein the disclosures referring to cap analogues are incorporated herewith by reference.

[1107] In embodiments, a modified cap1 structure is generated using tri-nucleotide cap analogue as disclosed in WO2017053297, WO2017066793, WO2017066781, WO2017066791, WO2017066789, WO2017066782, WO2018075827 and WO2017066797. In particular, any cap structures derivable from the structure disclosed in claim 1-5 of WO2017053297 may be suitably used to co-transcriptionally generate a modified cap1 structure. Further, any cap structures derivable from the structure defined in claim 1 or claim 21 of WO2018075827 may be suitably used to co-transcriptionally generate a modified cap1 structure.

[1108] In preferred embodiments, the RNA, in particular the mRNA comprises a cap1 structure.

[1109] In preferred embodiments, the 5′-cap structure may suitably be added co-transcriptionally using tri-nucleotide cap analogue as defined herein, preferably in an RNA in vitro transcription reaction as defined herein.

[1110] In preferred embodiments, the cap1 structure of the RNA is formed using co-transcriptional capping using tri-nucleotide cap analogues m7G(5′)ppp(5′)(2′OMeA)pG or m7G(5′)ppp(5′)(2′OMeG)pG. A preferred cap1 analogues in that context is m7G(5′)ppp(5′)(2′OMeA)pG.

[1111] In other preferred embodiments, the cap1 structure of the RNA of the invention is formed using co-transcriptional capping using tri-nucleotide cap analogue 3′OMe-m7G(5′)ppp(5′)(2′OMeA)pG.

[1112] In other embodiments, a cap0 structure of the RNA of the invention is formed using co-transcriptional capping using cap analogue 3′OMe-m7G(5′)ppp(5′)G.

[1113] In other embodiments, the 5′-cap structure is formed via enzymatic capping using capping enzymes (e.g. vaccinia virus capping enzymes and/or cap-dependent 2′-0 methyltransferases) to generate cap0 or cap1 or cap2 structures. The 5-cap structure (cap0 or cap1) may be added using immobilized capping enzymes and/or cap-dependent 2′-0 methyltransferases using methods and means disclosed in WO2016193226.

[1114] In preferred embodiments, about 70%, 75%, 80%, 85%, 90%, 95% of the RNA (species) comprises a cap1 structure as determined using a capping assay. In preferred embodiments, less than about 20%, 15%, 10%, 5%, 4%, 3%, 2%, 1% of the RNA (species) does not comprises a cap1 structure as determined using a capping assay. In other preferred embodiments, about 70%, 75%, 80%, 85%, 90%, 95% of the RNA (species) comprises a cap0 structure as determined using a capping assay. In preferred embodiments, less than about 20%, 15%, 10%, 5%, 4%, 3%, 2%, 1% of the RNA (species) does not comprises a cap0 structure as determined using a capping assay.

[1115] In the context of the invention, the term “RNA species” is not restricted to mean “one single molecule” but is understood to comprise an ensemble of essentially identical RNA molecules. Accordingly, it may relate to a plurality of essentially identical (coding) RNA molecules.

[1116] For determining the presence/absence of a cap0 or a cap1 structure, a capping assays as described in published PCT application WO2015101416, in particular, as described in claims 27 to 46 of published PCT application WO2015101416 can be used. Other capping assays that may be used to determine the presence/absence of a cap0 or a cap1 structure of an RNA are described in PCT/EP201808667, or published PCT applications WO2014152673 and WO2014152659.

[1117] In preferred embodiments, the RNA comprises an m7G(5′)ppp(5′)(2′OMeA) cap structure. In such embodiments, the RNA comprises a 5-terminal m7G cap, and an additional methylation of the ribose of the adjacent nucleotide of m7GpppN, in that case, a 2′O methylated Adenosine. Preferably, about 70%, 75%, 80%, 85%, 90%, 95% of the RNA (species) comprises such a cap1 structure as determined using a capping assay.

[1118] In other preferred embodiments, the RNA comprises an m7G(5′)ppp(5′)(2′OMeG) cap structure. In such embodiments, the RNA comprises a 5-terminal m7G cap, and an additional methylation of the ribose of the adjacent nucleotide, in that case, a 2′O methylated guanosine. Preferably, about 70%, 75%, 80%, 85%, 90%, 95% of the coding RNA (species) comprises such a cap1 structure as determined using a capping assay.

[1119] Accordingly, the first nucleotide of said RNA or mRNA sequence, that is, the nucleotide downstream of the m7G(5′)ppp structure, may be a 2′O methylated guanosine or a 2′O methylated adenosine.

[1120] According to embodiments, the RNA is a modified RNA, wherein the modification refers to chemical modifications comprising backbone modifications as well as sugar modifications or base modifications.

[1121] A modified RNA may comprise nucleotide analogues/modifications, e.g. backbone modifications, sugar modifications or base modifications. A backbone modification in the context of the invention is a modification, in which phosphates of the backbone of the nucleotides of the RNA are chemically modified. A sugar modification in the context of the invention is a chemical modification of the sugar of the nucleotides of the RNA. Furthermore, a base modification in the context of the invention is a chemical modification of the base moiety of the nucleotides of the RNA. In this context, nucleotide analogues or modifications are preferably selected from nucleotide analogues which are applicable for transcription and/or translation.

[1122] In particularly preferred embodiments, the nucleotide analogues/modifications which may be incorporated into a modified RNA are preferably selected from 2-amino-6-chloropurineriboside-5′-triphosphate, 2-Aminopurine-riboside-5′-triphosphate; 2-aminoadenosine-5′-triphosphate, 2′-Amino-2′-deoxycytidine-triphosphate, 2-thiocytidine-5-triphosphate, 2-thiouridine-5-triphosphate, 2′-Fluorothymidine-5′-triphosphate, 2′-O-Methyl-inosine-5′-triphosphate 4-thiouridine-5-triphosphate, 5-aminoallylcytidine-5′-triphosphate, 5-aminoallyluridine-5′-triphosphate, 5-bromocytidine-5′-triphosphate, 5-bromouridine-5′-triphosphate, 5-Bromo-2′-deoxycytidine-5′-triphosphate, 5-Bromo-2′-deoxyuridine-5′-triphosphate, 5-iodocytidine-5′-triphosphate, 5-iodo-2′-deoxycytidine-5′-triphosphate, 5-iodouridine-5-triphosphate, 5-iodo-2′-deoxyuridine-5′-triphosphate, 5-methylcytidine-5′-triphosphate, 5-methyluridine-5-triphosphate, 5-Propynyl-2′-deoxycytidine-5-triphosphate, 5-Propynyl-2′-deoxyuridine-5′-triphosphate, 6-azacytidine-5-triphosphate, 6-azauridine-5-triphosphate, 6-chloropurineriboside-5′-triphosphate, 7-deazaadenosine-5′-triphosphate, 7-deazaguanosine-5′-triphosphate, 8-azaadenosine-5′-triphosphate, 8-azidoadenosine-5′-triphosphate, benzimidazole-riboside-5′-triphosphate, N1-methyladenosine-5′-triphosphate, N1-methylguanosine-5′-triphosphate, N6-methyladenosine-5′-triphosphate, O6-methylguanosine-5′-triphosphate, pseudouridine-5′-triphosphate, or puromycin-5′-triphosphate, xanthosine-5′-triphosphate. Particular preference is given to nucleotides for base modifications selected from the group of base-modified nucleotides consisting of 5-methylcytidine-5′-triphosphate, 7-deazaguanosine-5′-triphosphate, 5-bromocytidine-5′-triphosphate, and pseudouridine-5′-triphosphate, pyridin-4-one ribonucleoside, 5-aza-uridine, 2-thio-5-aza-uridine, 2-thiouridine, 4-thio-pseudouridine, 2-thio-pseudouridine, 5-hydroxyuridine, 3-methyluridine, 5-carboxymethyl-uridine, 1-carboxymethyl-pseudouridine, 5-propynyl-uridine, 1-propynyl-pseudouridine, 5-taurinomethyluridine, 1-taurinomethyl-pseudouridine, 5-taurinomethyl-2-thio-uridine, 1-taurinomethyl-4-thio-uridine, 5-methyl-uridine, 1-methyl-pseudouridine, 4-thio-1-methyl-pseudouridine, 2-thio-1-methyl-pseudouridine, 1-methyl-1-deaza-pseudouridine, 2-thio-1-methyl-1-deaza-pseudouridine, dihydrouridine, dihydropseudouridine, 2-thio-dihydrouridine, 2-thio-dihydropseudouridine, 2-methoxyuridine, 2-methoxy-4-thio-uridine, 4-methoxy-pseudouridine, and 4-methoxy-2-thio-pseudouridine, 5-aza-cytidine, pseudoisocytidine, 3-methyl-cytidine, N4-acetylcytidine, 5-formylcytidine, N4-methylcytidine, 5-hydroxymethylcytidine, 1-methyl-pseudoisocytidine, pyrrolo-cytidine, pyrrolo-pseudoisocytidine, 2-thio-cytidine, 2-thio-5-methyl-cytidine, 4-thio-pseudoisocytidine, 4-thio-1-methyl-pseudoisocytidine, 4-thio-1-methyl-1-deaza-pseudoisocytidine, 1-methyl-1-deaza-pseudoisocytidine, zebularine, 5-aza-zebularine, 5-methyl-zebularine, 5-aza-2-thio-zebularine, 2-thio-zebularine, 2-methoxy-cytidine, 2-methoxy-5-methyl-cytidine, 4-methoxy-pseudoisocytidine, and 4-methoxy-1-methyl-pseudoisocytidine, 2-aminopurine, 2, 6-diaminopurine, 7-deaza-adenine, 7-deaza-8-aza-adenine, 7-deaza-2-aminopurine, 7-deaza-8-aza-2-aminopurine, 7-deaza-2,6-diaminopurine, 7-deaza-8-aza-2,6-diaminopurine, 1-methyladenosine, N6-methyladenosine, N6-isopentenyladenosine, N6-(cis-hydroxyisopentenyl)adenosine, 2-methylthio-N6-(cis-hydroxyisopentenyl) adenosine, N6-glycinylcarbamoyladenosine, N6-threonylcarbamoyladenosine, 2-methylthio-N6-threonyl carbamoyladenosine, N6,N6-dimethyladenosine, 7-methyladenine, 2-methylthio-adenine, and 2-methoxy-adenine, inosine, 1-methyl-inosine, wyosine, wybutosine, 7-deaza-guanosine, 7-deaza-8-aza-guanosine, 6-thio-guanosine, 6-thio-7-deaza-guanosine, 6-thio-7-deaza-8-aza-guanosine, 7-methyl-guanosine, 6-thio-7-methyl-guanosine, 7-methylinosine, 6-methoxy-guanosine, 1-methylguanosine, N2-methylguanosine, N2,N2-dimethylguanosine, 8-oxo-guanosine, 7-methyl-8-oxo-guanosine, 1-methyl-6-thio-guanosine, N2-methyl-6-thio-guanosine, and N2,N2-dimethyl-6-thio-guanosine, 5′-O-(1-thiophosphate)-adenosine, 5′-O-(1-thiophosphate)-cytidine, 5′-O-(1-thiophosphate)-guanosine, 5′-O-(1-thiophosphate)-uidine, 5′-O-(1-thiophosphate)-pseudouridine, 6-aza-cytidine, 2-thio-cytidine, alpha-thio-cytidine, Pseudo-iso-cytidine, 5-aminoallyl-uridine, 5-iodo-uridine, N1-methyl-pseudouridine, 5,6-dihydrouridine, alpha-thio-uridine, 4-thio-uridine, 6-aza-uridine, 5-hydroxy-uridine, deoxy-thymidine, 5-methyl-uridine, Pyrrolo-cytidine, inosine, alpha-thio-guanosine, 6-methyl-guanosine, 5-methyl-cytdine, 8-oxo-guanosine, 7-deaza-guanosine, N1-methyl-adenosine, 2-amino-6-Chloro-purine, N6-methyl-2-amino-purine, Pseudo-iso-cytidine, 6-Chloro-purine, N6-methyl-adenosine, alpha-thio-adenosine, 8-azido-adenosine, 7-deaza-adenosine.

[1123] In some embodiments, the at least one modified nucleotide is selected from pseudouridine, N1-methylpseudouridine, N1-ethylpseudouridine, 2-thiouridine, 4′-thiouridine, 5-methylcytosine, 5-methyluridine, 2-thio-1-methyl-1-deaza-pseudouridine, 2-thio-1-methyl-pseudouridine, 2-thio-5-aza-uridine, 2-thio-dihydropseudouridine, 2-thio-dihydrouridine, 2-thio-pseudouridine, 4-methoxy-2-thio-pseudouridine, 4-methoxy-pseudouridine, 4-thio-1-methyl-pseudouridine, 4-thio-pseudouridine, 5-aza-uridine, dihydropseudouridine, 5-methoxyuridine and 2′-O-methyl uridine.

[1124] Particularly preferred in that context are pseudouridine (ψ), N1-methylpseudouridine (m1ψ), 5-methylcytosine, and 5-methoxyuridine.

[1125] Accordingly, in embodiments, the at least one nucleic acid comprises at least one modified nucleotide.

[1126] In some embodiments, essentially all, e.g. essentially 100% of the uracil in the coding sequence of the at least one nucleic acid have a chemical modification, preferably a chemical modification is in the 5-position of the uracil.

[1127] Incorporating modified nucleotides such as e.g. pseudouridine (ψ), N1-methylpseudouridine (m1ψ), 5-methylcytosine, and/or 5-methoxyuridine into the coding sequence may be advantageous as unwanted innate immune responses (upon administration of the coding RNA or the vaccine) may be adjusted or reduced (if required).

[1128] In embodiments, the RNA comprises at least one coding sequence encoding at least one antigenic protein as defined herein, wherein said coding sequence comprises at least one modified nucleotide selected from pseudouridine (ψ) and N1-methylpseudouridine (m1ψ), preferably wherein all uracil nucleotides are replaced by pseudouridine (ψ) nucleotides and/or N1-methylpseudouridine (m1ψ) nucleotides, optionally wherein all uracil nucleotides are replaced by pseudouridine (ψ) nucleotides and/or N1-methylpseudouridine (m1ψ) nucleotides.

[1129] In preferred embodiments, the RNA does not comprise N1-methylpseudouridine (m1ψ) substituted positions. In further embodiments, the RNA does not comprise pseudouridine (ψ), N1-methylpseudouridine (m1ψ), 5-methylcytosine, and 5-methoxyuridine substituted position.

[1130] In preferred embodiments, the RNA comprises a coding sequence that consists only of G, C, A and U nucleotides and therefore does not comprise modified nucleotides (except of the 5′ terminal cap structure (cap0, cap1, cap2)).

[1131] In embodiments, the at least one nucleic acid is an RNA, wherein the RNA may be prepared using any method known in the art, including chemical synthesis such as e.g. solid phase RNA synthesis, as well as in vitro methods, such as RNA in vitro transcription reactions. Accordingly, in a preferred embodiment, the RNA is obtained by RNA in vitro transcription.

[1132] Accordingly, in preferred embodiments, the at least one nucleic acid is preferably an in vitro transcribed RNA.

[1133] The terms “RNA in vitro transcription” or “in vitro transcription” relate to a process wherein RNA is synthesized in a cell-free system (in vitro). RNA may be obtained by DNA-dependent in vitro transcription of an appropriate DNA template, which according to the present invention is a linearized plasmid DNA template or a PCR-amplified DNA template. The promoter for controlling RNA in vitro transcription can be any promoter for any DNA-dependent RNA polymerase. Particular examples of DNA-dependent RNA polymerases are the T7, T3, SP6, or Syn5 RNA polymerases. In a preferred embodiment of the present invention the DNA template is linearized with a suitable restriction enzyme, before it is subjected to RNA in vitro transcription.

[1134] Reagents used in RNA in vitro transcription typically include: a DNA template (linearized plasmid DNA or PCR product) with a promoter sequence that has a high binding affinity for its respective RNA polymerase such as bacteriophage-encoded RNA polymerases (T7, T3, SP6, or Syn5); ribonucleotide triphosphates (NTPs) for the four bases (adenine, cytosine, guanine and uracil); optionally, a cap analogue as defined herein; optionally, further modified nucleotides as defined herein; a DNA-dependent RNA polymerase capable of binding to the promoter sequence within the DNA template (e.g. T7, T3, SP6, or Syn5 RNA polymerase); optionally, a ribonuclease (RNase) inhibitor to inactivate any potentially contaminating RNase; optionally, a pyrophosphatase to degrade pyrophosphate, which may inhibit RNA in vitro transcription; MgCl₂, which supplies Mg2+ ions as a co-factor for the polymerase; a buffer (TRIS or HEPES) to maintain a suitable pH value, which can also contain antioxidants (e.g. DTT), and/or polyamines such as spermidine at optimal concentrations, e.g. a buffer system comprising TRIS-Citrate as disclosed in WO2017109161.

[1135] In preferred embodiments, the cap1 structure of the RNA is formed using co-transcriptional capping using tri-nucleotide cap analogues m7G(5′)ppp(5′)(2′OMeA)pG or m7G(5′)ppp(5′)(2′OMeG)pG. A preferred cap1 analogue that may suitably be used in manufacturing the coding RNA of the invention is m7G(5′)ppp(5′)(2′OMeA)pG.

[1136] In other preferred embodiments, the cap1 structure of the RNA of the invention is formed using co-transcriptional capping using tri-nucleotide cap analogue 3′OMe-m7G(5′)ppp(5′)(2′OMeA)pG.

[1137] In other embodiments, a cap0 structure of the RNA of the invention is formed using co-transcriptional capping using cap analogue 3′OMe-m7G(5′)ppp(5′)G.

[1138] In embodiments, the nucleotide mixture used in RNA in vitro transcription may additionally comprise modified nucleotides as defined herein. In that context, preferred modified nucleotides may be selected from pseudouridine (ψ), N1-methylpseudouridine (m1ψ), 5-methylcytosine, and 5-methoxyuridine. In particular embodiments, uracil nucleotides in the nucleotide mixture are replaced (either partially or completely) by pseudouridine (ψ) and/or N1-methylpseudouridine (m1ψ) to obtain a modified RNA.

[1139] In preferred embodiments, the nucleotide mixture used in RNA in vitro transcription does not comprise modified nucleotides as defined herein. In preferred embodiments, the nucleotide mixture used in RNA in vitro transcription does only comprise G, C, A and U nucleotides, and, optionally, a cap analog as defined herein.

[1140] In preferred embodiments, the nucleotide mixture (i.e. the fraction of each nucleotide in the mixture) used for RNA in vitro transcription reactions may be optimized for the given RNA sequence, preferably as described WO2015188933.

[1141] In this context, the in vitro transcription has been performed in the presence of a sequence optimized nucleotide mixture and optionally a cap analog, preferably wherein the sequence optimized nucleotide mixture does not comprise chemically modified nucleotides.

[1142] In this context a sequence-optimized nucleoside triphosphate (NTP) mix is a mixture of nucleoside triphosphates (NTPs) for use in an in vitro transcription reaction of an RNA molecule of a given sequence comprising the four nucleoside triphosphates (NTPs) GTP, ATP, CTP and UTP, wherein the fraction of each of the four nucleoside triphosphates (NTPs) in the sequence-optimized nucleoside triphosphate (NTP) mix corresponds to the fraction of the respective nucleotide in said RNA molecule. If a ribonucleotide is not present in the RNA molecule, the corresponding nucleoside triphosphate is also not present in the sequence-optimized nucleoside triphosphate (NTP) mix. In embodiment where more than one different RNA as defined herein have to be produced, e.g. where 2, 3, 4, 5, 6, 7, 8, 9, 10 or even more different RNAs have to be produced, procedures as described in WO2017109134 may suitably be used.

[1143] In the context of nucleic acid-based vaccine production, it may be required to provide GMP-grade nucleic acid, e.g. a GMP grade RNA or DNA. GMP-grade RNA or DNA may be produced using a manufacturing process approved by regulatory authorities. Accordingly, in a particularly preferred embodiment, RNA production is performed under current good manufacturing practice (GMP), implementing various quality control steps on DNA and RNA level, preferably according to WO2016180430. In preferred embodiments, the RNA of the invention is a GMP-grade RNA, particularly a GMP-grade mRNA. Accordingly, an RNA for a vaccine is preferably a GMP grade RNA.

[1144] The obtained RNA products are preferably purified using PureMessenger® (CureVac, Tubingen, Germany; RP-HPLC according to WO2008077592) and/or tangential flow filtration (as described in WO2016193206) and/or oligo d(T) purification (see WO2016180430).

[1145] Preferably, the RNA according to the invention is purified using RP-HPLC, preferably using Reversed-Phase High pressure liquid chromatography (RP-HPLC) with a macroporous styrene/divinylbenzene column (e.g. particle size 30 μm, pore size 4000Å and additionally using a filter cassette with a cellulose based membrane with a molecular weight cutoff of about 100 kDa.

[1146] In a further preferred embodiment, the at least one nucleic acid, preferably the RNA, is lyophilized (e.g. according to WO2016165831 or WO2011069586) to yield a temperature stable dried nucleic acid (powder) as defined herein (e.g. RNA or DNA). The nucleic acid of the invention, particularly the RNA may also be dried using spray-drying or spray-freeze drying (e.g. according to WO2016184575 or WO2016184576) to yield a temperature stable RNA (powder) as defined herein. Accordingly, in the context of manufacturing and purifying nucleic acid, in particular RNA, the disclosures of WO2017109161, WO2015188933, WO2016180430, WO2008077592, WO2016193206, WO2016165831, WO2011069586, WO2016184575, and WO2016184576 are incorporated herewith by reference.

[1147] Accordingly, in preferred embodiments, the at least one nucleic acid is a dried nucleic acid, particularly a dried RNA.

[1148] The term “dried RNA” as used herein has to be understood as RNA that has been lyophilized, or spray-dried, or spray-freeze dried as defined above to obtain a temperature stable dried RNA (powder).

[1149] In preferred embodiments, the at least one nucleic acid is a purified nucleic acid, particularly a purified RNA.

[1150] The term “purified nucleic acid” as used herein has to be understood as nucleic acid which has a higher purity after certain purification steps than the starting material. Typical impurities that are essentially not present in purified nucleic acid comprise peptides or proteins, spermidine, BSA, abortive nucleic acid sequences, nucleic acid fragments, free nucleotides, bacterial impurities, or impurities derived from purification procedures. Accordingly, it is desirable in this regard for the “degree of nucleic acid purity” to be as close as possible to 100%. It is also desirable for the degree of nucleic acid purity that the amount of full-length nucleic acid is as close as possible to 100%. Accordingly “purified nucleic acid” as used herein has a degree of purity of more than 75%, 80%, 85%, very particularly 90%, 91%, 92%, 93%, 94%, 95%, 96%, 97%, 98% and most favorably 99% or more. The degree of purity may for example be determined by an analytical HPLC, wherein the percentages provided above correspond to the ratio between the area of the peak for the target nucleic acid and the total area of all peaks representing the by-products. Alternatively, the degree of purity may for example be determined by an analytical agarose gel electrophoresis or capillary gel electrophoresis.

[1151] In preferred embodiments, the at least one nucleic acid is a purified RNA, preferably a purified mRNA.

[1152] The term “purified RNA” or “purified mRNA” as used herein has to be understood as RNA which has a higher purity after certain purification steps (e.g. HPLC, TFF, Oligo d(T) purification, precipitation steps) than the starting material (e.g. in vitro transcribed RNA). Typical impurities that are essentially not present in purified RNA comprise peptides or proteins (e.g. enzymes derived from DNA dependent RNA in vitro transcription, e.g. RNA polymerases, RNases, pyrophosphatase, restriction endonuclease, DNase), spermidine, BSA, abortive RNA sequences, RNA fragments (short double stranded RNA fragments, abortive sequences etc.), free nucleotides (modified nucleotides, conventional NTPs, cap analogue), template DNA fragments, buffer components (HEPES, TRIS, MgCl₂) etc. Other potential impurities that may be derived from e.g. fermentation procedures comprise bacterial impurities (bioburden, bacterial DNA) or impurities derived from purification procedures (organic solvents etc.). Accordingly, it is desirable in this regard for the “degree of RNA purity” to be as close as possible to 100%. It is also desirable for the degree of RNA purity that the amount of full-length RNA transcripts is as close as possible to 100%. Accordingly, “purified RNA” as used herein has a degree of purity of more than 75%, 80%, 85%, very particularly 90%, 91%, 92%, 93%, 94%, 95%, 96%, 97%, 98% and most favorably 99% or more. The degree of purity may for example be determined by an analytical HPLC, wherein the percentages provided above correspond to the ratio between the area of the peak for the target RNA and the total area of all peaks representing the by-products. Alternatively, the degree of purity may for example be determined by an analytical agarose gel electrophoresis or capillary gel electrophoresis.

[1153] In particularly preferred embodiments where the nucleic acid is an RNA, the RNA has been purified by RP-HPLC and/or TFF to remove double-stranded RNA, non-capped RNA and/or RNA fragments.

[1154] The formation of double stranded RNA as side products during e.g. RNA in vitro transcription can lead to an induction of the innate immune response, particularly IFNalpha which is the main factor of inducing fever in vaccinated subjects, which is of course an unwanted side effect. Current techniques for immunoblotting of dsRNA (via dot Blot, serological specific electron microscopy (SSEM) or ELISA for example) are used for detecting and sizing dsRNA species from a mixture of nucleic acids.

[1155] Suitably, the RNA of the invention has been purified by RP-HPLC and/or TFF as described herein to reduce the amount of dsRNA.

[1156] Preferably, the RNA according to the invention is purified using RP-HPLC, preferably using Reversed-Phase High pressure liquid chromatography (RP-HPLC) with a macroporous styrene/divinylbenzene column (e.g. particle size 30 μm, pore size 4000A and additionally using a filter cassette with a cellulose based membrane with a molecular weight cutoff of about 100 kDa.

[1157] In this context it is particularly preferred that the purified RNA has been purified by RP-HPLC and/or TFF which results in about 5%, 10%, or 20% less double stranded RNA side products as in RNA that has not been purified with RP-HPLC and/or TFF. Accordingly, the RNA of the invention comprises about 5%, 10%, or 20% less double stranded RNA side products as an RNA that has not been purified with RP-HPLC and/or TFF.

[1158] Alternatively, the purified RNA that has been purified by RP-HPLC and/or TFF comprises about 5%, 10%, or 20% less double stranded RNA side products as an RNA that has been purified with Oligo dT purification, precipitation, filtration and/or anion exchange chromatography. Accordingly, the RP-HPLC and/or TFF purified RNA of the invention comprises about 5%, 10%, or 20% less double stranded RNA side products as an RNA that has been purified with Oligo dT purification, precipitation, filtration and/or AEX.

[1159] It has to be understood that “dried RNA” as defined herein and “purified RNA” as defined herein or “GMP-grade RNA” as defined herein may have superior stability characteristics (in vitro, in vivo) and improved efficiency (e.g. better translatability of the mRNA in vivo) and are therefore particularly suitable for a medical purpose, e.g. a vaccine.

[1160] In embodiments, RNA of a composition has an RNA integrity ranging from about 40% to about 100%.

[1161] The term “RNA integrity” generally describes whether the complete RNA sequence is present in the composition. Low RNA integrity could be due to, amongst others, RNA degradation, RNA cleavage, incorrect or incomplete chemical synthesis of the RNA, incorrect base pairing, integration of modified nucleotides or the modification of already integrated nucleotides, lack of capping or incomplete capping, lack of polyadenylation or incomplete polyadenylation, or incomplete RNA in vitro transcription. RNA is a fragile molecule that can easily degrade, which may be caused e.g. by temperature, ribonucleases, pH or other factors (e.g. nucleophilic attacks, hydrolysis etc.), which may reduce the RNA integrity and, consequently, the functionality of the RNA.

[1162] In preferred embodiments, the RNA of a composition has an RNA integrity of at least about 50%, preferably of at least about 60%, more preferably of at least about 70%, most preferably of at least about 80% or about 90%. RNA is suitably determined using analytical HPLC, preferably analytical RP-HPLC.

[1163] The skilled person can choose from a variety of different chromatographic or electrophoretic methods for determining an RNA integrity. Chromatographic and electrophoretic methods are well-known in the art. In case chromatography is used (e.g. RP-HPLC), the analysis of the integrity of the RNA may be based on determining the peak area (or “area under the peak”) of the full-length RNA in a corresponding chromatogram. The peak area may be determined by any suitable software which evaluates the signals of the detector system. The process of determining the peak area is also referred to as integration. The peak area representing the full-length RNA is typically set in relation to the peak area of the total RNA in a respective sample. The RNA integrity may be expressed in % RNA integrity.

[1164] In the context of aspects of the invention, RNA integrity may be determined using analytical (RP)HPLC. Typically, a test sample of the composition comprising lipid based carrier encapsulating RNA may be treated with a detergent (e.g. about 2% Triton X100) to dissociate the lipid based carrier and to release the encapsulated RNA. The released RNA may be captured using suitable binding compounds, e.g. Agencourt AMPure XP beads (Beckman Coulter, Brea, CA, USA) essentially according to the manufacturer's instructions. Following preparation of the RNA sample, analytical (RP)HPLC may be performed to determine the integrity of RNA. Typically, for determining RNA integrity, 45 the RNA samples may be diluted to a concentration of 0.1 g/l using e.g. water for injection (WFI). About 10 μl of the diluted RNA sample may be injected into an HPLC column (e.g. a monolithic poly(styrene-divinylbenzene) matrix). Analytical (RP)HPLC may be performed using standard conditions, for example: Gradient 1: Buffer A (0.1M TEAA (pH 7.0)); Buffer B (0.1M TEAA (pH 7.0) containing 25% acetonitrile). Starting at 30% buffer B the gradient extended to 32% buffer B in 2 min, followed by an extension to 55% buffer B over 15 minutes at a flow rate of 1 ml/min. HPLC chromatograms are typically recorded at a wavelength of 260 nm. The obtained chromatograms may be evaluated using a software and the relative peak area may be determined in percent (%) as commonly known in the art. The relative peak area indicates the amount of RNA that has 100% RNA integrity. Since the amount of the RNA injected into the HPLC is typically known, the analysis of the relative peak area provides information on the integrity of the RNA. Thus, if e.g. 100 ng RNA have been injected in total, and 100 ng are determined as the relative peak area, the RNA integrity would be 100%. If, for example, the relative peak area would correspond to 80 ng, the RNA integrity would be 80%. Accordingly, RNA integrity in the context of the invention is determined using analytical HPLC, preferably analytical RP-HPLC.

[1165] In embodiments, RNA of a composition has an RNA integrity ranging from about 40% to about 100%. In embodiments, the RNA has an RNA integrity ranging from about 50% to about 100%. In embodiments, the RNA has an RNA integrity ranging from about 60% to about 100%. In embodiments, the RNA has an RNA integrity ranging from about 70% to about 100%. In embodiments, the RNA integrity is for example about 50%, about 60%, about 70%, about 80%, or about 90%. RNA is suitably determined using analytical HPLC, preferably analytical RP-HPLC.

[1166] In preferred embodiments, the RNA of a composition has an RNA integrity of at least about 50%, preferably of at least about 60%, more preferably of at least about 70%, most preferably of at least about 80% or about 90%. RNA integrity is suitably determined using analytical HPLC, preferably analytical RP-HPLC.

[1167] Following co-transcriptional capping as defined herein, and following purification as defined herein, the capping degree of the obtained RNA may be determined using capping assays as described in published PCT application WO2015101416, in particular, as described in Claims 27 to 46 of published PCT application WO2015101416 can be used. Alternatively, a capping assays described in PCT/EP2018/08667 may be used.

[1168] In embodiments, an automated device for performing RNA in vitro transcription may be used to produce and purify the at least one nucleic acid. Such a device may also be used to produce the composition or the vaccine. Preferably, a device as described in WO2020002598, in particular, a device as described in claims 1 to 59 and/or 68 to 76 of WO2020002598 (and FIGS. 1-18) may suitably be used.

[1169] In a further aspect, the present invention provides a method of stabilizing a pharmaceutical composition or a combination vaccine comprising lyophilizing or spray-drying the composition or vaccine to produce a stabilized composition or vaccine. Preferably, the stabilized composition or vaccine has a water content of less than about 10%, preferably a water content of between about 0.5% and 5.0%. Accordingly, the invention provides a stabilized, lyophilized composition or vaccine produced by a method of stabilizing as defined herein.

[1170] The methods described herein may preferably applied to a method of producing a pharmaceutical composition or vaccine as described in further detail below.

[1171] In various embodiments the at least one nucleic acid, preferably the mRNA comprises, preferably in 5′- to 3′-direction, the following elements:
[1172] A) 5-cap structure, preferably as specified herein;
[1173] B) 5-terminal start element, preferably as specified herein;
[1174] C) optionally, a 5′-UTR, preferably as specified herein;
[1175] D) a ribosome binding site, preferably as specified herein;
[1176] E) at least one coding sequence, preferably as specified herein;
[1177] F) 3′-UTR, preferably as specified herein;
[1178] G) optionally, poly(A) sequence, preferably as specified herein;
[1179] H) optionally, poly(C) sequence, preferably as specified herein;
[1180] I) optionally, histone stem-loop preferably as specified herein;
[1181] J) optionally, 3-terminal sequence element, preferably as specified herein.

[1182] In preferred embodiments the at least one nucleic acid, preferably the mRNA, comprises the following elements preferably in 5′- to 3-direction:
[1183] A) 5′-cap structure selected from m7G(5′), m7G(5′)ppp(5′)(2′OMeA), or m7G(5′)ppp(5′)(2′OMeG);
[1184] B) 5-terminal start element selected from SEQ ID NOs: 176 or 177 or fragments or variants thereof;
[1185] C) optionally, a 5′-UTR derived from a HSD17B4 gene;
[1186] D) a ribosome binding site selected from SEQ ID NOs: 180, 181, 22845-22847 or fragments or variants thereof;
[1187] E) at least one coding sequence as specified herein, preferably a codon optimized coding sequence;
[1188] F) 3′-UTR derived from a 3′-UTR of a PSMB3 gene or an alpha-globin gene (“muag”);
[1189] G) optionally, poly(A) sequence comprising about 30 to about 500 adenosines;
[1190] H) optionally, poly(C) sequence comprising about 10 to about 100 cytosines;
[1191] I) optionally, histone stem-loop selected from SEQ ID NOs: 178 or 179;
[1192] J) optionally, 3-terminal sequence element selected from SEQ ID NOs: 182-230.

[1193] In particularly preferred embodiments the at least one nucleic acid, preferably the mRNA, comprises the following elements in 5′- to 3-direction:
[1194] A) cap1 structure as defined herein;
[1195] B) coding sequence as specified herein, preferably a codon optimized coding sequence;
[1196] C) 3′-UTR derived from a 3′-UTR of a muag gene as defined herein, preferably according to SEQ ID NO: 267, 268, 22896-22901, 22906-22911;
[1197] D) poly(A) sequence comprising about 64 A nucleotides.
[1198] E) poly(C) sequence comprising about 10 to about 100 cytosines;
[1199] F) histone stem-loop selected from SEQ ID NOs: 178 or 179;

[1200] In preferred embodiments the at least one nucleic acid, preferably the mRNA, comprises the following elements in 5′- to 3′-direction:
[1201] A) cap1 structure as defined herein, preferably a codon optimized coding sequence;
[1202] B) 5′-UTR derived from a HSD17B4 gene as defined herein, preferably according to SEQ ID NO: 231 or 232;
[1203] C) coding sequence as specified herein;
[1204] D) 3-UTR derived from a 3-UTR of a PSMB3 gene as defined herein, preferably according to SEQ ID NO: 253 or 254;
[1205] E) poly(A) sequence comprising about 64 A nucleotides.
[1206] F) optionally a poly(C) sequence comprising about 10 to about 100 cytosines;
[1207] G) histone stem-loop selected from SEQ ID NOs: 178 or 179;
[1208] H) optionally, 3-terminal sequence element SEQ ID NOs: 182-230.

[1209] In particularly preferred embodiments the at least one nucleic acid, preferably the mRNA, comprises the following elements in 5′- to 3-direction:
[1210] A) cap1 structure as defined herein;
[1211] B) 5′-UTR derived from a HSD17B4 gene as defined herein, preferably according to SEQ ID NO: 231 or 232;
[1212] C) coding sequence selected as specified herein, preferably a codon optimized coding sequence;
[1213] D) 3′-UTR derived from a 3′-UTR of a PSMB3 gene as defined herein, preferably according to SEQ ID NO: 253 or 254;
[1214] E) a histone stem-loop selected from SEQ ID NOs: 178 or 179;
[1215] F) poly(A) sequence comprising about 100 A nucleotides, preferably representing the 3′ terminus.

[1216] In even more particularly preferred embodiments, the at least one nucleic acid, preferably the mRNA, comprises the following elements in 5′- to 3′-direction:
[1217] A) cap1 structure as defined herein;
[1218] B) 5′-UTR derived from a HSD17B4 gene as defined herein, preferably according to SEQ ID NO: 231 or 232;
[1219] C) coding sequence selected as specified herein, preferably a codon optimized coding sequence;
[1220] D) 3′-UTR derived from a 3′-UTR of a PSMB3 gene as defined herein, preferably according to SEQ ID NO: 253 or 254;
[1221] E) poly(A) sequence comprising about 100 A nucleotides, preferably representing the 3′ terminus.

[1222] In further preferred embodiments, the at least one nucleic acid, preferably the mRNA, comprises the following elements in 5′- to 3′-direction:
[1223] A) cap1 structure as defined herein;
[1224] B) 5′-UTR derived from a SLC7A3 gene as defined herein, preferably according to SEQ ID NO: 245 or 246;
[1225] C) coding sequence selected as specified herein, preferably a codon optimized coding sequence;
[1226] D) 3′-UTR derived from a 3′-UTR of a PSMB3 gene as defined herein, preferably according to SEQ ID NO: 253 or 254;
[1227] E) optionally, a histone stem-loop selected from SEQ ID NOs: 178 or 179;
[1228] F) poly(A) sequence comprising about 100 A nucleotides, preferably representing the 3′ terminus.

[1229] In further preferred embodiments, the at least one nucleic acid, preferably the, comprises the following elements in 5′- to 3′-direction:
[1230] A) cap1 structure as defined herein;
[1231] B) 5′-UTR derived from a RPL31 gene as defined herein, preferably according to SEQ ID NO: 243 or 243;
[1232] C) coding sequence selected as specified herein, preferably a codon optimized coding sequence;
[1233] D) 3′-UTR derived from a 3′-UTR of a RPS9 gene as defined herein, preferably according to SEQ ID NO: 263 or 264;
[1234] E) optionally, a histone stem-loop selected from SEQ ID NOs: 178 or 179;
[1235] F) poly(A) sequence comprising about 100 A nucleotides, preferably representing the 3′ terminus.

[1236] In the following Table 9, suitable constructs selected or derived from SARS-CoV2 are provided, with the encoded antigenic protein indicated therein. Further indicated are suitable codon optimized cds sequences (CDS opt), the used UTR design (5′-UTR/3′-UTR), the used 3′ end of the construct (3′ end), and the respective protein, cds and mRNA sequences.

TABLE 9
Overview of preferred mRNA constructs

| | | | 5′-UTR/3′- | | SEQ ID | SEQ | SEQ |
|---|---|---|---|---|---|---|---|
| | | CDS | UTR; UTR | | NO: | ID NO: | ID NO: |
| RNA ID | Name | opt. | Design | 3′-end | Protein | CDS | mRNA |
| R9922 | SARS-CoV-2/Wuhan-Hu-1 | opt1 | —/muag; i-3 | A64-N5-C30- | 15235 | 17112 | 20866 |
| | membrane protein | (gc) | | hSL-N5 | | | |
| R9924 | SARS-CoV-2/Wuhan-Hu-1 | opt1 | HDS17B4/ | hSL-A100 | 15235 | 17112 | 18989 |
| | membrane protein | (gc) | PSMB3; a-1 | | | | |
| R9923 | SARS-CoV-2/Wuhan-Hu-1 | opt1 | —/muag; i-3 | A64-N5-C30- | 15310 | 17187 | 20941 |
| | nucleocapsid protein | (gc) | | hSL-N5 | | | |
| R9925 | SARS-CoV-2/Wuhan-Hu-1 | opt1 | HDS17B4/ | hSL-A100 | 15310 | 17187 | 19064 |
| | nucleocapsid protein | (gc) | PSMB3; a-1 | | | | |
| R9941 | SARS-CoV-2/Wuhan-Hu-1 | opt1 | —/muag; i-3 | A64-N5-C30- | 15733 | 17610 | 21364 |
| | non-structural protein 3 | (gc) | | hSL-N5 | | | |
| R9946 | SARS-CoV-2/Wuhan-Hu-1 | opt1 | HDS17B4/ | hSL-A100 | 15733 | 17610 | 19487 |
| | non-structural protein 3 | (gc) | PSMB3; a-1 | | | | |
| R9942 | SARS-CoV-2/Wuhan-Hu-1 | opt1 | —/muag; i-3 | A64-N5-C30- | 16415 | 18292 | 22046 |
| | non-structural protein 4 | (gc) | | hSL-N5 | | | |
| R9947 | SARS-CoV-2/Wuhan-Hu-1 | opt1 | HDS17B4/ | hSL-A100 | 16415 | 18292 | 20169 |
| | non-structural protein 4 | (gc) | PSMB3; a-1 | | | | |
| R9943 | SARS-CoV-2/Wuhan-Hu-1 | opt1 | —/muag; i-3 | A64-N5-C30- | 16582 | 18459 | 22213 |
| | non-structural protein 6 | (gc) | | hSL-N5 | | | |
| R9948 | SARS-CoV-2/Wuhan-Hu-1 | opt1 | HDS17B4/ | hSL-A100 | 16582 | 18459 | 20336 |
| | non-structural protein 6 | (gc) | PSMB3; a-1 | | | | |
| R9944 | SARS-CoV-2/Wuhan-Hu-1 | opt1 | —/muag; i-3 | A64-N5-C30- | 16684 | 18561 | 22315 |
| | ORF3a protein | (gc) | | hSL-N5 | | | |
| R9949 | SARS-CoV-2/Wuhan-Hu-1 | opt1 | HDS17B4/ | hSL-A100 | 16684 | 18561 | 20438 |
| | ORF3a protein | (gc) | PSMB3; a-1 | | | | |
| R9945 | SARS-CoV-2/Wuhan-Hu-1 | opt1 | —/muag; i-3 | A64-N5-C30- | 16997 | 18874 | 22628 |
| | ORF8 protein | (gc) | | hSL-N5 | | | |
| R9950 | SARS-CoV-2/Wuhan-Hu-1 | opt1 | HDS17B4/ | hSL-A100 | 16997 | 18874 | 20751 |
| | ORF8 protein | (gc) | PSMB3; a-1 | | | | |
| R9515 | SARS-CoV-2/Wuhan-Hu-1 or SARS- | opt1 | —/muag; i-3 | A64-N5-C30- | 10, 341 | 137, 11798 | 163, 12810 |
| | CoV-2/Wuhan/WIV05/2019 | (gc) | | hSL-N5 | | | |
| | S_stab_PP (K986P_V987P) | | | | | | |
| R9709 | SARS-CoV-2/Wuhan-Hu-1 or SARS- | opt1 | HDS17B4/ | hSL-A100 | 10 | 137 | 149 |
| | CoV-2/Wuhan/WIV05/2019 | (gc) | PSMB3; a-1 | | | | |
| | S_stab_PP (K986P_V987P) | | | | | | |
| R10384 | SARS-CoV-2/Wuhan-Hu-1 or SARS- | opt1 | HDS17B4/ | hSL-A100 | 22961 | 23091 | 23531 |
| | CoV-2/Wuhan/WIV05/2019 | (gc) | PSMB3; a-1 | | | | |
| | S_stab_PP (K986P_V987P_L18F_{—} | | | | | | |
| | D80A_D215G_L242del_A243del_{—} | | | | | | |
| | L244del_R246I_K417N_E484K_{—} | | | | | | |
| | N501Y_D614G_A701V) | | | | | | |
| R10385 | SARS-CoV-2/Wuhan-Hu-1 or SARS- | opt1 | HDS17B4/ | hSL-A100 | 22963 | 23093 | 23533 |
| | CoV-2/Wuhan/WIV05/2019 | (gc) | PSMB3; a-1 | | | | |
| | S_stab_PP (K986P_V987P_L18F_{—} | | | | | | |
| | T20N_P26S_D138Y_R190S_K417T_{—} | | | | | | |
| | E484K_N501Y_D614G_H655Y_{—} | | | | | | |
| | T1027I) | | | | | | |
| R10354 | SARS-CoV-2/Wuhan-Hu-1 non- | opt1 | —/muag; i-3 | A64-N5-C30- | 27908 | 28029 | 28401 |
| | structural protein 13 protein | (gc) | | hSL-N5 | | | |
| R10355 | SARS-CoV-2/Wuhan-Hu-1 non- | opt1 | —/muag; i-3 | A64-N5-C30- | 27909 | 28030 | 28402 |
| | structural protein 14 protein | (gc) | | hSL-N5 | | | |
| R10382 | SARS-CoV-2/Wuhan-Hu-1 non- | opt1 | HDS17B4/ | hSL-A100 | 27908 | 28029 | 28150 |
| | structural protein 13 protein | (gc) | PSMB3; a-1 | | | | |
| R10383 | SARS-CoV-2/Wuhan-Hu-1 non- | opt1 | HDS17B4/ | hSL-A100 | 27909 | 28030 | 28151 |
| | structural protein 14 protein | (gc) | PSMB3; a-1 | | | | |

[1237] Formulation and Complexation:

[1238] In the following, suitable features and embodiments relating to the formulation and/or complexation of the pharmaceutical composition are further specified. In particular, suitable features and embodiments relating to formulation and/or complexation of nucleic acid molecules of the composition are further specified.

[1239] It has to be understood that suitable formulations/complexations provided herein may relate to any of the at least one nucleic acid comprising at least one coding sequence encoding at least one antigenic peptide or protein from at least one Coronavirus M, N, non-structural protein, and/or accessory protein as defined herein. Further, suitable features and embodiments provided herein may relate to any of the at least one (additional) nucleic acid comprising at least one coding sequence encoding at least one antigenic peptide or protein selected or derived from at least one Coronavirus spike protein (S) as defined herein.

[1240] In preferred embodiments, the pharmaceutical composition comprises at least one pharmaceutically acceptable carrier or excipient.

[1241] The term “pharmaceutically acceptable carrier” or “pharmaceutically acceptable excipient” as used herein preferably includes the liquid or non-liquid basis of the composition for administration. If the composition is provided in liquid form, the carrier may be water, e.g. pyrogen-free water; isotonic saline or buffered (aqueous) solutions, e.g. phosphate, citrate etc. buffered solutions. Water or preferably a buffer, more preferably an aqueous buffer, may be used, containing a sodium salt, preferably at least 50 mM of a sodium salt, a calcium salt, preferably at least 0.01 mM of a calcium salt, and optionally a potassium salt, preferably at least 3 mM of a potassium salt. According to preferred embodiments, the sodium, calcium and, optionally, potassium salts may occur in the form of their halogenides, e.g. chlorides, iodides, or bromides, in the form of their hydroxides, carbonates, hydrogen carbonates, or sulfates, etc. Examples of sodium salts include NaCl, NaI, NaBr, Na₂CO₃, NaHCO₃, Na₂SO₄, examples of the optional potassium salts include KCl, KI, KBr, K₂CO₃, KHCO₃, K₂SO₄, and examples of calcium salts include CaCl₂), CaI₂, CaBr₂, CaCO₃, CaSO₄, Ca(OH)₂.

[1242] Furthermore, organic anions of the aforementioned cations may be in the buffer. Accordingly, in embodiments, the pharmaceutical composition may comprise pharmaceutically acceptable carriers or excipients using one or more pharmaceutically acceptable carriers or excipients to e.g. increase stability, increase cell transfection, permit the sustained or delayed, increase the translation of encoded antigenic peptides or proteins in vivo, and/or alter the release profile of encoded antigenic peptides or proteins protein in vivo. In addition to traditional excipients such as any and all solvents, dispersion media, diluents, or other liquid vehicles, dispersion or suspension aids, surface active agents, isotonic agents, thickening or emulsifying agents, preservatives, excipients of the present invention can include, without limitation, lipidoids, liposomes, lipid nanoparticles, polymers, lipoplexes, core-shell nanoparticles, peptides, proteins, cells transfected with polynucleotides, hyaluronidase, nanoparticle mimics and combinations thereof. In embodiments, one or more compatible solid or liquid fillers or diluents or encapsulating compounds may be used as well, which are suitable for administration to a subject. The term “compatible” as used herein means that the constituents of the composition are capable of being mixed with the at least one nucleic acid and, optionally, a plurality of nucleic acids of the composition, in such a manner that no interaction occurs, which would substantially reduce the biological activity or the pharmaceutical effectiveness of the composition under typical use conditions (e.g., intramuscular or intradermal administration). Pharmaceutically acceptable carriers or excipients must have sufficiently high purity and sufficiently low toxicity to make them suitable for administration to a subject to be treated. Compounds which may be used as pharmaceutically acceptable carriers or excipients may be sugars, such as, for example, lactose, glucose, trehalose, mannose, and sucrose; starches, such as, for example, corn starch or potato starch; dextrose; cellulose and its derivatives, such as, for example, sodium carboxymethylcellulose, ethylcellulose, cellulose acetate; powdered tragacanth; malt; gelatin; tallow; solid glidants, such as, for example, stearic acid, magnesium stearate; calcium sulfate; vegetable oils, such as, for example, groundnut oil, cottonseed oil, sesame oil, olive oil, corn oil and oil from theobroma; polyols, such as, for example, polypropylene glycol, glycerol, sorbitol, mannitol and polyethylene glycol; alginic acid.

[1243] The at least one pharmaceutically acceptable carrier or excipient of the pharmaceutical composition may preferably be selected to be suitable for intramuscular or intradermal delivery/administration of said pharmaceutical composition. The pharmaceutical composition is preferably a composition suitable for intramuscular administration to a subject.

[1244] Subjects to which administration of the pharmaceutical compositions is contemplated include, but are not limited to, humans and/or other primates; mammals, including commercially relevant mammals such as cattle, pigs, horses, sheep, cats, dogs, mice, and/or rats; and/or birds, including commercially relevant birds such as poultry, chickens, ducks, geese, and/or turkeys.

[1245] Pharmaceutical compositions of the present invention may suitably be sterile and/or pyrogen-free.

[1246] In a preferred embodiments, the at least one nucleic acid is complexed or associated with further compound to obtain a formulated composition. A formulation in that context may have the function of a transfection agent. A formulation in that context may also have the function of protecting the nucleic acid from degradation.

[1247] In embodiments where at least two nucleic acid species are in the composition, the at least two nucleic acid species are formulated separately.

[1248] In preferred embodiments where at least two nucleic acid species are in the composition, the at least two nucleic acid species are co-formulated.

[1249] In a preferred embodiment, the at least one nucleic acid, preferably the at least one RNA, is complexed or associated with, or at least partially complexed or partially associated with one or more cationic or polycationic compound.

[1250] In preferred where at least two nucleic acid species, the least two nucleic acid species are complexed or associated with, or at least partially complexed or partially associated with one or more cationic or polycationic compound, wherein the at least two nucleic acid species are formulated separately or are co-formulated.

[1251] In preferred embodiments, the one or more cationic or polycationic compound is selected from a cationic or polycationic polymer, cationic or polycationic polysaccharide, cationic or polycationic lipid, cationic or polycationic protein, cationic or polycationic peptide, or any combinations thereof.

[1252] The term “cationic or polycationic compound” as used herein will be recognized and understood by the person of ordinary skill in the art, and is for example intended to refer to a charged molecule, which is positively charged at a pH value ranging from about 1 to 9, at a pH value ranging from about 3 to 8, at a pH value ranging from about 4 to 8, at a pH value ranging from about 5 to 8, more preferably at a pH value ranging from about 6 to 8, even more preferably at a pH value ranging from about 7 to 8, most preferably at a physiological pH, e.g. ranging from about 7.2 to about 7.5. Accordingly, a cationic component, e.g. a cationic peptide, cationic protein, cationic polymer, cationic polysaccharide, cationic lipid (including lipidoids) may be any positively charged compound or polymer which is positively charged under physiological conditions. A “cationic or polycationic peptide or protein” may contain at least one positively charged amino acid, or more than one positively charged amino acid, e.g. selected from Arg, His, Lys or Orn. Accordingly, “polycationic” components are also within the scope exhibiting more than one positive charge under the given conditions.

[1253] Cationic or polycationic compounds, being particularly preferred in this context may be selected from the following list of cationic or polycationic peptides or proteins of fragments thereof: protamine, nucleoline, spermine or spermidine, or other cationic peptides or proteins, such as poly-L-lysine (PLL), poly-arginine, basic polypeptides, cell penetrating peptides (CPPs), including HIV-binding peptides, HIV-1 Tat (HIV), Tat-derived peptides, Penetratin, VP22 derived or analog peptides, HSV VP22 (Herpes simplex), MAP, KALA or protein transduction domains (PTDs), PpT620, prolin-rich peptides, arginine-rich peptides, lysine-rich peptides, MPG-peptide(s), Pep-1, L-oligomers, Calcitonin peptide(s), Antennapedia-derived peptides, pAntp, pIsI, FGF, Lactoferrin, Transportan, Buforin-2, Bac715-24, SynB, SynB(1), pVEC, hCT-derived peptides, SAP, or histones. More preferably, the nucleic acid (e.g. DNA or RNA), e.g. the coding RNA, preferably the mRNA, is complexed with one or more polycations, preferably with protamine or oligofectamine, most preferably with protamine. In preferred embodiment, the at least one nucleic (e.g. DNA or RNA), preferably the at least one RNA, is complexed with protamine.

[1254] Further preferred cationic or polycationic compounds, which can be used as transfection or complexation agent may include cationic polysaccharides, for example chitosan, polybrene etc.; cationic lipids, e.g. DOTMA, DMRIE, di-C14-amidine, DOTIM, SAINT, DC-Chol, BGTC, CTAP, DOPC, DODAP, DOPE: Dioleyl phosphatidylethanol-amine, DOSPA, DODAB, DOIC, DMEPC, DOGS, DIMRI, DOTAP, DC-6-14, CLIP1, CLIP6, CLIP9, oligofectamine; or cationic or polycationic polymers, e.g. modified polyaminoacids, such as beta-aminoacid-polymers or reversed polyamides, etc., modified polyethylenes, such as PVP etc., modified acrylates, such as pDMAEMA etc., modified amidoamines such as pAMAM etc., modified polybetaaminoester (PBAE), such as diamine end modified 1,4 butanediol diacrylate-co-5-amino-1-pentanol polymers, etc., dendrimers, such as polypropylamine dendrimers or pAMAM based dendrimers, etc., polyimine(s), such as PEI, poly(propyleneimine), etc., polyallylamine, sugar backbone based polymers, such as cyclodextrin based polymers, dextran based polymers, etc., silan backbone based polymers, such as PMOXA-PDMS copolymers, etc., blockpolymers consisting of a combination of one or more cationic blocks (e.g. selected from a cationic polymer as mentioned above) and of one or more hydrophilic or hydrophobic blocks (e.g. polyethyleneglycole); etc.

[1255] In this context it is particularly preferred that the at least one nucleic acid, preferably the at least one RNA, is complexed or at least partially complexed with a cationic or polycationic compound and/or a polymeric carrier, preferably cationic proteins or peptides. In this context, the disclosure of WO2010037539 and WO2012113513 is incorporated herewith by reference. Partially means that only a part of the nucleic acid is complexed with a cationic compound and that the rest of the nucleic acid is in uncomplexed form (“free”).

[1256] In embodiments, the pharmaceutical composition comprises at least one nucleic acid, preferably at least one RNA, complexed with one or more cationic or polycationic compounds, preferably protamine, and at least one free (non-complexed) nucleic acid.

[1257] In this context it is particularly preferred that the at least one nucleic acid (e.g. DNA or RNA), preferably the at least one RNA is complexed, or at least partially complexed with protamine. Preferably, the molar ratio of the nucleic acid, particularly the RNA of the protamine-complexed RNA to the free RNA may be selected from a molar ratio of about 0.001:1 to about 1:0.001, including a ratio of about 1:1. Suitably, the complexed RNA is complexed with protamine by addition of protamine-trehalose solution to the RNA sample at a RNA:protamine weight to weight ratio (w/w) of 2:1.

[1258] Further preferred cationic or polycationic proteins or peptides that may be used for complexation of the nucleic acid can be derived from formula (Arg)l;(Lys)m;(His)n;(Om)o;(Xaa)x of the patent application WO2009030481 or WO2011026641, the disclosure of WO2009030481 or WO2011026641 relating thereto incorporated herewith by reference.

[1259] In preferred embodiments, the at least one nucleic acid (e.g. DNA or RNA), preferably the at least one RNA is complexed, or at least partially complexed, with at least one cationic or polycationic proteins or peptides preferably selected from SEQ ID NOs: 269 to 273, or any combinations thereof.

[1260] According to various embodiments, the composition of the present invention comprises at least one nucleic acid (e.g. DNA or RNA), preferably at least one RNA as defined herein, and a polymeric carrier.

[1261] The term “polymeric carrier” as used herein will be recognized and understood by the person of ordinary skill in the art, and are e.g. intended to refer to a compound that facilitates transport and/or complexation of another compound (e.g. cargo nucleic acid). A polymeric carrier is typically a carrier that is formed of a polymer. A polymeric carrier may be associated to its cargo (e.g. DNA, or RNA) by covalent or non-covalent interaction. A polymer may be based on different subunits, such as a copolymer.

[1262] Suitable polymeric carriers in that context may include, for example, polyacrylates, polyalkycyanoacrylates, polylactide, polylactide-polyglycolide copolymers, polycaprolactones, dextran, albumin, gelatin, alginate, collagen, chitosan, cyclodextrins, protamine, PEGylated protamine, PEGylated PLL and polyethylenimine (PEI), dithiobis(succinimidylpropionate) (DSP), Dimethyl-3,3′-dithiobispropionimidate (DTBP), poly(ethylene imine) biscarbamate (PEIC), poly(L-lysine) (PLL), histidine modified PLL, poly(N-vinylpyrrolidone) (PVP), poly(propylenimine (PPI), poly(amidoamine) (PAMAM), poly(amido ethylenimine) (SS-PAEI), triehtylenetetramine (TETA), poly(β-aminoester), poly(4-hydroxy-L-proine ester) (PHP), poly(allylamine), poly(α-[4-aminobutyl]-L-glycolic acid (PAGA), Poly(D,L-lactic-co-glycolid acid (PLGA), Poly(N-ethyl-4-vinylpyridinium bromide), poly(phosphazene)s (PPZ), poly(phosphoester)s (PPE), poly(phosphoramidate)s (PPA), poly(N-2-hydroxypropylmethacrylamide) (pHPMA), poly(2-(dimethylamino)ethyl methacrylate) (pDMAEMA), poly(2-aminoethyl propylene phosphate) PPE_EA), galactosylated chitosan, N-dodecylated chitosan, histone, collagen and dextran-spermine. In one embodiment, the polymer may be an inert polymer such as, but not limited to, PEG. In one embodiment, the polymer may be a cationic polymer such as, but not limited to, PEI, PLL, TETA, poly(allylamine), Poly(N-ethyl-4-vinylpyridinium bromide), pHPMA and pDMAEMA. In one embodiment, the polymer may be a biodegradable PEI such as, but not limited to, DSP, DTBP and PEIC. In one embodiment, the polymer may be biodegradable such as, but not limited to, histine modified PLL, SS-PAEI, poly(β-aminoester), PHP, PAGA, PLGA, PPZ, PPE, PPA and PPE-EA.

[1263] A suitable polymeric carrier may be a polymeric carrier formed by disulfide-crosslinked cationic compounds. The disulfide-crosslinked cationic compounds may be the same or different from each other. The polymeric carrier can also contain further components. The polymeric carrier used according to the present invention may comprise mixtures of cationic peptides, proteins or polymers and optionally further components as defined herein, which are crosslinked by disulfide bonds (via —SH groups).

[1264] In this context, polymeric carriers according to formula {(Arg)l;(Lys)m;(His)n;(Orn)o;(Xaa)x(Cys)y} and formula Cys,{(Arg)l;(Lys)m;(His)n;(Om)o;(Xaa)x}Cys2 of the patent application WO2012013326 are preferred, the disclosure of WO2012013326 relating thereto incorporated herewith by reference.

[1265] In embodiments, the polymeric carrier used to complex the at least one nucleic acid (e.g. DNA or RNA), preferably the at least one RNA, may be derived from a polymeric carrier molecule according formula (L-P¹-S-[S-P²-S]ₙ—S—P³-L) of the patent application WO2011026641, the disclosure of WO2011026641 relating thereto incorporated herewith by reference.

[1266] In embodiments, the polymeric carrier compound is formed by, or comprises or consists of the peptide elements CysArg12Cys (SEQ ID NO: 269) or CysArg12 (SEQ ID NO: 270) or TrpArg12Cys (SEQ ID NO: 271). In particularly preferred embodiments, the polymeric carrier compound consists of a (R₁₂C)-(R₁₂C) dimer, a (WR₁₂C)-(WR₁₂C) dimer, or a (CR₁₂)-(CR₁₂C)-(CR₁₂) trimer, wherein the individual peptide elements in the dimer (e.g. (WR₁₂C)), or the trimer (e.g. (CR₁₂)), are connected via —SH groups.

[1267] In a embodiments, at least one nucleic acid (e.g. DNA or RNA), preferably the at least one RNA is complexed or associated with a polyethylene glycol/peptide polymer comprising HO-PEG5000-S-(S-CHHHHHHRRRRHHHHHHC-S-)7-S-PEG5000-OH (SEQ ID NO: 272 as peptide monomer), HO-PEG5000-S-(S-CHHHHHHRRRRHHHHHHC-S-)4-S-PEG5000-OH (SEQ ID NO: 272 as peptide monomer), HO-PEG5000-S-(S-CGHHHHHRRRRHHHHHGC-S-)7-S-PEG5000-OH (SEQ ID NO: 273 as peptide monomer) and/or a polyethylene glycol/peptide polymer comprising HO-PEG5000-S-(S-CGHHHHHRRRRHHHHHGC-S-)4-S-PEG5000-OH (SEQ ID NO: 273 of the peptide monomer).

[1268] In other embodiments, the composition comprises at least one nucleic acid (e.g. DNA or RNA), wherein the at least one nucleic acid, preferably the at least one RNA is complexed or associated with polymeric carriers and, optionally, with at least one lipid component as described in WO2017212008A1, WO2017212006A1, WO2017212007A1, and WO2017212009A1. In this context, the disclosures of WO2017212008A1, WO2017212006A1, WO2017212007A1, and WO2017212009A1 are herewith incorporated by reference.

[1269] In preferred embodiments, the polymeric carrier is a peptide polymer, preferably a polyethylene glycol/peptide polymer as defined above, and a lipid component, preferably a lipidoid component.

[1270] A lipidoid (or lipidoit) is a lipid-like compound, i.e. an amphiphilic compound with lipid-like physical properties. The lipidoid is preferably a compound, which comprises two or more cationic nitrogen atoms and at least two lipophilic tails. In contrast to many conventional cationic lipids, the lipidoid may be free of a hydrolysable linking group, in particular linking groups comprising hydrolysable ester, amide or carbamate groups. The cationic nitrogen atoms of the lipidoid may be cationisable or permanently cationic, or both types of cationic nitrogens may be present in the compound. In the context of the present invention, the term lipid is considered to also encompass lipidoids.

[1271] In some embodiments of the inventions, the lipidoid may comprise a PEG moiety.

[1272] In preferred embodiments, the at least one nucleic acid (e.g. DNA or RNA), preferably the at least one RNA, is complexed or associated with a polymeric carrier, preferably with a polyethylene glycol/peptide polymer as defined above, and a lipidoid component.

[1273] In embodiments where at least two nucleic acid species are in the composition, the at least two nucleic acid species are complexed or associated with, or at least partially complexed or partially associated with polymer as defined above, and a lipid or lipidoid component as defined above, wherein the at least two nucleic acid species are formulated separately or are co-formulated.

[1274] Suitably, the lipidoid is cationic, which means that it is cationisable or permanently cationic. In one embodiment, the lipidoid is cationisable, i.e. it comprises one or more cationisable nitrogen atoms, but no permanently cationic nitrogen atoms. In another embodiment, at least one of the cationic nitrogen atoms of the lipidoid is permanently cationic. Optionally, the lipidoid comprises two permanently cationic nitrogen atoms, three permanently cationic nitrogen atoms, or even four or more permanently cationic nitrogen atoms.

[1275] In a preferred embodiment, the lipidoid component may be any one selected from the lipidoids of the lipidoids provided in the table of page 50-54 of published PCT patent application WO2017212009A1, the specific lipidoids provided in said table, and the specific disclosure relating thereto herewith incorporated by reference.

[1276] In preferred embodiments, the lipidoid component may be any one selected from 3-C12-OH, 3-C12-OH-cat, 3-C12-amide, 3-C12-amide monomethyl, 3-C12-amide dimethyl, RevPEG(10)-3-C12-OH, RevPEG(10)-DLin-pAbenzoic, 3C12amide-TMA cat, 3C12amide-DMA, 3C12amide-NH2, 3C12amide-OH, 3C12Ester-OH, 3C12 Ester-amin, 3C12Ester-DMA, 2C12Amid-DMA, 3C12-lin-amid-DMA, 2C12-sperm-amid-DMA, or 3C12-sperm-amid-DMA (see table of published PCT patent application WO2017212009A1 (pages 50-54)). Particularly preferred are 3-C12-OH or 3-C12-OH-cat.

[1277] In preferred embodiments, the polyethylene glycol/peptide polymer comprising a lipidoid as specified above (e.g. 3-C12-OH or 3-C12-OH-cat), is used to complex the at least one nucleic acid to form complexes having an N/P ratio from about 0.1 to about 20, or from about 0.2 to about 15, or from about 2 to about 15, or from about 2 to about 12, wherein the N/P ratio is defined as the mole ratio of the nitrogen atoms of the basic groups of the cationic peptide or polymer to the phosphate groups of the nucleic acid. In that context, the disclosure of published PCT patent application WO2017212009A1, in particular claims 1 to 10 of WO2017212009A1, and the specific disclosure relating thereto is herewith incorporated by reference.

[1278] Further suitable lipidoids may be derived from published PCT patent application WO2010053572. In particular, lipidoids derivable from claims 1 to 297 of published PCT patent application WO2010053572 may be used in the context of the invention, e.g. incorporated into the peptide polymer as described herein, or e.g. incorporated into the lipid nanoparticle (as described below). Accordingly, claims 1 to 297 of published PCT patent application WO2010053572, and the specific disclosure relating thereto, is herewith incorporated by reference.

[1279] Encapsulation/Complexation in Liposomes or LNPs:

[1280] In preferred embodiments, the at least one nucleic acid (e.g. DNA or RNA), preferably the at least one RNA is complexed, encapsulated, partially encapsulated, or associated with one or more lipids (e.g. cationic lipids and/or neutral lipids), thereby forming lipid-based carriers such as liposomes, lipid nanoparticles (LNPs), lipoplexes, and/or nanoliposomes, preferably lipid nanoparticles.

[1281] In embodiments where at least two nucleic acid species are in the composition, the at least two nucleic acid species are formulated separately (in any formulation or complexation agent defined herein), preferably wherein the at least two nucleic acid species are formulated in separate liposomes, lipid nanoparticles (LNP), lipoplexes, and/or nanoliposomes

[1282] In embodiments where at least two nucleic acid species are in the composition, the at least two nucleic acid species are co-formulated (in any formulation or complexation agent defined herein), preferably wherein the at least two nucleic acid species are co-formulated in liposomes, lipid nanoparticles (LNP), lipoplexes, and/or nanoliposomes

[1283] The liposomes, lipid nanoparticles (LNPs), lipoplexes, and/or nanoliposomes—incorporated nucleic acid (e.g. DNA or RNA) may be completely or partially located in the interior space of the liposomes, lipid nanoparticles (LNPs), lipoplexes, and/or nanoliposomes, within the lipid layer/membrane, or associated with the exterior surface of the lipid layer/membrane. The incorporation of a nucleic acid into liposomes/LNPs is also referred to herein as “encapsulation” wherein the nucleic acid, e.g. the RNA is entirely contained within the interior space of the liposomes, lipid nanoparticles (LNPs), lipoplexes, and/or nanoliposomes. The purpose of incorporating nucleic acid into liposomes, lipid nanoparticles (LNPs), lipoplexes, and/or nanoliposomes is to protect the nucleic acid, preferably RNA from an environment which may contain enzymes or chemicals or conditions that degrade nucleic acid and/or systems or receptors that cause the rapid excretion of the nucleic acid. Moreover, incorporating nucleic acid, preferably RNA into liposomes, lipid nanoparticles (LNPs), lipoplexes, and/or nanoliposomes may promote the uptake of the nucleic acid, and hence, may enhance the therapeutic effect of the nucleic acid, e.g. the nucleic acid encoding at least one antigenic peptide or protein. Accordingly, incorporating a nucleic acid, e.g. RNA or DNA, into liposomes, lipid nanoparticles (LNPs), lipoplexes, and/or nanoliposomes may be particularly suitable for a vaccine of the invention, e.g. for intramuscular and/or intradermal administration. In this context, the terms “complexed” or “associated” refer to the essentially stable combination of nucleic acid with one or more lipids into larger complexes or assemblies without covalent binding.

[1284] The term “lipid nanoparticle”, also referred to as “LNP”, is not restricted to any particular morphology, and include any morphology generated when a cationic lipid and optionally one or more further lipids are combined, e.g. in an aqueous environment and/or in the presence of a nucleic acid, e.g. an RNA. For example, a liposome, a lipid complex, a lipoplex and the like are within the scope of a lipid nanoparticle (LNP).

[1285] Liposomes, lipid nanoparticles (LNPs), lipoplexes, and/or nanoliposomes can be of different sizes such as, but not limited to, a multilamellar vesicle (MLV) which may be hundreds of nanometers in diameter and may contain a series of concentric bilayers separated by narrow aqueous compartments, a small unicellular vesicle (SUV) which may be smaller than 50 nm in diameter, and a large unilamellar vesicle (LUV) which may be between 50 nm and 500 nm in diameter.

[1286] LNPs of the invention are suitably characterized as microscopic vesicles having an interior aqua space sequestered from an outer medium by a membrane of one or more bilayers. Bilayer membranes of LNPs are typically formed by amphiphilic molecules, such as lipids of synthetic or natural origin that comprise spatially separated hydrophilic and hydrophobic domains. Bilayer membranes of the liposomes can also be formed by amphophilic polymers and surfactants (e.g., polymerosomes, niosomes, etc.). In the context of the present invention, an LNP typically serves to transport the at least one nucleic acid, preferably the at least one RNA, to a target tissue.

[1287] Accordingly, in preferred embodiments, the at least one nucleic acid, preferably the at least one RNA, is complexed with one or more lipids thereby forming lipid nanoparticles (LNP), liposomes, nanoliposomes, lipoplexes, preferably LNPs. Preferably, LNPs (liposomes, nanoliposomes, lipoplexes) are particularly suitable for intramuscular and/or intradermal administration.

[1288] In embodiments, at least about 80%, 85%, 90%, 95% of lipid-based carriers, preferably the LNPs, have a spherical morphology, preferably comprising a solid core or partially solid core.

[1289] LNPs (or liposomes, nanoliposomes, lipoplexes) typically comprise a cationic lipid and one or more excipients selected from neutral lipids, charged lipids, steroids and polymer conjugated lipids (e.g. PEGylated lipid). The nucleic acid (e.g. RNA, DNA) may be encapsulated in the lipid portion of the LNP or an aqueous space enveloped by some or the entire lipid portion of the LNP. The nucleic acid (e.g. RNA, DNA) or a portion thereof may also be associated and complexed with the LNP. An LNP may comprise any lipid capable of forming a particle to which the nucleic acids are attached, or in which the one or more nucleic acids are encapsulated. Preferably, the LNP comprising nucleic acids comprises one or more cationic lipids, and one or more stabilizing lipids. Stabilizing lipids include neutral lipids and PEGylated lipids.

[1290] Preferably, the LNP (or liposomes, nanoliposomes, lipoplexes) comprises
[1291] (i) at least one cationic lipid;
[1292] (ii) at least one neutral lipid;
[1293] (iii) at least one steroid or steroid analogue, preferably cholesterol; and
[1294] (iv) at least one polymer conjugated lipid, preferably a PEG-lipid;
[1295] wherein (i) to (iv) are in a molar ratio of about 20-60% cationic lipid, 5-25% neutral lipid, 25-55% sterol, and 0.5-15% polymer conjugated lipid.

[1296] The cationic lipid of an LNP (or liposomes, nanoliposomes, lipoplexes) may be cationisable, i.e. it becomes protonated as the pH is lowered below the pK of the ionizable group of the lipid, but is progressively more neutral at higher pH values. At pH values below the pK, the lipid is then able to associate with negatively charged nucleic acids. In certain embodiments, the cationic lipid comprises a zwitterionic lipid that assumes a positive charge on pH decrease.

[1297] Such lipids (for liposomes, lipid nanoparticles (LNP), lipoplexes, and/or nanoliposomes) include, but are not limited to, DSDMA, N,N-dioleyl-N,N-dimethylammonium chloride (DODAC), N,N-distearyl-N,N-dimethylammonium bromide (DDAB), 1,2-dioleoyltrimethyl ammonium propane chloride (DOTAP) (also known as N-(2,3-dioleoyloxy)propyl)-N,N,N-trimethylammonium chloride and 1,2-Dioleyloxy-3-trimethylaminopropane chloride salt), N-(1-(2,3-dioleyloxy)propyl)-N,N,N-trimethylammonium chloride (DOTMA), N,N-dimethyl-2,3-dioleyloxy)propylamine (DODMA), ckk-E12, ckk, 1,2-DiLinoleyloxy-N,N-dimethylaminopropane (DLinDMA), 1,2-Dilinolenyloxy-N,N-dimethylaminopropane (DLenDMA), 1,2-di-y-linolenyloxy-N,N-dimethylaminopropane (y-DLenDMA), 98N12-5, 1,2-Dilinoleylcarbamoyloxy-3-dimethylaminopropane (DLin-C-DAP), 1,2-Dilinoleyoxy-3-(dimethylamino)acetoxypropane (DLin-DAC), 1,2-Dilinoleyoxy-3-morpholinopropane (DLin-MA), 1,2-Dilinoleoyl-3-dimethylaminopropane (DLinDAP), 1,2-Dilinoleylthio-3-dimethylaminopropane (DLin-S-DMA), 1-Linoleoyl-2-linoleyloxy-3-dimethylaminopropane (DLin-2-DMAP), 1,2-Dilinoleyloxy-3-trimethylaminopropane chloride salt (DLin-TMA·Cl), ICE (Imidazol-based), HGT5000, HGT5001, DMDMA, CLinDMA, CpLinDMA, DMOBA, DOcarbDAP, DLincarbDAP, DLinCDAP, KLin-K-DMA, DLin-K-XTC2-DMA, XTC (2,2-Dilinoleyl-4-dimethylaminoethyl-[1,3]-dioxolane) HGT4003, 1,2-Dilinoleoyl-3-trimethylaminopropane chloride salt (DLin-TAP·Cl), 1,2-Dilinoleyloxy-3-(N-methylpiperazino)propane (DLin-MPZ), or 3-(N,N-Dilinoleyamino)-1, 2-propanediol (DLinAP), 3-(N,N-Dioleylamino)-1.2-propanedio (DOAP), 1,2-Dilinoleyloxo-3-(2-N,N-dimethylamino)ethoxypropane (DLin-EG-DM A), 2,2-Dilinoleyl-4-dimethylaminomethyl-[1,3]-dioxolane (DLin-K-DMA) or analogs thereof, (3aR,5s,6aS)-N,N-dimethyl-2,2-di((9Z,12Z)-octadeca-9,12-dienyl)tetrahydro-3aH-cyclopenta[d][1,3]dioxol-5-amine, (6Z,9Z,28Z,31Z)-heptatriaconta-6,9,28,31-tetraen-19-yl-4-(dimethylamino)butanoate (MC3), ALNY-100 ((3aR,5s,6aS)-N,N-dimethyl-2,2-di((9Z,12Z)-octadeca-9,12-dienyl)tetrahydro-3aH-cyclopenta[d][1,3]dioxol-5-amine)), 1,1′-(2-(4-(2-((2-(bis(2-hydroxydodecyl)amino)ethyl)(2-hydroxydodecyl)amino)ethyl)piperazin-1-yl)ethylazanediyl)didodecan-2-ol (C12-200), 2,2-dilinoleyl-4-(2-dimethylaminoethyl)-[1,3]-dioxolane (DLin-K-C2-DMA), 2,2-dilinoleyl-4-dimethylaminomethyl-[1,3]-dioxolane (DLin-K-DMA), NC98-5 (4,7, 13-tris(3-oxo-3-(undecylamino)propyl)-N,N 16-diundecyl-4,7, 10,13-tetraazahexadecane-1,16-diamide), (6Z,9Z,28Z,31Z)-heptatriaconta-6,9,28,31-tetraen-19-yl 4-(dimethylamino) butanoate (DLin-M-C3-DMA), 3-((6Z,9Z,28Z,31Z)-heptatriaconta-6,9,28,31-tetraen-19-yloxy)-N,N-dimethylpropan-1-amine (MC3 Ether), 4-((6Z,9Z,28Z,31Z)-heptatriaconta-6,9,28,31-tetraen-19-yloxy)-N,N-dimethylbutan-1-amine (MC4 Ether), LIPOFECTIN® (commercially available cationic liposomes comprising DOTMA and 1,2-dioleoyl-sn-3phosphoethanolamine (DOPE), from GIBCO/BRL, Grand Island, N.Y.); LIPOFECTAMINE® (commercially available cationic liposomes comprising N-(1-(2,3dioleyloxy)propyl)-N-(2-(sperminecarboxamido)ethyl)-N,N-dimethylammonium trifluoroacetate (DOSPA) and (DOPE), from GIBCO/BRL); and TRANSFECTAM® (commercially available cationic lipids comprising dioctadecylamidoglycyl carboxyspermine (DOGS) in ethanol from Promega Corp., Madison, Wis.) or any combination of any of the foregoing. Further suitable cationic lipids for use in the compositions and methods of the invention include those described in international patent publications WO2010053572 (and particularly, CI 2-200 described at paragraph [00225]) and WO2012170930, both of which are incorporated herein by reference, HGT4003, HGT5000, HGTS001, HGT5001, HGT5002 (see US20150140070A1).

[1298] In embodiments, the cationic lipid of the liposomes, lipid nanoparticles (LNP), lipoplexes, and/or nanoliposomes may be an amino lipid.

[1299] Representative amino lipids include, but are not limited to, 1,2-dilinoleyoxy-3-(dimethylamino)acetoxypropane (DLin-DAC), 1,2-dilinoleyoxy-3morpholinopropane (DLin-MA), 1,2-dilinoleoyl-3-dimethylaminopropane (DLinDAP), 1,2-dilinoleylthio-3-dimethylaminopropane (DLin-S-DMA), 1-linoleoyl-2-linoleyloxy-3dimethylaminopropane (DLin-2-DMAP), 1,2-dilinoleyloxy-3-trimethylaminopropane chloride salt (DLin-TMA·Cl), 1,2-dilinoleoyl-3-trimethylaminopropane chloride salt (DLin-TAP·Cl), 1,2-dilinoleyloxy-3-(N-methylpiperazino)propane (DLin-MPZ), 3-(N,Ndilinoleylamino)-1,2-propanediol (DLinAP), 3-(N,N-dioleylamino)-1,2-propanediol (DOAP), 1,2-dilinoleyloxo-3-(2-N,N-dimethylamino)ethoxypropane (DLin-EG-DMA), and 2,2-dilinoleyl-4-dimethylaminomethyl-[1,3]-dioxolane (DLin-K-DMA), 2,2-dilinoleyl-4-(2-dimethylaminoethyl)-[1,3]-dioxolane (DLin-KC2-DMA); dilinoleyl-methyl-4-dimethylaminobutyrate (DLin-MC3-DMA); MC3 (US20100324120).

[1300] In embodiments, the cationic lipid of the liposomes, lipid nanoparticles (LNP), lipoplexes, and/or nanoliposomes may an aminoalcohol lipidoid.

[1301] Aminoalcohol lipidoids which may be used in the present invention may be prepared by the methods described in U.S. Pat. No. 8,450,298, herein incorporated by reference in its entirety. Suitable (ionizable) lipids can also be the compounds as disclosed in Tables 1, 2 and 3 and as defined in claims 1-24 of WO2017075531A1, hereby incorporated by reference.

[1302] In another embodiment, suitable lipids can also be the compounds as disclosed in WO2015074085A1 (i.e. ATX-001 to ATX-032 or the compounds as specified in claims 1-26), U.S. Appl. Nos. 61/905,724 and 15/614,499 or U.S. Pat. Nos. 9,593,077 and 9,567,296 hereby incorporated by reference in their entirety.

[1303] In other embodiments, suitable cationic lipids can also be the compounds as disclosed in WO2017117530A1 (i.e. lipids 13, 14, 15, 16, 17, 18, 19, 20, or the compounds as specified in the claims), hereby incorporated by reference in its entirety.

[1304] In preferred embodiments, ionizable or cationic lipids may also be selected from the lipids disclosed in WO2018078053A1 (i.e. lipids derived from formula I, II, and III of WO2018078053A1, or lipids as specified in Claims 1 to 12 of WO2018078053A1), the disclosure of WO2018078053A1 hereby incorporated by reference in its entirety. In that context, lipids disclosed in Table 7 of WO2018078053A1 (e.g. lipids derived from formula I-1 to I-41) and lipids disclosed in Table 8 of WO2018078053A1 (e.g. lipids derived from formula II-1 to II-36) may be suitably used in the context of the invention. Accordingly, formula I-1 to formula I-41 and formula II-1 to formula II-36 of WO2018078053A1, and the specific disclosure relating thereto, are herewith incorporated by reference.

[1305] In preferred embodiments, cationic lipids may be derived from formula III of published PCT patent application WO2018078053A1. Accordingly, formula III of WO2018078053A1, and the specific disclosure relating thereto, are herewith incorporated by reference.

[1306] In particularly preferred embodiments, the at least one nucleic acid (e.g. DNA or RNA), preferably the at least one RNA, is complexed with one or more lipids thereby forming LNPs (or liposomes, nanoliposomes, lipoplexes), wherein the cationic lipid of the LNP is selected from structures III-1 to III-36 of Table 9 of published PCT patent application WO2018078053A1. Accordingly, formula III-1 to III-36 of WO2018078053A1, and the specific disclosure relating thereto, are herewith incorporated by reference.

[1307] In particularly preferred embodiments, the at least one nucleic acid (e.g. DNA or RNA), preferably the at least one RNA is complexed with one or more lipids thereby forming liposomes, lipid nanoparticles (LNP), lipoplexes, and/or nanoliposomes, preferably LNPs, wherein the liposomes, lipid nanoparticles (LNP), lipoplexes, and/or nanoliposomes, preferably the LNPs comprise a cationic lipid according to formula III-3:

[chemical structure]

[1308] The lipid of formula III-3 as suitably used herein has the chemical term ((4-hydroxybutyl)azanediyl)bis(hexane-6,1-diyl)bis(2-hexyldecanoate), also referred to as ALC-0315.

[1309] In certain embodiments, the cationic lipid as defined herein, more preferably cationic lipid compound III-3, is present in the LNP (or liposomes, nanoliposomes, lipoplexes) in an amount from about 30 to about 95 mole percent, relative to the total lipid content of the LNP. If more than one cationic lipid is incorporated within the LNP, such percentages apply to the combined cationic lipids.

[1310] In embodiments, the cationic lipid is present in the LNP (or liposomes, nanoliposomes, lipoplexes) in an amount from about 30 to about 70 mole percent. In one embodiment, the cationic lipid is present in the LNP (or liposomes, nanoliposomes, lipoplexes) in an amount from about 40 to about 60 mole percent, such as about 40, 41, 42, 43, 44, 45, 46, 47, 48, 49, 50, 51, 52, 53, 54, 55, 56, 57, 58, 59 or 60 mole percent, respectively. In embodiments, the cationic lipid is present in the LNP (or liposomes, nanoliposomes, lipoplexes) in an amount from about 47 to about 48 mole percent, such as about 47.0, 47.1, 47.2, 47.3, 47.4, 47.5, 47.6, 47.7, 47.8, 47.9, 50.0 mole percent, respectively, wherein 47.7 mole percent are particularly preferred.

[1311] In some embodiments, the cationic lipid is present in a ratio of from about 20 mol % to about 70 or 75 mol % or from about 45 to about 65 mol % or about 20, 25, 30, 35, 40, 45, 50, 55, 60, 65, or about 70 mol % of the total lipid present in the LNP (or liposomes, nanoliposomes, lipoplexes). In further embodiments, the LNPs (or liposomes, nanoliposomes, lipoplexes) comprise from about 25% to about 75% on a molar basis of cationic lipid, e.g., from about 20 to about 70%, from about 35 to about 65%, from about 45 to about 65%, about 60%, about 57.5%, about 57.1%, about 50% or about 40% on a molar basis (based upon 100% total moles of lipid in the lipid nanoparticle). In some embodiments, the ratio of cationic lipid to nucleic acid (e.g. coding RNA or DNA) is from about 3 to about 15, such as from about 5 to about 13 or from about 7 to about 11.

[1312] Other suitable (cationic or ionizable) lipids are disclosed in WO2009086558, WO2009127060, WO2010048536, WO2010054406, WO2010088537, WO2010129709, WO2011153493, WO 2013063468, US20110256175, US20120128760, US20120027803, U.S. Pat. No. 8,158,601, WO2016118724, WO2016118725, WO2017070613, WO2017070620, WO2017099823, WO2012040184, WO2011153120, WO2011149733, WO2011090965, WO2011043913, WO2011022460, WO2012061259, WO2012054365, WO2012044638, WO2010080724, WO201021865, WO2008103276, WO2013086373, WO2013086354, U.S. Pat. Nos. 7,893,302, 7,404,969, 8,283,333, 8,466,122 and 8,569,256 and US Patent Publication No. US20100036115, US20120202871, US20130064894, US20130129785, US20130150625, US20130178541, US20130225836, US20140039032 and WO2017112865. In that context, the disclosures of WO2009086558, WO2009127060, WO2010048536, WO2010054406, WO2010088537, WO2010129709, WO2011153493, WO 2013063468, US20110256175, US20120128760, US20120027803, U.S. Pat. No. 8,158,601, WO2016118724, WO2016118725, WO2017070613, WO2017070620, WO2017099823, WO2012040184, WO2011153120, WO2011149733, WO2011090965, WO2011043913, WO2011022460, WO2012061259, WO2012054365, WO2012044638, WO2010080724, WO201021865, WO2008103276, WO2013086373, WO2013086354, U.S. Pat. Nos. 7,893,302, 7,404,969, 8,283,333, 8,466,122 and 8,569,256 and US Patent Publication No. US20100036115, US20120202871, US20130064894, US20130129785, US20130150625, US20130178541, US20130225836 and US20140039032 and WO2017112865 specifically relating to (cationic) lipids suitable for LNPs (or liposomes, nanoliposomes, lipoplexes) are incorporated herewith by reference.

[1313] In embodiments, amino or cationic lipids as defined herein have at least one protonatable or deprotonatable group, such that the lipid is positively charged at a pH at or below physiological pH (e.g. pH 7.4), and neutral at a second pH, preferably at or above physiological pH. It will, of course, be understood that the addition or removal of protons as a function of pH is an equilibrium process, and that the reference to a charged or a neutral lipid refers to the nature of the predominant species and does not require that all of lipids have to be present in the charged or neutral form. Lipids having more than one protonatable or deprotonatable group, or which are zwitterionic, are not excluded and may likewise suitable in the context of the present invention. In some embodiments, the protonatable lipids have a pKa of the protonatable group in the range of about 4 to about 11, e.g., a pKa of about 5 to about 7.

[1314] LNPs (or liposomes, nanoliposomes, lipoplexes) can comprise two or more (different) cationic lipids as defined herein. Cationic lipids may be selected to contribute to different advantageous properties. For example, cationic lipids that differ in properties such as amine pKa, chemical stability, half-life in circulation, half-life in tissue, net accumulation in tissue, or toxicity can be used in the LNP (or liposomes, nanoliposomes, lipoplexes). In particular, the cationic lipids can be chosen so that the properties of the mixed-LNP are more desirable than the properties of a single-LNP of individual lipids.

[1315] The amount of the permanently cationic lipid or lipidoid may be selected taking the amount of the nucleic acid cargo into account. In one embodiment, these amounts are selected such as to result in an N/P ratio of the nanoparticle(s) or of the composition in the range from about 0.1 to about 20. In this context, the N/P ratio is defined as the mole ratio of the nitrogen atoms (“N”) of the basic nitrogen-containing groups of the lipid or lipidoid to the phosphate groups (“P”) of the nucleic acid which is used as cargo. The N/P ratio may be calculated on the basis that, for example, 1 ug RNA typically contains about 3nmol phosphate residues, provided that the RNA exhibits a statistical distribution of bases. The “N”-value of the lipid or lipidoid may be calculated on the basis of its molecular weight and the relative content of permanently cationic and—if present—cationisable groups.

[1316] In vivo characteristics and behavior of LNPs (or liposomes, nanoliposomes, lipoplexes) can be modified by addition of a hydrophilic polymer coating, e.g. polyethylene glycol (PEG), to the LNP surface to confer steric stabilization. Furthermore, LNPs (or liposomes, nanoliposomes, lipoplexes) can be used for specific targeting by attaching ligands (e.g. antibodies, peptides, and carbohydrates) to its surface or to the terminal end of the attached PEG chains (e.g. via PEGylated lipids or PEGylated cholesterol).

[1317] In some embodiments, the LNPs (or liposomes, nanoliposomes, lipoplexes) comprise a polymer conjugated lipid. The term “polymer conjugated lipid” refers to a molecule comprising both a lipid portion and a polymer portion. An example of a polymer conjugated lipid is a PEGylated lipid. The term “PEGylated lipid” refers to a molecule comprising both a lipid portion and a polyethylene glycol portion. PEGylated lipids are known in the art and include 1-(monomethoxy-polyethyleneglycol)-2,3-dimyristoylglycerol (PEG-s-DMG) and the like.

[1318] A polymer conjugated lipid as defined herein may serve as an aggregation reducing lipid.

[1319] In certain embodiments, the LNP (or liposomes, nanoliposomes, lipoplexes) comprises a stabilizing-lipid which is a polyethylene glycol-lipid (PEGylated lipid). Suitable polyethylene glycol-lipids include PEG-modified phosphatidylethanolamine, PEG-modified phosphatidic acid, PEG-modified ceramides (e.g. PEG-CerC14 or PEG-CerC20), PEG-modified dialkylamines, PEG-modified diacylglycerols, PEG-modified dialkylglycerols. Representative polyethylene glycol-lipids include PEG-c-DOMG, PEG-c-DMA, and PEG-s-DMG. In one embodiment, the polyethylene glycol-lipid is N-[(methoxy poly(ethylene glycol)2000)carbamyl]-1,2-dimyristyloxlpropyl-3-amine (PEG-c-DMA). In a preferred embodiment, the polyethylene glycol-lipid is PEG-2000-DMG. In one embodiment, the polyethylene glycol-lipid is PEG-c-DOMG). In other embodiments, the LNPs comprise a PEGylated diacylglycerol (PEG-DAG) such as 1-(monomethoxy-polyethyleneglycol)-2,3-dimyristoylglycerol (PEG-DMG), a PEGylated phosphatidylethanoloamine (PEG-PE), a PEG succinate diacylglycerol (PEG-S-DAG) such as 4-O-(2′,3′-di(tetradecanoyloxy)propyl-1-O-(ω-methoxy(polyethoxy)ethyl)butanedioate (PEG-S-DMG), a PEGylated ceramide (PEG-cer), or a PEG dialkoxypropylcarbamate such as ω-methoxy(polyethoxy)ethyl-N-(2,3di(tetradecanoxy)propyl)carbamate or 2,3-di(tetradecanoxy)propyl-N-(ω-methoxy(polyethoxy)ethyl)carbamate.

[1320] In preferred embodiments, the PEGylated lipid is preferably derived from formula (IV) of published PCT patent application WO2018078053A1. Accordingly, PEGylated lipids derived from formula (IV) of published PCT patent application WO2018078053A1, and the respective disclosure relating thereto, are herewith incorporated by reference.

[1321] In a preferred embodiments, the at least one nucleic acid is complexed with one or more lipids thereby forming LNPs (or liposomes, nanoliposomes, lipoplexes), wherein the LNP comprises a polymer conjugated lipid, preferably a PEGylated lipid, wherein the PEG lipid is preferably derived from formula (IVa) of published PCT patent application WO2018078053A1. Accordingly, PEGylated lipid derived from formula (IVa) of published PCT patent application WO2018078053A1, and the respective disclosure relating thereto, is herewith incorporated by reference.

[1322] In a preferred embodiment, the at least one nucleic acid, preferably the at least one RNA, is complexed with one or more lipids thereby forming lipid nanoparticles (or liposomes, nanoliposomes, lipoplexes), wherein the LNP (or liposomes, nanoliposomes, lipoplexes) comprises a polymer conjugated lipid, preferably a PEGylated lipid/PEG lipid. In preferred embodiments, said PEG lipid or PEGylated lipid is of formula (IVa):

[chemical structure]

wherein n has a mean value ranging from 30 to 60, such as about 30±2, 32±2, 34±2, 36±2, 38±2, 40±2, 42±2, 44±2, 46±2, 48±2, 50±2, 52±2, 54±2, 56±2, 58±2, or 60±2. In a most preferred embodiment n is about 49. In another preferred embodiment n is about 45. In further preferred embodiments, said PEG lipid is of formula (IVa) wherein n is an integer selected such that the average molecular weight of the PEG lipid is about 2000 g/mol to about 3000 g/mol or about 2300 g/mol to about 2700 g/mol, even more preferably about 2500 g/mol.

[1323] The lipid of formula IVa as suitably used herein has the chemical term 2[(polyethylene glycol)-2000]-N,N-ditetradecylacetamide, also referred to as ALC-0159.

[1324] Further examples of PEG-lipids suitable in that context are provided in US20150376115A1 and WO2015199952, each of which is incorporated by reference in its entirety.

[1325] In some embodiments, LNPs (or liposomes, nanoliposomes, lipoplexes) include less than about 3, 2, or 1 mole percent of PEG or PEG-modified lipid, based on the total moles of lipid in the LNP. In further embodiments, LNPs (or liposomes, nanoliposomes, lipoplexes) comprise from about 0.1% to about 20% of the PEG-modified lipid on a molar basis, e.g., about 0.5 to about 10%, about 0.5 to about 5%, about 10%, about 5%, about 3.5%, about 3%, about 2.5%, about 2%, about 1.5%, about 1%, about 0.5%, or about 0.3% on a molar basis (based on 100% total moles of lipids in the LNP). In preferred embodiments, LNPs (or liposomes, nanoliposomes, lipoplexes) comprise from about 1.0% to about 2.0% of the PEG-modified lipid on a molar basis, e.g., about 1.2 to about 1.9%, about 1.2 to about 1.8%, about 1.3 to about 1.8%, about 1.4 to about 1.8%, about 1.5 to about 1.8%, about 1.6 to about 1.8%, in particular about 1.4%, about 1.5%, about 1.6%, about 1.7%, about 1.8%, about 1.9%, most preferably 1.7% (based on 100% total moles of lipids in the LNP). In various embodiments, the molar ratio of the cationic lipid to the PEGylated lipid ranges from about 100:1 to about 25:1.

[1326] In preferred embodiments, the LNP (or liposomes, nanoliposomes, lipoplexes) comprises one or more additional lipids, which stabilize the formation of particles during their formulation or during the manufacturing process (e.g. neutral lipid and/or one or more steroid or steroid analogue).

[1327] In preferred embodiments, the at least one nucleic acid, preferably the at least one RNA is complexed with one or more lipids thereby forming lipid nanoparticles (or liposomes, nanoliposomes, lipoplexes), wherein the LNP (or liposomes, nanoliposomes, lipoplexes) comprises one or more neutral lipid and/or one or more steroid or steroid analogue.

[1328] Suitable stabilizing lipids include neutral lipids and anionic lipids. The term “neutral lipid” refers to any one of a number of lipid species that exist in either an uncharged or neutral zwitterionic form at physiological pH. Representative neutral lipids include diacylphosphatidylcholines, diacylphosphatidylethanolamines, ceramides, sphingomyelins, dihydro sphingomyelins, cephalins, and cerebrosides.

[1329] In embodiments, the LNP (or liposome, nanoliposome, lipoplexe) comprises one or more neutral lipids, wherein the neutral lipid is selected from the group comprising distearoylphosphatidylcholine (DSPC), dioleoylphosphatidylcholine (DOPC), dipalmitoylphosphatidylcholine (DPPC), dioleoylphosphatidylglycerol (DOPG), dipalmitoylphosphatidylglycerol (DPPG), dioleoyl-phosphatidylethanolamine (DOPE), palmitoyloleoylphosphatidylcholine (POPC), palmitoyloleoyl-phosphatidylethanolamine (POPE) and dioleoyl-phosphatidylethanolamine 4-(N-maleimidomethyl)-cyclohexane-1carboxylate (DOPE-mal), dipalmitoyl phosphatidyl ethanolamine (DPPE), dimyristoylphosphoethanolamine (DMPE), distearoyl-phosphatidylethanolamine (DSPE), 16-O-monomethyl PE, 16-O-dimethyl PE, 18-1-trans PE, 1-stearioyl-2-oleoylphosphatidyethanol amine (SOPE), and 1,2-dielaidoyl-sn-glycero-3-phophoethanolamine (transDOPE), or mixtures thereof.

[1330] In some embodiments, the LNPs (or liposomes, nanoliposomes, lipoplexes) comprise a neutral lipid selected from DSPC, DPPC, DMPC, DOPC, POPC, DOPE and SM. In various embodiments, the molar ratio of the cationic lipid to the neutral lipid ranges from about 2:1 to about 8:1.

[1331] In preferred embodiments, the neutral lipid is 1,2-distearoyl-sn-glycero-3-phosphocholine (DSPC). Suitably, the molar ratio of the cationic lipid to DSPC may be in the range from about 2:1 to about 8:1.

[1332] In preferred embodiments, the steroid is cholesterol. Suitably, the molar ratio of the cationic lipid to cholesterol may be in the range from about 2:1 to about 1:1. In some embodiments, the cholesterol may be PEGylated.

[1333] The sterol can be about 10 mol % to about 60 mol % or about 25 mol % to about 40 mol % of the lipid particle. In one embodiment, the sterol is about 10, 15, 20, 25, 30, 35, 40, 45, 50, 55, or about 60 mol % of the total lipid present in the lipid particle. In another embodiment, the LNPs include from about 5% to about 50% on a molar basis of the sterol, e.g., about 15% to about 45%, about 20% to about 40%, about 48%, about 40%, about 38.5%, about 35%, about 34.4%, about 31.5% or about 31% on a molar basis (based upon 100% total moles of lipid in the lipid nanoparticle).

[1334] Preferably, lipid LNPs (or liposomes, nanoliposomes, lipoplexes) comprise:
[1335] (a) the at least one nucleic acid, preferably the at least one RNA, (b) a cationic lipid, (c) an aggregation reducing agent (such as polyethylene glycol (PEG) lipid or PEG-modified lipid), (d) optionally a non-cationic lipid (such as a neutral lipid), and (e) optionally, a sterol.

[1336] In some embodiments, the cationic lipids (as defined above), non-cationic lipids (as defined above), cholesterol (as defined above), and/or PEG-modified lipids (as defined above) may be combined at various relative molar ratios. For example, the ratio of cationic lipid to non-cationic lipid to cholesterol-based lipid to PEGylated lipid may be between about 30-60:20-35:20-30:1-15, or at a ratio of about 40:30:25:5, 50:25:20:5, 50:27:20:3, 40:30:20:10, 40:32:20:8, 40:32:25:3 or 40:33:25:2, or at a ratio of about 50:25:20:5, 50:20:25:5, 50:27:20:3 40:30:20:10, 40:30:25:5 or 40:32:20:8, 40:32:25:3 or 40:33:25:2, respectively.

[1337] In some embodiments, the LNPs (or liposomes, nanoliposomes, lipoplexes) comprise a lipid of formula (III), at least one nucleic acid, preferably the at least one RNA as defined herein, a neutral lipid, a steroid and a PEGylated lipid. In preferred embodiments, the lipid of formula (III) is lipid compound 111-3 (ALC-0315), the neutral lipid is DSPC, the steroid is cholesterol, and the PEGylated lipid is the compound of formula (IVa).

[1338] In a preferred embodiment, the LNP (or liposomes, nanoliposomes, lipoplexes) consists essentially of (i) at least one cationic lipid; (ii) a neutral lipid; (iii) a sterol, e.g., cholesterol; and (iv) a PEG-lipid, e.g. PEG-DMG or PEG-cDMA, in a molar ratio of about 20-60% cationic lipid: 5-25% neutral lipid: 25-55% sterol; 0.5-15% PEG-lipid.

[1339] In particularly preferred embodiments, the at least one nucleic acid is complexed with one or more lipids thereby forming lipid nanoparticles (or liposomes, nanoliposomes, lipoplexes), wherein the LNP (or liposome, nanoliposome, lipoplex) comprises
[1340] (i) at least one cationic lipid as defined herein, preferably a lipid of formula (III), more preferably lipid III-3 (ALC-0315);
[1341] (ii) at least one neutral lipid as defined herein, preferably 1,2-distearoyl-sn-glycero-3-phosphocholine (DSPC);
[1342] (iii) at least one steroid or steroid analogue as defined herein, preferably cholesterol; and
[1343] (iv) at least one polymer conjugated lipid, preferably a PEG-lipid as defined herein, e.g. PEG-DMG or PEG-cDMA, preferably a PEGylated lipid that is or is derived from formula (Iva; ALC-0159).

[1344] In particularly preferred embodiments, the at least one nucleic acid is complexed with one or more lipids thereby forming lipid nanoparticles (LNP), wherein the LNP comprises (i) to (iv) in a molar ratio of about 20-60% cationic lipid: 5-25% neutral lipid: 25-55% sterol; 0.5-15% polymer conjugated lipid, preferably PEG-lipid.

[1345] In one preferred embodiment, the lipid nanoparticle (or liposome, nanoliposome, lipoplexe) comprises: a cationic lipid with formula (III) and/or PEG lipid with formula (IV), optionally a neutral lipid, preferably 1,2-distearoyl-sn-glycero-3-phosphocholine (DSPC) and optionally a steroid, preferably cholesterol, wherein the molar ratio of the cationic lipid to DSPC is optionally in the range from about 2:1 to 8:1, wherein the molar ratio of the cationic lipid to cholesterol is optionally in the range from about 2:1 to 1:1.

[1346] In a particular preferred embodiment, the composition comprises lipid nanoparticles (LNPs), which have a molar ratio of approximately 50:10:38.5:1.5, preferably 47.5:10:40.8:1.7 or more preferably 47.4:10:40.9:1.7 (i.e. proportion (mol %) of cationic lipid (preferably lipid III-3 (ALC-0315)), DSPC, cholesterol and polymer conjugated lipid, preferably PEG-lipid (preferably PEG-lipid of formula (IVa) with n=49, even more preferably PEG-lipid of formula (IVa) with n=45; ALC-0159); solubilized in ethanol).

[1347] In embodiments where the composition is a multivalent composition as defined above, the RNA species, preferably mRNA species of the multivalent composition may be formulated separately, preferably formulated separately in liposomes or LNPs. Suitably, the RNA species of the multivalent composition are separately formulated in LNPs which have a molar ratio of approximately 50:10:38.5:1.5, preferably 47.5:10:40.8:1.7 or more preferably 47.4:10:40.9:1.7 proportion (mol %) of cationic lipid III-3 (ALC-0315), DSPC, cholesterol and PEG-lipid of formula (IVa) (with n=49 or with n=45). Nucleic acid species for multivalent compositions are preferably selected as defined above (see section “Combinations of M, N, NSP3, NSP4, NSP6, NSP13, NSP14, ORF3A, ORF8, E, and/or S”).

[1348] The total amount of nucleic acid in the lipid nanoparticles may vary and is defined depending on the e.g. nucleic acid to total lipid w/w ratio. In one embodiment of the invention the nucleic acid, in particular the RNA to total lipid ratio is less than 0.06 w/w, preferably between 0.03 w/w and 0.04 w/w.

[1349] In preferred embodiments, the wt/wt ratio of lipid to nucleic acid is from about 10:1 to about 60:1, preferably from about 20:1 to about 30:1, for example about 25:1.

[1350] In preferred embodiments, the n/p ratio of the liposome, lipid nanoparticle (LNP), lipoplex, and/or nanoliposome encapsulating the nucleic acid is in a range from about 1 to about 10, preferably in a range from about 5 to about 7, more preferably about 6.

[1351] In some embodiments, the lipid nanoparticles (or liposomes, nanoliposomes, lipoplexes) are composed of only three lipid components, namely imidazole cholesterol ester (ICE), 1,2-dioleoyl-sn-glycero-3-phosphoethanolamine (DOPE), and 1,2-dimyristoyl-sn-glycerol, methoxypolyethylene glycol (DMG-PEG-2K)

[1352] In one embodiment, the lipid nanoparticle (or liposomes, nanoliposomes, lipoplexes) of the composition comprises a cationic lipid, a steroid, a neutral lipid, and a polymer conjugated lipid, preferably a pegylated lipid. Preferably, the polymer conjugated lipid is a pegylated lipid or PEG-lipid. In a specific embodiment, lipid nanoparticles comprise a cationic lipid resembled by the cationic lipid COATSOME® SS-EC (former name: SS-33/4PE-15; NOF Corporation, Tokyo, Japan), in accordance with the following formula

[chemical structure]

[1353] As described further below, those lipid nanoparticles are termed “GN01”.

[1354] Furthermore, in a specific embodiment, the GN01 lipid nanoparticles comprise a neutral lipid being resembled by the structure 1,2-diphytanoyl-sn-glycero-3-phosphoethanolamine (DPhyPE):

[chemical structure]

[1355] Furthermore, in a specific embodiment, the GN01 lipid nanoparticles comprise a polymer conjugated lipid, preferably a pegylated lipid, being 1,2-dimyristoyl-rac-glycero-3-methoxypolyethylene glycol 2000 (DMG-PEG 2000) having the following structure:

[chemical structure]

[1356] As used in the art, “DMG-PEG 2000” is considered a mixture of 1,2-DMG PEG2000 and 1,3-DMG PEG2000 in ˜97:3 ratio.

[1357] Accordingly, GN01 lipid nanoparticles (GN01-LNPs) according to one of the preferred embodiments comprise a SS-EC cationic lipid, neutral lipid DPhyPE, cholesterol, and the polymer conjugated lipid (pegylated lipid) 1,2-dimyristoyl-rac-glycero-3-methoxypolyethylene glycol (PEG-DMG).

[1358] In a preferred embodiment, the GN01 LNPs comprise:
[1359] (a) cationic lipid SS-EC (former name: SS-33/4PE-15; NOF Corporation, Tokyo, Japan) at an amount of 45-65 mol %;
[1360] (b) cholesterol at an amount of 25-45 mol %;
[1361] (c) DPhyPE at an amount of 8-12 mol %; and
[1362] (d) PEG-DMG 2000 at an amount of 1-3 mol %;
   each amount being relative to the total molar amount of all lipidic excipients of the GN01 lipid nanoparticles.

[1363] In a further preferred embodiment, the GN01 lipid nanoparticles as described herein comprises 59 mol % cationic lipid, 10 mol % neutral lipid, 29.3 mol % steroid and 1.7 mol % polymer conjugated lipid, preferably pegylated lipid. In a most preferred embodiment, the GN01 lipid nanoparticles as described herein comprise 59 mol % cationic lipid SS-EC, 10 mol % DPhyPE, 29.3 mol % cholesterol and 1.7 mol % DMG-PEG 2000.

[1364] The amount of the cationic lipid relative to that of the nucleic acid in the GN01 lipid nanoparticle may also be expressed as a weight ratio (abbreviated e.g. “m/m”). For example, the GN01 lipid nanoparticles comprise the at least one nucleic acid, preferably the at least one RNA at an amount such as to achieve a lipid to RNA weight ratio in the range of about 20 to about 60, or about 10 to about 50. In other embodiments, the ratio of cationic lipid to nucleic acid or RNA is from about 3 to about 15, such as from about 5 to about 13, from about 4 to about 8 or from about 7 to about 11. In a very preferred embodiment of the present invention, the total lipid/RNA mass ratio is about 40 or 40, i.e. about 40 or 40 times mass excess to ensure RNA encapsulation. Another preferred RNA/lipid ratio is between about 1 and about 10, about 2 and about 5, about 2 and about 4, or preferably about 3.

[1365] Further, the amount of the cationic lipid may be selected taking the amount of the nucleic acid cargo such as the RNA compound into account. In one embodiment, the N/P ratio can be in the range of about 1 to about 50. In another embodiment, the range is about 1 to about 20, about 1 to about 10, about 1 to about 5. In one preferred embodiment, these amounts are selected such as to result in an N/P ratio of the GN01 lipid nanoparticles or of the composition in the range from about 10 to about 20. In a further very preferred embodiment, the N/P is 14 (i.e. 14 times mol excess of positive charge to ensure nucleic acid encapsulation).

[1366] In a preferred embodiment, GN01 lipid nanoparticles comprise 59 mol % cationic lipid COATSOME® SS-EC (former name: SS-33/4PE-15 as apparent from the examples section; NOF Corporation, Tokyo, Japan), 29.3 mol % cholesterol as steroid, 10 mol % DPhyPE as neutral lipid/phospholipid and 1.7 mol % DMG-PEG 2000 as polymer conjugated lipid. A further inventive advantage connected with the use of DPhyPE is the high capacity for fusogenicity due to its bulky tails, whereby it is able to fuse at a high level with endosomal lipids. For “GN01”, N/P (lipid to nucleic acid, e.g. RNA mol ratio) preferably is 14 and total lipid/RNA mass ratio preferably is 40 (m/m).

[1367] In other embodiments, the at least one nucleic acid, preferably the at least one RNA, is complexed with one or more lipids thereby forming lipid nanoparticles (or liposomes, nanoliposomes, lipoplexes), wherein the LNP (or liposomes, nanoliposomes, lipoplexes) comprises
[1368] 1. at least one cationic lipid;
[1369] Ii. at least one neutral lipid;
[1370] Iii. at least one steroid or steroid analogue; and
[1371] Iiii. at least one PEG-lipid as defined herein,
   wherein the cationic lipid is DLin-KC2-DMA (50 mol %) or DLin-MC3-DMA (50 mol %), the neutral lipid is DSPC (10 mol %), the PEG lipid is PEG-DOMG (1.5 mol %) and the structural lipid is cholesterol (38.5 mol %).

[1372] In other embodiments, the at least one nucleic acid (e.g. DNA or RNA), preferably the at least one RNA, is complexed with one or more lipids thereby forming lipid nanoparticles (LNP), wherein the LNP comprises SS15/Chol/DOPE (or DOPC)/DSG-5000 at mol % 50/38.5/10/1.5.

[1373] In other embodiments, the at least one nucleic acid may be formulated in liposomes, e.g. in liposomes as described in WO2019222424, WO2019226925, WO2019232095, WO2019232097, or WO2019232208, the disclosure of WO2019222424, WO2019226925, WO2019232095, WO2019232097, or WO2019232208 relating to liposomes or lipid-based carrier molecules herewith incorporated by reference.

[1374] In various embodiments, LNPs that suitably encapsulates the at least one nucleic acid have a mean diameter of from about 50 nm to about 200 nm, from about 60 nm to about 200 nm, from about 70 nm to about 200 nm, from about 80 nm to about 200 nm, from about 90 nm to about 200 nm, from about 90 nm to about 190 nm, from about 90 nm to about 180 nm, from about 90 nm to about 170 nm, from about 90 nm to about 160 nm, from about 90 nm to about 150 nm, from about 90 nm to about 140 nm, from about 90 nm to about 130 nm, from about 90 nm to about 120 nm, from about 90 nm to about 100 nm, from about 70 nm to about 90 nm, from about 80 nm to about 90 nm, from about 70 nm to about 80 nm, or about 30 nm, 35 nm, 40 nm, 45 nm, 50 nm, 55 nm, 60 nm, 65 nm, 70 nm, 75 nm, 80 nm, 85 nm, 90 nm, 95 nm, 100 nm, 105 nm, 110 nm, 115 nm, 120 nm, 125 nm, 130 nm, 135 nm, 140 nm, 145 nm, 150 nm, 160 nm, 170 nm, 180 nm, 190 nm, or 200 nm and are substantially non-toxic. As used herein, the mean diameter may be represented by the z-average as determined by dynamic light scattering as commonly known in the art.

[1375] In another preferred embodiment of the invention the lipid nanoparticles have a hydrodynamic diameter in the range from about 50 nm to about 300 nm, or from about 60 nm to about 250 nm, from about 60 nm to about 150 nm, or from about 60 nm to about 120 nm, respectively.

[1376] In another preferred embodiment of the invention the lipid nanoparticles have a hydrodynamic diameter in the range from about 50 nm to about 300 nm, or from about 60 nm to about 250 nm, from about 60 nm to about 150 nm, or from about 60 nm to about 120 nm, respectively.

[1377] In another preferred embodiments, the lipid nanoparticles have a Z-average size in a range of about 60 nm to about 120 nm, preferably less than about 120 nm, more preferably less than about 100 nm, most preferably less than about 80 nm.

[1378] Suitably, LNPs comprise less than about 10%, 9%, 8%, 7%, 6%, 5%, 4%, 3%, 2%, 1% LNPs that have a particle size exceeding about 500 nm. Suitably, the LNPs comprise less than about 10%, 9%, 8%, 7%, 6%, 5%, 4%, 3%, 2%, 1% LNPs that have a particle size smaller than about 20 nm.

[1379] The polydispersity index (PDI) of the nanoparticles (e.g. LNPs) is typically in the range of 0.1 to 0.5. In a particular embodiment, a PDI is below 0.2. Typically, the PDI is determined by dynamic light scattering.

[1380] In preferred embodiments, the composition has a polydispersity index (PDI) value of less than about 0.4, preferably of less than about 0.3, more preferably of less than about 0.2, most preferably of less than about 0.1.

[1381] In various embodiments, nucleic acid, e.g., RNA of the pharmaceutical composition does not exceed a certain proportion of free RNA.

[1382] In this context, the term “free RNA” or “non-complexed RNA” or “non-encapsulated RNA” comprise the RNA molecules that are not encapsulated in the lipid-based carriers as defined herein. During formulation of the liquid composition (e.g. during encapsulation of the RNA into the lipid-based carriers), free RNA may represent a contamination or an impurity.

[1383] The skilled person can choose from a variety of different methods for determining the amount and/or the proportion of free nucleic acid of free RNA in the liquid composition. Free RNA in the liquid composition may be determined by chromatographic methods (e.g. AEX, SEC) or by using probes (e.g. dyes) that bind to free RNA in the composition. In the context of the invention, the amount of free RNA or non-encapsulated RNA may be determined using a dye based assay. Suitable dyes that may be used to determine the amount and/or the proportion of free RNA comprise RiboGreen®, PicoGreen® dye, OliGreen® dye, QuantiFluor® RNA dye, Qubit® RNA dye, Quant-iT™ RNA dye, TOTO®-1 dye, YOYO®-1 dye. Such dyes are suitable to discriminate between free RNA and encapsulated RNA. Reference standards consisting of defined amounts of free RNA or encapsulated RNA may be used and mixed with the respective reagent (e.g. RiboGreen® reagent (Excitation 500 nm/Emission 525 nm)) as recommended by the supplier's instructions. Typically, the free RNA of the liquid composition is quantitated using the Quant-iT RiboGreen RNA Reagent according to the manufacturer's instructions. The proportion of free RNA in the context of the invention is typically determined using a RiboGreen assay.

[1384] In embodiments, a composition comprises free nucleic acid, such as free RNA ranging from about 30% to about 0%. In embodiments, the composition comprises about 20% free RNA (and about 80% encapsulated RNA), about 15% free RNA (and about 85% encapsulated RNA), about 10% free RNA (and about 90% encapsulated RNA), or about 5% free RNA (and about 95% encapsulated RNA). In preferred embodiments, the composition comprises less than about 20% free RNA, preferably less than about 15% free RNA, more preferably less than about 10% free RNA, most preferably less than about 5% free RNA.

[1385] In aspects comprising RNA nucleic acids, the term “encapsulated RNA” comprise the RNA molecules that are encapsulated in the lipid-based carriers as defined herein. The proportion of encapsulated RNA in the context of the invention is typically determined using a RiboGreen assay.

[1386] Accordingly, in embodiments, about 70% to about 100% of the RNA in the composition is encapsulated in the lipid-based carriers. In embodiments, the liquid composition comprises about 80% encapsulated RNA (and about 20% free RNA), about 85% encapsulated RNA (and about 15% free RNA), about 90% encapsulated RNA (and about 10% free RNA), or about 95% encapsulated RNA (and 5% about free RNA).

[1387] In preferred embodiments, 80% of the nucleic acid (e.g., RNA) comprised in the composition is encapsulated, preferably 85% of the RNA comprised in the composition is encapsulated, more preferably 90% of the RNA comprised in the composition is encapsulated, most preferably 95% of the RNA comprised in the composition is encapsulated.

[1388] In embodiments, the lipid-based carriers encapsulating the RNA has been purified by at least one purification step, preferably by at least one step of TFF and/or at least one step of clarification and/or at least one step of filtration. Suitably, the purified composition w comprises less than about 500ppM ethanol, preferably less than about 50ppM ethanol, more preferably less than about 5ppM ethanol.

[1389] In various embodiments, the pharmaceutical composition of the first aspect comprises a sugar in a concentration of about 50 mM to about 300 mM, preferably sucrose in a concentration of about 150 mM.

[1390] In embodiments where more than one or a plurality, e.g. 2, 3, 4, 5, 6, 7, 8, 9, 10, 11, 12, 13, 14, 15 of nucleic acid species of the invention are comprised in the composition, said more than one or said plurality e.g. 2, 3, 4, 5, 6, 7, 8, 9, 10, 11, 12, 13, 14, 15 of nucleic acid species may be complexed within one or more lipids thereby forming LNPs comprising more than one or a plurality, e.g. 2, 3, 4, 5, 6, 7, 8, 9, 10, 11, 12, 13, 14, 15 of different nucleic acid species.

[1391] In embodiments, the nucleic acid formulation (e.g. Polymers, LNPs, liposomes, nanoliposomes, lipoplexes) described herein may be lyophilized in order to improve storage stability of the formulation and/or the at least one nucleic acid. In embodiments, the nucleic acid formulation (e.g. Polymers, LNPs, liposomes, nanoliposomes, lipoplexes) described herein may be spray dried in order to improve storage stability of the formulation and/or the at least one nucleic acid. Lyoprotectants for lyophilization and or spray drying may be selected from trehalose, sucrose, mannose, dextran and inulin.

[1392] A preferred lyoprotectant is sucrose, optionally comprising a further lyoprotectant. A further preferred lyoprotectant is trehalose, optionally comprising a further lyoprotectant.

[1393] Suitably, the pharmaceutical composition, e.g. the composition comprising LNPs, is lyophilized (e.g. according to WO2016165831 or WO2011069586) to yield a temperature stable dried nucleic acid (powder) composition as defined herein (e.g. RNA or DNA). The composition, e.g. the composition comprising LNPs, may also be dried using spray-drying or spray-freeze drying (e.g. according to WO2016184575 or WO2016184576) to yield a temperature stable composition (powder) as defined herein.

[1394] Accordingly, in preferred embodiments, the pharmaceutical composition is a dried composition.

[1395] The term “dried composition” as used herein has to be understood as composition that has been lyophilized, or spray-dried, or spray-freeze dried as defined above to obtain a temperature stable dried composition (powder) e.g. comprising LNP complexed RNA (as defined above).

[1396] In embodiments, lyophilized or spray-dried composition has a water content of less than about 10%.

[1397] In preferred embodiments, lyophilized or spray-dried composition has a water content of between about 0.5% and 5%.

[1398] In preferred embodiments, the lyophilized or spray-dried composition is stable for at least 2 months after storage at about 5° C., preferably for at least 3 months, 4 months, 5 months, 6 months.

[1399] According to further embodiments, the pharmaceutical composition may comprise at least one adjuvant.

[1400] Suitably, the adjuvant is preferably added to enhance the immunostimulatory properties of the composition.

[1401] The term “adjuvant” as used herein will be recognized and understood by the person of ordinary skill in the art, and is for example intended to refer to a pharmacological and/or immunological agent that may modify, e.g. enhance, the effect of other agents or that may be suitable to support administration and delivery of the composition. The term “adjuvant” refers to a broad spectrum of substances. Typically, these substances are able to increase the immunogenicity of antigens. For example, adjuvants may be recognized by the innate immune systems and, e.g., may elicit an innate immune response (that is, a non-specific immune response). “Adjuvants” typically do not elicit an adaptive immune response. In the context of the invention, adjuvants may enhance the effect of the antigenic peptide or protein provided by the nucleic acid. In that context, the at least one adjuvant may be selected from any adjuvant known to a skilled person and suitable for the present case, i.e. supporting the induction of an immune response in a subject, e.g. in a human subject.

[1402] Accordingly, the pharmaceutical composition may comprise at least one adjuvant, wherein the at least one adjuvant may be suitably selected from any adjuvant provided in WO2016203025. Adjuvants disclosed in any of the claims 2 to 17 of WO2016203025, preferably adjuvants disclosed in claim 17 of WO2016203025 are particularly suitable, the specific content relating thereto herewith incorporated by reference. Adjuvants may suitably used and comprised in the composition of the first aspect, or the vaccine of the second aspect, to e.g. reduce the amount of nucleic acid required for a sufficient immune response against the encoded protein and/or the improve the efficacy of the composition/the vaccine for treatment/vaccination, in particular of the elderly. A suitable adjuvant in the context of a coronavirus composition or vaccine (in particular for compositions comprising a polypeptide of the third aspect) may be a Toll-like receptor 9 (TLR9) agonist adjuvant, CpG 1018TM.

[1403] The pharmaceutical composition may comprise, besides the components specified herein, at least one further component which may be selected from the group consisting of further antigens (e.g. in the form of a peptide or protein, preferably derived from a coronavirus as specified herein and/or a further virus as specified herein) or further antigen-encoding nucleic acids; a further immunotherapeutic agent; one or more auxiliary substances (cytokines, such as monokines, lymphokines, interleukins or chemokines); or any further compound, which is known to be immune stimulating due to its binding affinity (as ligands) to human Toll-like receptors; and/or an adjuvant nucleic acid, preferably an immunostimulatory RNA (isRNA), e.g. CpG-RNA etc.

[1404] In embodiments, the pharmaceutical composition comprises at least one antagonist of at least one RNA sensing pattern recognition receptor. Such an antagonist may preferably be co-formulated in lipid-based carriers as defined herein.

[1405] Suitable antagonist of at least one RNA sensing pattern recognition receptor are disclosed in PCT patent application PCT/EP2020/072516, the full disclosure herewith incorporated by reference. In particular, the disclosure relating to suitable antagonist of at least one RNA sensing pattern recognition receptors as defined in any one of the claims 1 to 94 of PCT/EP2020/072516 are incorporated.

[1406] In preferred embodiments, the composition comprises at least one antagonist of at least one RNA sensing pattern recognition receptor selected from a Toll-like receptor, preferably TLR7 and/or TLR8.

[1407] In embodiments, the at least one antagonist of at least one RNA sensing pattern recognition receptor is selected from a nucleotide, a nucleotide analog, a nucleic acid, a peptide, a protein, a small molecule, a lipid, or a fragment, variant or derivative of any of these.

[1408] In preferred embodiments, the at least one antagonist of at least one RNA sensing pattern recognition receptor is a single stranded oligonucleotide, preferably a single stranded RNA Oligonucleotide.

[1409] In embodiments, the antagonist of at least one RNA sensing pattern recognition receptor is a single stranded oligonucleotide that comprises or consists of a nucleic acid sequence identical or at least 70%, 80%, 85%, 86%, 87%, 88%, 89%, 90%, 91%, 92%, 93%, 94%, 95%, 96%, 97%, 98%, or 99% identical to a nucleic acid sequence selected from the group consisting of SEQ ID NOs: 85-212 of PCT/EP2020/072516, or fragments of any of these sequences.

[1410] In preferred embodiments, the antagonist of at least one RNA sensing pattern recognition receptor is a single stranded oligonucleotide that comprises or consists of a nucleic acid sequence identical or at least 70%, 80%, 85%, 86%, 87%, 88%, 89%, 90%, 91%, 92%, 93%, 94%, 95%, 96%, 97%, 98%, or 99% identical to a nucleic acid sequence selected from the group consisting of SEQ ID NOs: 85-87, 149-212 of PCT/EP2020/072516, or fragments of any of these sequences.

[1411] A particularly preferred antagonist of at least one RNA sensing pattern recognition receptor in the context of the invention is 5′-GAG CGmG CCA-3′ (SEQ ID NO: 85 of PCT/EP2020/072516), or a fragment thereof.

[1412] In embodiments, the molar ratio of the at least one antagonist of at least one RNA sensing pattern recognition receptor as defined herein to the at least one nucleic acid, preferably RNA encoding an antigenic peptide or protein as defined herein suitably ranges from about 1:1, to about 100:1, or ranges from about 20:1, to about 80:1.

[1413] In embodiments, the wherein the weight to weight ratio of the at least one antagonist of at least one RNA sensing pattern recognition receptor as defined herein to the at least one nucleic acid, preferably RNA encoding an antigenic peptide or protein as defined herein suitably ranges from about 1:1, to about 1:30, or ranges from about 1:2, to about 1:10.

[1414] In preferred embodiments, administration of the pharmaceutical composition as defined herein induces an antigen-specific humoral immune responses against the peptide or protein encoded by the at least one nucleic acid in said subject. Suitably, administration of the pharmaceutical composition as defined herein induces an antigen-specific humoral immune responses against all Coronavirus peptide or proteins (e.g., M, N, S) encoded by the at least one nucleic acid in said subject.

[1415] In preferred embodiments, administration of the pharmaceutical composition as defined herein induces antigen-specific T-cell responses against the peptide or protein encoded by the at least one nucleic acid in said subject. Suitably, administration of the pharmaceutical composition as defined herein induces an antigen-specific T-cell responses against all Coronavirus peptide or proteins (e.g., M, N, S) encoded by the at least one nucleic acid in said subject. In preferred embodiments, the T cell immune response comprises a CD4+ T cell immune response and/or a CD8+ T cell immune response.

[1416] In preferred embodiments, administration of the pharmaceutical composition as defined herein induces antigen-specific B-cell memory response against the peptide or protein encoded by the at least one nucleic acid in said subject. Suitably, administration of the pharmaceutical composition as defined herein induces an antigen-specific B-cell memory response against all Coronavirus peptide or proteins (e.g., M, N, S) encoded by the at least one nucleic acid in said subject.

[1417] In preferred embodiments, administration of the pharmaceutical composition as defined herein induces Coronavirus neutralizing antibodies induced in said subject.

[1418] In preferred embodiments, administration of the pharmaceutical composition as defined herein more Coronavirus neutralizing antibodies are induced in said subject than compared to Coronavirus neutralizing antibodies induced upon administration of a reference composition.

[1419] A reference composition (or vaccine) may be a corresponding peptide/protein-based vaccine or a nucleic-acid-based vaccine that comprises a nucleic acid encoding S (and lacking other nucleic acids encoding membrane protein (M), nucleocapsid protein (N), non-structural protein, and/or accessory protein or an immunogenic fragment or immunogenic variant thereof).

[1420] Vaccine, Multivalent Coronavirus Vaccine

[1421] In a second aspect, the invention relates to a nucleic acid based Coronavirus vaccine, preferably a multivalent Coronavirus vaccine.

[1422] It has to be noted that specific features and embodiments that are described in the context of the first aspect of the invention, that is the pharmaceutical composition of the invention, are likewise applicable to the second aspect (vaccine), the third aspect (kit or kit of parts of the invention), or further aspects including e.g. medical uses (first and second medical uses) and e.g. method of treatments.

[1423] In embodiments, the nucleic acid-based vaccine comprises one or more of M, N, NSP3, NSP4, NSP6, NSP13, NSP14, ORF3A, ORF8, and/or E, wherein the antigenic peptide or proteins are selected or derived from the same Coronavirus, preferably SARS-CoV-2. In embodiments, the pharmaceutical composition comprises one or more of M, N, NSP3, NSP4, NSP6, NSP13, NSP14, ORF3A, ORF8, and/or E, wherein the antigenic peptide or proteins are selected or derived from different Coronaviruses, preferably different pandemic Coronaviruses, e.g. SARS-CoV-2, SARS-CoV-1, and/or MERS-CoV. (suitable nucleic acid sequences encoding M, N, NSP3, NSP4, NSP6, NSP13, NSP14, ORF3A, ORF8, and/or E are defined in the first aspect).

[1424] In embodiments, the pharmaceutical composition comprises 2, 3, 4, 5, 6, 7, or more of M, N, NSP3, NSP4, NSP6, NSP13, NSP14, ORF3A, ORF8, and/or E wherein the antigenic peptide or proteins are selected or derived from the same Coronavirus, preferably SARS-CoV-2. In embodiments, the 2, 3, 4, 5, 6, 7 or more antigenic peptide or proteins are selected or derived from different Coronaviruses, preferably different pandemic Coronaviruses, e.g. SARS-CoV-2, SARS-CoV-1, and/or MERS-CoV. (suitable nucleic acid sequences encoding M, N, NSP3, NSP4, NSP6, NSP13, NSP14, ORF3A, ORF8, and/or E are defined in the first aspect).

[1425] In preferred embodiments, the pharmaceutical composition comprises 2, 3, 4, 5, 6, 7, or more of M, N, NSP3, NSP4, NSP6, NSP13, NSP14, ORF3A, ORF8, and/or E additionally comprising S, wherein the antigenic peptide or proteins are selected or derived from the same Coronavirus, preferably from SARS-CoV-2. In embodiments, the pharmaceutical composition comprises 2, 3, 4, 5, 6, 7, or more of M, N, NSP3, NSP4, NSP6, NSP13, NSP14, ORF3A, ORF8, and/or E additionally comprising S, wherein the antigenic peptide or proteins are selected or derived from different Coronaviruses, preferably different pandemic Coronaviruses, e.g. SARS-CoV-2, SARS-CoV-1, and/or MERS-CoV (suitable nucleic acid sequences encoding M, N, NSP3, NSP4, NSP6, NSP13, NSP14, ORF3A, ORF8, and/or E are defined in the first aspect).

[1426] Accordingly, in preferred embodiments, the vaccine is a multivalent Coronavirus vaccine, preferably a multivalent SARS-CoV-2 vaccine.

[1427] Further suitable combinations of antigens (provided nucleic acids) are defined in the context of the first aspect.

[1428] In embodiments, the vaccine is against multiple different Coronaviruses.

[1429] In embodiments, the vaccine is against at least one SARS-CoV-2, and at least one further (pandemic) Coronavirus.

[1430] According to a preferred embodiment, the vaccine as defined herein may further comprise a pharmaceutically acceptable carrier or excipient and optionally at least one adjuvant as specified in the context of the first aspect.

[1431] The vaccine typically comprises a safe and effective amount of nucleic acid (e.g. DNA or RNA), preferably RNA of the first aspect. As used herein, “safe and effective amount” means an amount of nucleic acid component sufficient to significantly induce a positive modification of a disease or disorder related to an infection with a virus as specified herein. At the same time, a “safe and effective amount” is small enough to avoid serious side-effects. In relation to the nucleic acid, composition, or vaccine of the present invention, the expression “safe and effective amount” preferably means an amount of nucleic acid, composition, or vaccine that is suitable for stimulating the adaptive immune system against a virus as specified herein in such a manner that no excessive or damaging immune reactions (e.g. innate immune responses) are achieved.

[1432] A “safe and effective amount” of the nucleic acid, composition, or vaccine as defined herein will vary in connection with the particular condition to be treated and also with the age and physical condition of the patient to be treated, the severity of the condition, the duration of the treatment, the nature of the accompanying therapy, of the particular pharmaceutically acceptable carrier used, and similar factors, within the knowledge and experience of the skilled person. Moreover, the “safe and effective amount” of the nucleic acid, the composition, or vaccine may depend from application/delivery route (intradermal, intramuscular, intranasal), application device (jet injection, needle injection, microneedle patch, electroporation device) and/or complexation/formulation (protamine complexation or LNP encapsulation, DNA or RNA). Moreover, the “safe and effective amount” of the nucleic acid, the composition, or the vaccine may depend from the physical condition of the treated subject (infant, pregnant women, immunocompromised human subject etc.).

[1433] The pharmaceutically acceptable carrier as used herein preferably includes the liquid or non-liquid basis of the inventive coronavirus vaccine. If the inventive vaccine is provided in liquid form, the carrier will be water, typically pyrogen-free water; isotonic saline or buffered (aqueous) solutions, e.g. phosphate, citrate etc. buffered solutions. Preferably, Ringer-Lactate solution is used as a liquid basis for the vaccine or the composition according to the invention as described in WO2006122828, the disclosure relating to suitable buffered solutions incorporated herewith by reference. Other preferred solutions used as a liquid basis for the vaccine or the composition, in particular for compositions/vaccines comprising LNPs, comprise sucrose and/or trehalose.

[1434] The choice of a pharmaceutically acceptable carrier or excipient as defined herein is determined, in principle, by the manner, in which the pharmaceutical composition(s) or vaccine according to the invention is administered. The Coronavirus vaccine is preferably administered locally. Routes for local administration in general include, for example, topical administration routes but also intradermal, transdermal, subcutaneous, or intramuscular injections or intralesional, intracranial, intrapulmonal, intracardial, intraarticular and sublingual injections. More preferably, composition or vaccines according to the present invention may be administered by an intradermal, subcutaneous, or intramuscular route, preferably by injection, which may be needle-free and/or needle injection. Preferred in the context of the invention is intramuscular injection. Compositions/vaccines are therefore preferably formulated in liquid or solid form. The suitable amount of the vaccine or composition according to the invention to be administered can be determined by routine experiments, e.g. by using animal models. Such models include, without implying any limitation, rabbit, sheep, mouse, rat, dog and non-human primate models. Preferred unit dose forms for injection include sterile solutions of water, physiological saline or mixtures thereof. The pH of such solutions should be adjusted to about 7.4.

[1435] In embodiments, the Coronavirus vaccine is provided in lyophilized or spray-dried form. Such a lyophilized or spray-dried vaccine may comprise trehalose and/or sucrose and may be re-constituted in a suitable liquid buffer before administration to a subject. In some embodiments, a lyophilized vaccine comprises RNA complexed with LNPs. In some embodiments, a lyophilized composition has a water content of less than about 10%. For example, a lyophilized composition can have a water content of about 0.1% to 10%, 0.1% to 7.5%, or 0.5% to 7.5%, preferably the lyophilized composition has a water content of about 0.5% to about 5.0%.

[1436] The vaccine can be used according to the invention for human medical purposes and also for veterinary medical purposes (mammals, vertebrates, or avian species).

[1437] In preferred embodiments, the composition or vaccine elicits an adaptive immune response against at least one Coronavirus, preferably against a pandemic Coronavirus, e.g. against SARS-CoV-2, SARS-CoV-1, or MERS-CoV.

[1438] In preferred embodiments, the vaccine elicits neutralizing antibody titers against at least one Coronavirus, preferably against a pandemic Coronavirus, e.g. against SARS-CoV-2, SARS-CoV-1, or MERS-CoV.

[1439] In some embodiments, the neutralizing antibody titer is at least 100 neutralizing units per milliliter (NU/mL), at least 500NU/mL, or at least 1000NU/mL.

[1440] In some embodiments, detectable levels of the respective antigen are produced in a subject at about 1 to about 72 hours post administration of the composition or the vaccine.

[1441] In some embodiments, a neutralizing antibody titer (against Coronavirus) of at least 100NU/ml, at least 500NU/ml, or at least 1000NU/ml is produced in the serum of the subject at about 1 days to about 72 days post administration of the composition or the vaccine.

[1442] In particularly preferred embodiments, the vaccine or the composition elicits functional antibodies that can effectively neutralize a Coronavirus (e.g. SARS-CoV-2 coronavirus).

[1443] In further preferred embodiments, the vaccine or the composition elicits mucosal IgA immunity by inducing of mucosal IgA antibodies.

[1444] In particularly preferred embodiments, the vaccine or the composition elicits functional antibodies that can effectively neutralize the Coronavirus (e.g. SARS-CoV-2 coronavirus).

[1445] In further particularly preferred embodiments, the vaccine or the composition induces broad, functional cellular T-cell responses against the Coronavirus (e.g. SARS-CoV-2 coronavirus).

[1446] In further particularly preferred embodiments, the vaccine or the composition induces a well-balanced B cell and T cell response against the Coronavirus (e.g. SARS-CoV-2 coronavirus).

[1447] In some embodiments, the neutralizing antibody titer is sufficient to reduce Coronavirus virus infection by at least 50% relative to a neutralizing antibody titer of an unvaccinated control subject or relative to a neutralizing antibody titer of a subject vaccinated with a live attenuated viral vaccine, an inactivated viral vaccine, or a protein sub unit viral vaccine.

[1448] In some embodiments, the neutralizing antibody titer and/or a T cell immune response is sufficient to reduce the rate of asymptomatic viral infection relative to the neutralizing antibody titer of unvaccinated control subjects.

[1449] In some embodiments, the neutralizing antibody titer and/or a T cell immune response is sufficient to prevent viral latency in the subject.

[1450] In some embodiments, the neutralizing antibody titer is sufficient to block fusion of Coronavirus with epithelial cells of the subject.

[1451] In preferred embodiments, the neutralizing antibody titer is induced following a single 1 μg-100 μg dose of the composition, or the vaccine. In further preferred embodiments, the neutralizing antibody titer is induced following a single 2 μg-20 μg dose of the composition, or the vaccine.

[1452] In some embodiments, the neutralizing antibody titer is induced within 20 days following a single 1 μg-100 μg dose of the composition or the vaccine, or within 40 days following a second 1 μg-100 μg dose of the nucleic acid, the composition or the vaccine.

[1453] In preferred embodiments, administration of a therapeutically effective amount of the composition or the vaccine to a subject induces a T cell immune response against Coronavirus in the subject. In preferred embodiments, the T cell immune response comprises a CD4+ T cell immune response and/or a CD8+ T cell immune response.

[1454] In preferred embodiments, the vaccine elicits antigen-specific immune responses comprising T-cell responses and/or B-cell responses against all encoded antigens provided by the composition (e.g., M, N, S).

[1455] In preferred embodiments, the vaccine elicits antigen-specific immune responses comprising T-cell responses and/or B-cell responses against all encoded antigens (e.g., M, N, S) upon administration of a low dose of the vaccine. In preferred embodiments, a low dose comprises less that about 100 μg, preferably less than about 50 μg, more preferably less than about 20 μg of nucleic acid, even more preferably less than about 10 μg.

[1456] In preferred embodiments, the vaccine elicits antigen-specific immune responses in a subject that has an age of about 5 years old or younger. Accordingly, the nucleic acid based Coronavirus vaccines are particularly suitable for infants.

[1457] In preferred embodiments, the vaccine elicits antigen-specific immune responses in a subject that has an age of about 60 years old or older. Accordingly, the nucleic acid based Coronavirus vaccines are particularly suitable for the elderly.

[1458] Kit or Kit of Parts, Application, Medical Uses, Method of Treatment:

[1459] In a third aspect, the present invention provides a kit or kit of parts suitable for treating or preventing Coronavirus infections. Preferably, said kit or kit of parts is suitable for treating or preventing a Coronavirus infection, preferably a SARS-CoV-2 infection.

[1460] Notably, embodiments relating to the pharmaceutical composition of the first aspect and the vaccine of the second aspect may likewise be read on and be understood as suitable embodiments of the kit or kit of parts of the third aspect of the invention.

[1461] In preferred embodiments, the kit or kit of parts comprises at least one pharmaceutical composition of the first aspect, and/or at least one vaccine of the second aspect.

[1462] In addition, the kit or kit of parts may comprise a liquid vehicle for solubilising or diluting, and/or technical instructions providing information on administration and dosage of the components.

[1463] The technical instructions of said kit may contain information about administration and dosage and patient groups. Such kits, preferably kits of parts, may be applied e.g. for any of the applications or uses mentioned herein, preferably for the use of the pharmaceutical composition of the first aspect or the vaccine of the second aspect, for the treatment or prophylaxis of an infection or diseases caused by a Coronavirus, preferably SARS-CoV-2 coronavirus.

[1464] Preferably, the pharmaceutical composition or the vaccine is provided in a separate part of the kit, wherein the pharmaceutical composition or the vaccine is optionally lyophilised or spray-dried or spray-freeze dried. The kit may further contain as a part a vehicle (e.g. buffer solution) for solubilising the dried or lyophilized nucleic composition or the vaccine.

[1465] In preferred embodiments, the kit or kit of parts as defined herein comprises a multi-dose container for administration of the composition/the vaccine and/or an administration device (e.g. an injector for intradermal injection or a syringe for intramuscular injection).

[1466] Any of the above kits may be used in a treatment or prophylaxis as defined herein.

[1467] First and Second/Further Medical Use:

[1468] A further aspect relates to the first medical use of the pharmaceutical composition of the first aspect, the vaccine of the second aspect, and the kit or kit of parts of the third aspect.

[1469] Notably, embodiments relating to the composition of the first aspect, the vaccine of the second aspect, or the kit or kit of parts of the third aspect may likewise be read on and be understood as suitable embodiments of medical uses of the invention.

[1470] Accordingly, the invention provides a pharmaceutical composition as defined in the first aspect for use as a medicament, the vaccine as defined in the second aspect for use as a medicament, and the kit or kit of parts as defined in the third aspect for use as a medicament.

[1471] The present invention furthermore provides several applications and uses of the composition, vaccine, or kit.

[1472] In particular, pharmaceutical compositions, vaccine, or kit may be used for human medical purposes and also for veterinary medical purposes, preferably for human medical purposes.

[1473] In particular, the pharmaceutical composition, the vaccine, or kit or kit of parts is for use as a medicament for human medical purposes, wherein said composition, vaccine, or kit or kit of parts may be suitable for young infants, newborns, immunocompromised recipients, as well as pregnant and breast-feeding women and elderly people. In particular, the pharmaceutical composition, vaccine, or kit or kit of parts is for use as a medicament for human medical purposes, wherein said composition, vaccine, or kit or kit of parts is particularly suitable for elderly human subjects.

[1474] Said pharmaceutical composition, vaccine, or kit is for use as a medicament for human medical purposes, wherein said composition, vaccine, or the kit or kit of parts is particularly suitable for intramuscular injection or intradermal injection.

[1475] In yet another aspect, the invention relates to the second medical use of the provided pharmaceutical composition, vaccine, or kit.

[1476] In an aspect, the invention relates to a pharmaceutical composition of the first aspect, a vaccine of the second aspect, a kit or kit of parts of the third aspect, for use in the treatment or prophylaxis of an infection with a Coronavirus, or a disorder related to such an infection.

[1477] In a preferred embodiment, the invention relates to a pharmaceutical composition of the first aspect, a vaccine of the second aspect, a kit or kit of parts of the third aspect, for use in the treatment or prophylaxis of an infection with SARS-CoV-2, or a disorder related to such an infection.

[1478] In an aspect, the invention relates to a pharmaceutical composition of the first aspect, a vaccine of the second aspect, a kit or kit of parts of the third aspect, for use in the treatment or prophylaxis of an infection with a Coronavirus, preferably SARS-CoV-2 (or a disorder related to such an infection) and in the treatment or prophylaxis of an infection with at least one further Coronavirus, e.g. a pandemic Coronavirus such as SARS-CoV-2 or MERS-CoV.

[1479] Suitably, the pharmaceutical composition of the first aspect, the vaccine of the second aspect, or the kit or kit of parts of the third aspect may be used in a method of prophylactic (pre-exposure prophylaxis or post-exposure prophylaxis) and/or therapeutic treatment of infections caused by at least one Coronavirus, preferably SARS-CoV-2 coronavirus.

[1480] The pharmaceutical composition or vaccine may preferably be administered locally. In particular, composition or vaccines may be administered by an intradermal, subcutaneous, intranasal, or intramuscular route. In embodiments, the inventive nucleic acid, composition, polypeptide, vaccine may be administered by conventional needle injection or needle-free jet injection. Preferred in that context is intramuscular injection.

[1481] In embodiments where plasmid DNA is used and comprised in the pharmaceutical composition or vaccine, the composition/vaccine may be administered by a device, e.g. an electroporation device, preferably an electroporation device for intradermal or intramuscular delivery. Suitably, a device as described in U.S. Pat. No. 7,245,963B2 may be used, in particular a device as defined by claims 1 to 68 of U.S. Pat. No. 7,245,963B2.

[1482] In embodiments where adenovirus DNA is used and comprised in the pharmaceutical composition or vaccine, the composition/vaccine may be administered by intranasal administration.

[1483] In embodiments, the nucleic acid as comprised in a composition or vaccine as defined herein is provided in an amount of about 100 ng to about 500 ug, in an amount of about 1 ug to about 200 ug, in an amount of about 1 ug to about 100 ug, in an amount of about 5 ug to about 100 ug, preferably in an amount of about 10 ug to about 50 ug, specifically, in an amount of about 1 ug, 2 ug, 3 ug, 4 ug, 5 ug, 6 ug, 7 ug, 8 ug, 9 ug, 10 ug, 11 ug, 12 ug, 13 ug, 14 ug, 15 ug, 20 ug, 25 ug, 30 ug, 35 ug, 40 ug, 45 ug, 50 ug, 55 ug, 60 ug, 65 ug, 70 ug, 75 ug, 80 ug, 85 ug, 90 ug, 95 ug or 100 ug. Notably, the amount relates to the total amount of nucleic acid comprised in the composition or vaccine.

[1484] In some embodiments, the vaccine comprising the nucleic acid, or the composition comprising the nucleic acid is formulated in an effective amount to produce an antigen specific immune response in a subject. In some embodiments, the effective amount is a total dose of 1 ug to 200 ug, 1 ug to 100 ug, or 5 ug to 100 ug. Notably, the effective amount relates to the total amount of nucleic acid comprised in the composition or vaccine.

[1485] In embodiments where the nucleic acid is provided in a lipid-based carrier, e.g. an LNP, the amount of PEG-lipid as defined herein comprised in one dose is lower than about 50 μg PEG lipid, preferably lower than about 45 μg PEG lipid, more preferably lower than about 40 μg PEG lipid.

[1486] Having a low amount of PEG lipid in one dose may reduce the risk of adverse effects (e.g. allergies).

[1487] In particularly preferred embodiments, the amount of PEG-lipid comprised in one dose is in a range from about 3.5 μg PEG lipid to about 35 μg PEG lipid.

[1488] In embodiments where the nucleic acid is provided in a lipid-based carrier, e.g. an LNP, the amount of cationic lipid as defined herein comprised in one dose is lower than about 400 μg cationic lipid, preferably lower than about 350 μg cationic lipid, more preferably lower than about 300 μg cationic lipid.

[1489] Having a low amount of cationic lipid in one dose may reduce the risk of adverse effects (e.g. fewer).

[1490] In particularly preferred embodiments, the amount of cationic-lipid comprised in one dose is in a range from about 30 μg PEG lipid to about 300 μg PEG lipid.

[1491] In one embodiment, the immunization protocol for the treatment or prophylaxis of a subject against at least one Coronavirus, preferably SARS-CoV-2 comprises one single dose of the pharmaceutical composition or the vaccine.

[1492] In some embodiments, the effective amount is a dose of 1 ug administered to the subject in one vaccination. In some embodiments, the effective amount is a dose of 2 ug administered to the subject in one vaccination. In some embodiments, the effective amount is a dose of 3 ug administered to the subject in one vaccination. In some embodiments, the effective amount is a dose of 4 ug administered to the subject in one vaccination. In some embodiments, the effective amount is a dose of 5 ug administered to the subject in one vaccination. In some embodiments, the effective amount is a dose of 6 ug administered to the subject in one vaccination. In some embodiments, the effective amount is a dose of 7 ug administered to the subject in one vaccination. In some embodiments, the effective amount is a dose of 8 ug administered to the subject in one vaccination. In some embodiments, the effective amount is a dose of 9 ug administered to the subject in one vaccination. In some embodiments, the effective amount is a dose of 10 ug administered to the subject in one vaccination. In some embodiments, the effective amount is a dose of 1 1 ug administered to the subject in one vaccination. In some embodiments, the effective amount is a dose of 12 ug administered to the subject in one vaccination. In some embodiments, the effective amount is a dose of 13 ug administered to the subject in one vaccination. In some embodiments, the effective amount is a dose of 14 ug administered to the subject in one vaccination. In some embodiments, the effective amount is a dose of 15 ug administered to the subject in one vaccination. In some embodiments, the effective amount is a dose of 20 ug administered to the subject in one vaccination. In some embodiments, the effective amount is a dose of 25 ug administered to the subject in one vaccination. In some embodiments, the effective amount is a dose of 30 ug administered to the subject in one vaccination. In some embodiments, the effective amount is a dose of 40 ug administered to the subject in one vaccination. In some embodiments, the effective amount is a dose of 50 ug administered to the subject in one vaccination. In some embodiments, the effective amount is a dose of 100 ug administered to the subject in one vaccination. In some embodiments, the effective amount is a dose of 200 ug administered to the subject in one vaccination. Notably, the effective amount relates to the total amount of nucleic acid comprised in the composition or vaccine.

[1493] In preferred embodiments, the immunization protocol for the treatment or prophylaxis of at least one Coronavirus infection comprises a series of single doses or dosages of the pharmaceutical composition or the vaccine. A single dosage, as used herein, refers to the initial/first dose, a second dose or any further doses, respectively, which are preferably administered in order to “boost” the immune reaction.

[1494] In some embodiments, the effective amount is a dose of 1 ug administered to the subject a total of two times. In some embodiments, the effective amount is a dose of 2 ug administered to the subject a total of two times. In some embodiments, the effective amount is a dose of 3 ug administered to the subject a total of two times. In some embodiments, the effective amount is a dose of 4 ug administered to the subject a total of two times. In some embodiments, the effective amount is a dose of 5 ug administered to the subject a total of two times. In some embodiments, the effective amount is a dose of 6 ug administered to the subject a total of two times. In some embodiments, the effective amount is a dose of 7 ug administered to the subject a total of two times. In some embodiments, the effective amount is a dose of 8 ug administered to the subject a total of two times. In some embodiments, the effective amount is a dose of 9 ug administered to the subject a total of two times. In some embodiments, the effective amount is a dose of 10 ug administered to the subject a total of two times. In some embodiments, the effective amount is a dose of 11 ug administered to the subject a total of two times. In some embodiments, the effective amount is a dose of 12 ug administered to the subject a total of two times. In some embodiments, the effective amount is a dose of 13 ug administered to the subject a total of two times. In some embodiments, the effective amount is a dose of 14 ug administered to the subject a total of two times. In some embodiments, the effective amount is a dose of 15 ug administered to the subject a total of two times. In some embodiments, the effective amount is a dose of 20 ug administered to the subject a total of two times. In some embodiments, the effective amount is a dose of 25 ug administered to the subject a total of two times. In some embodiments, the effective amount is a dose of 30 ug administered to the subject a total of two times. In some embodiments, the effective amount is a dose of 40 ug administered to the subject a total of two times. In some embodiments, the effective amount is a dose of 50 ug administered to the subject a total of two times. In some embodiments, the effective amount is a dose of 100 ug administered to the subject a total of two times. In some embodiments, the effective amount is a dose of 200 ug administered to the subject a total of two times. Notably, the effective amount relates to the total amount of nucleic acid comprised in the composition or vaccine.

[1495] In preferred embodiments, the vaccine/composition immunizes the subject against a Coronavirus infection (upon administration as defined herein) for at least 1 year, preferably at least 2 years. In preferred embodiments, the vaccine/composition immunizes the subject against a Coronavirus infection for more than 2 years, more preferably for more than 3 years, even more preferably for more than 4 years, even more preferably for more than 5-10 years.

[1496] Method of Treatment and Use, Diagnostic Method and Use:

[1497] In another aspect, the present invention relates to a method of treating or preventing a disorder.

[1498] Notably, embodiments relating to the pharmaceutical composition of the first aspect, the vaccine of the second aspect, the kit or kit of parts of the third aspect, or medical uses may likewise be read on and be understood as suitable embodiments of methods of treatments as provided herein. Furthermore, specific features and embodiments relating to method of treatments as provided herein may also apply for medical uses of the invention.

[1499] Preventing (Inhibiting) or treating a disease, in particular a virus infection relates to inhibiting the full development of a disease or condition, for example, in a subject who is at risk for a disease such as a virus infection. “Treatment” refers to a therapeutic intervention that ameliorates a sign or symptom of a disease or pathological condition after it has begun to develop. The term “ameliorating”, with reference to a disease or pathological condition, refers to any observable beneficial effect of the treatment. Inhibiting a disease can include preventing or reducing the risk of the disease, such as preventing or reducing the risk of viral infection. The beneficial effect can be evidenced, for example, by a delayed onset of clinical symptoms of the disease in a susceptible subject, a reduction in severity of some or all clinical symptoms of the disease, a slower progression of the disease, a reduction in the viral load, an improvement in the overall health or well-being of the subject, or by other parameters that are specific to the particular disease. A “prophylactic” treatment is a treatment administered to a subject who does not exhibit signs of a disease or exhibits only early signs for the purpose of decreasing the risk of developing pathology.

[1500] In preferred embodiments, the present invention relates to a method of treating or preventing a disorder, wherein the method comprises applying or administering to a subject in need thereof at least one pharmaceutical composition of the first aspect, the vaccine of the second aspect, or the kit or kit of parts of the third aspect.

[1501] In preferred embodiments, the disorder is an infection with a Coronavirus, or a disorder related to such infections, in particular an infection with SARS-CoV-2, or a disorder related to such infections (e.g. COVID-19).

[1502] In preferred embodiments, the present invention relates to a method of treating or preventing a disorder as defined above, wherein the method comprises applying or administering to a subject in need thereof at least pharmaceutical composition of the first aspect, the vaccine of the second aspect, or the kit or kit of parts of the third aspect, wherein the subject in need is preferably a mammalian subject.

[1503] In particularly preferred embodiments, the subject in need is a mammalian subject, preferably a human subject, e.g. new-born, pregnant, immunocompromised, and/or elderly.

[1504] In particularly preferred embodiments, the human subject is an elderly human subject.

[1505] In certain embodiments, a method of treating or preventing disease by applying or administering to a subject in need thereof at least pharmaceutical composition of the first aspect, the vaccine of the second aspect, or the kit or kit of parts of the third aspect is further defined as a method of reducing disease burden in the subject. For example, the method preferably reduces the severity and/or duration of one or more symptom of COVID-19 disease. In some aspects, a method reduces the probability that a subject will require hospital admission, intensive care unit admission, treatment with supplemental oxygen and/or treatment with a ventilator. In further aspects, the method reduces the probability that a subject will develop a fever, breathing difficulties; loss of smell and/or loss of taste. In preferred aspects, the method reduces the probability that a subject will develop severe or moderate COVID-19 disease. In certain aspects, a method of the embodiments prevents severe or moderate COVID-19 disease in the subject between about 2 weeks and 1 month, 2 months, 3 months, 4 months, 5 months, 6 months, 1 year or 2 years after the subject is administered a composition of the embodiments. In preferred aspects, a method of the embodiments prevents symptomatic COVID-19 disease. In further aspects, a method of the embodiment prevents detectable levels of SARS-CoV-2 nucleic acid in the subject between about 2 weeks and 1 month, 2 months, 3 months, 4 months, 5 months, 6 months, 1 year or 2 years after the subject is administered a composition of the embodiments. In further aspects, a method of the embodiments is defined as a method for providing protective immunity to a coronavirus infection (e.g., SARS-CoV-2 infection) in the subject. In still further aspects, a method of the embodiments prevents moderate and severe COVID-19 disease in at least 80%, 85%, 90% or 95% of treated subjects. In yet further aspects, a method of the embodiments prevents moderate and severe COVID-19 disease in at least 80%, 85%, 90% or 95% of treated subjects from about 2 weeks to about 1 year after administering the second or subsequent immunogenic composition (e.g., a booster administration). In yet further aspects, a method of the embodiments prevents moderate and severe COVID-19 disease in at least 80%, 85%, 90% or 95% of treated subjects from about 2 weeks to about 3 month, 6 months, 9 months, 1 year, 1.5 years, 2 years or 3 years after administering the second or subsequent composition.

[1506] As used herein severe COVID-19 disease is defined as a subject experiencing one or more of the following:
[1507] Clinical signs at rest indicative of severe systemic illness (respiratory rate ≥30 breaths per minute, heart rate ≥125 per minute, SpO2≤93% on room air at sea level or PaO2/FIO2<300 mm Hg (adjusted according to altitude))
[1508] Respiratory failure (defined as needing high flow-oxygen, noninvasive ventilation, mechanical ventilation or ECMO)
[1509] Evidence of shock (SBP<90 mm Hg, DBP<60 mmHg, or requiring vasopressors)
[1510] Significant renal, hepatic, or neurologic dysfunction
[1511] Admission to ICU
[1512] Death

[1513] As used herein moderate COVID-19 disease is defined as a subject experiencing one or more of the following:
[1514] Shortness of breath or difficulty breathing
[1515] Respiratory rate ≥20 breaths per minute
[1516] Abnormal SpO2 but still >93% on room air at sea level (adjusted according to altitude)
[1517] Clinical or radiographic evidence of lower respiratory tract disease
[1518] Radiologic evidence of deep vein thrombosis (DVT)

[1519] As used herein mild COVID-19 disease is defined as a subject experiencing all of the following:
[1520] Symptomatic AND
[1521] No shortness of breath or difficulty breathing AND
[1522] No hypoxemia (adjusted according to altitude) AND
[1523] Does not meet the case definition of moderate or severe COVID-19 disease

[1524] In particularly preferred embodiments, the subject in need is a mammalian subject, preferably a human subject, e.g. newborn, pregnant, immunocompromised, and/or elderly. In some embodiments, the subject between the ages of 6 months and 100 years, 6 months and 80 years, 1 year and 80 years, 1 year and 70 years, 2 years and 80 years or 2 years and 60 years. In other embodiments the subject is a newborn or infant of an age of not more than 3 years, of not more than 2 years, of not more than 1.5 years, of not more than 1 year (12 months), of not more than 9 months, 6 months or 3 months. In certain embodiments, the human subject is an elderly human subject. In some other embodiments the subject is an elderly subject of an age of at least 50, 60, 65, or 70 years. In further aspects, a subject for treatment according to the embodiments is 61 years of age or older. In still further aspects, the subject is 18 years old to 60 years old.

[1525] In further embodiments, the mammalian subject is a human subject is 60 years of age or less. In certain embodiments the human subject is human subject is 55, 50, 45 or 40 years of age or less. Thus, in some embodiments, is the human subject is between about 12 and 60; 12 and 55; 12 and 50; 12 and 45; or 12 and 40 years of age. In further embodiments the human subject is between about 18 and 60; 18 and 55; 18 and 50; 18 and 45; or 18 and 40 years of age. In some embodiments the human subject is 18 to 50 or 18 to 40 years of age.

[1526] In certain embodiments, a subject for treatment according to the embodiments is a pregnant subject, such a pregnant human. In some aspects, the subject has been pregnant for more than about one month, two months, three months, four months, five months, six months, seven months or eight months.

[1527] In certain aspects, a subject for treatment according to the embodiments has native American, African, Asian or European heritage. In some aspects, the subject has at least about 10%, 15%, 20%, 25%, 30%, 35%, 40%, 45%, 50%, 55%, 60%, 65%, 70%, 75%, 80%, 85% or 90% native American, African, Asian or European heritage. In certain aspects, the subject has native American heritage, such as at least about 10%, 25% or 50% native American heritage. In further aspects, the subject is an elderly subject having native American heritage, e.g., a subject who is at least 55, 60, 65 or 70 years of age.

[1528] In further aspects, a subject for treatment according to the embodiments has a disease or is immune compromised. In some aspects, the subject has liver disease, kidney disease diabetes, hypertension, heart disease or lung disease. In further aspects, a subject for treatment according to the embodiments is a subject with history of allergic reaction, such a subject having food allergies. In some aspect, the subject has had a previous allergic reaction to a vaccine, such as an anaphylactic reaction. In still further aspects, a subject for treatment according to the methods is a subject having detectable anti-PEG antibodies, such as detectable anti-PEG IgE in the serum.

[1529] In further aspects, a subject for treatment according to the embodiments has at least one co-morbidity selected from:
[1530] (i) Chronic kidney disease: Kidney function will be ascertained from the serum creatinine measurement within the last 3-6 months, converted into estimated glomerular filtration rate (eGFR) using the Chronic Kidney Disease Epidemiology Collaboration (CKD-EPI) equation, with impaired kidney function defined as eGFR <60 mL/min/1.73 m².
   [1531] Mild chronic kidney disease is defined as an eGFR between 60-89 mL/min/1.73 m².
   [1532] Moderate chronic kidney disease is defined as an eGFR between 31-59 mL/min/1.73 m² with stable therapy and good maintenance over at least 6 months (modified from Clinical Practice Clinical Guidelines for Chronic Kidney Disease: Am J Kidney Dis, 2002).
[1533] (ii) COPD (including emphysema and chronic bronchitis).
   [1534] Mild COPD with or without cough or sputum production is defined as forced expiratory volume in 1 second/forced vital capacity (FEV1/FVC)<0.7 and FEV1 ≥80% predicted.
   [1535] Moderate COPD with or without cough or sputum production is defined as FEV1/FVC <0.7 and FEV1 ≥50%, but <80% predicted with stable treatment (GOLD Criteria for COPD severity).
[1536] (iii) Obesity with body mass index (BMI) of >32 kg/m²—any extreme morbid obesity will also be included.
[1537] (iv) Chronic cardiovascular conditions (heart failure, coronary artery disease, cardiomyopathies, arterial hypertension), including the following:
   [1538] Class I heart failure with potential high risk for developing heart failure in future with no functional or structural heart disorder.
   [1539] Class II heart failure: subjects with cardiac disease resulting in slight limitation of physical activity. Comfortable at rest.
   [1540] Ordinary physical activity results in fatigue, palpitation, dyspnea, or anginal pain.
   [1541] Class III heart failure with marked limitation of physical activity, but comfortable at rest but less than ordinary activity results in symptoms.
   [1542] A structural heart disorder without symptoms at any stage.
   [1543] Mild left ventricular systolic or diastolic dysfunction, usually with not much produced clinical signs.
   [1544] Moderate left ventricular failure with exertional dyspnea or orthopnea or paroxysmal nocturnal dyspnea as per New York Heart Association (NYHA), stable with medication (Class II-III).
   [1545] Coronary artery disease of 2 and above metabolic equivalent threshold (MET) up to moderate, stable with medication. (MET is defined as the amount of oxygen consumed while sitting at rest and is equal to 3.5 ml 02 per kg body weight×min; 4 Normal, can climb a flight of stairs or walk up a hill and can participate in other strenuous activities; 1 can take care of him/herself and may not maintain themselves and gets constraints on exertion.)
   [1546] Cardiomyopathies of non-infective and metabolic origin of 2-3 MET with medication.
   [1547] Stage 1 hypertension or Stage 2 hypertension stable and controlled with medications.
[1548] (v) Chronic HIV infection with stable aviraemia (<50 copies/mL) and CD4 count >350/mL as documented by blood samples taken within 12 months before enrolment. (Viral load <50 copies/mL with transient changes of 50-350 copies/mL is allowed.)
[1549] (vi) Type 2 diabetes mellitus, either controlled with medication [hemoglobin A1c (HbA1c)<58 mmol/mol (7.45%)] or uncontrolled with recent HbA1c of >58 mmol/mol (7.45%); [(HbA1c in %−2.15)×10.929=HbA1c in mmol/mol]; in uncontrolled DM HbA1c should be within <10% variation and should not have any history of diabetic ketoacidosis or episode of severe symptomatic hypoglycemia within prior 3 months.
[1550] (vii) Subjects who underwent renal transplant at least a year ago under stable conditions for at least 6 months with medications, categorized as low risk of rejection.

[1551] In still further aspects, a subject for treatment according to the embodiments has not been treated with an immunosuppressant drug for more than 14 days in the last 6 months. In some aspects, a subject for treatment according to the embodiments has not received a live vaccine for at least 28 days prior to the administration and/or has not received an inactivated vaccine for at least 14 days prior to the administration. In further aspects a subject for treatment according to the embodiments has NOT:
[1552] Had virologically-confirmed COVID-19 illness;
[1553] For females: experienced pregnancy or lactation with-in a month prior to administration of the composition of the embodiments;
[1554] had treatment with an investigational or non-registered product (e.g., vaccine or drug) within 28 days preceding the administration of the composition of the embodiments;
[1555] received a licensed vaccines within 28 days (for live vaccines) or 14 days (for inactivated vaccines) prior to the administration of the composition of the embodiments;
[1556] been previously or concurrently treated with any investigational SARS-CoV-2 vaccine or another coronavirus (SARS-CoV, MERS-CoV) vaccine;
[1557] been treated with immunosuppressants or other immune-modifying drugs (e.g., corticosteroids, biologicals and methotrexate) for >14 days total within 6 months preceding the administration of the composition of the embodiments;
[1558] had any medically diagnosed or suspected immunosuppressive or immunodeficient condition based on medical history and physical examination including known infection with human immunodeficiency virus (HIV), hepatitis B virus (HBV) or hepatitis C virus (HCV); current diagnosis of or treatment for cancer including leukemia, lymphoma, Hodgkin disease, multiple myeloma, or generalized malignancy; chronic renal failure or nephrotic syndrome; and receipt of an organ or bone marrow transplant.
[1559] had a history of angioedema (hereditary or idiopathic), or history of any anaphylactic reaction or pIMD.
[1560] a history of allergy to any component of CVnCoV vaccine.
[1561] been administered of immunoglobulins or any blood products within 3 months prior to the administration of the composition of the embodiments;
[1562] experienced a significant acute or chronic medical or psychiatric illness; and/or
[1563] experienced severe and/or uncontrolled cardiovascular disease, gastrointestinal disease, liver disease, renal disease, respiratory disease, endocrine disorder, and neurological and psychiatric illnesses.

[1564] In certain aspects, a subject for treatment according to the methods of the embodiments does not have any potential immune-mediated disease (pIMD). In further aspects, a treatment method of the embodiments does not induce any pIMD in a treated subject. As used herein pIMDs are defined as Celiac disease; Crohn's disease; Ulcerative colitis; Ulcerative proctitis; Autoimmune cholangitis; Autoimmune hepatitis; Primary biliary cirrhosis; Primary sclerosing cholangitis; Addison's disease; Autoimmune thyroiditis (including Hashimoto thyroiditis; Diabetes mellitus type I; Grave's or Basedow's disease; Antisynthetase syndrome; Dermatomyositis; Juvenile chronic arthritis (including Still's disease); Mixed connective tissue disorder; Polymyalgia rheumatic; Polymyositis; Psoriatic arthropathy; Relapsing polychondritis; Rheumatoid arthritis; Scleroderma, (e.g., including diffuse systemic form and CREST syndrome); Spondyloarthritis, (e.g., including ankylosing spondylitis, reactive arthritis (Reiter's Syndrome) and undifferentiated spondyloarthritis); Systemic lupus erythematosus; Systemic sclerosis; Acute disseminated encephalomyelitis, (including site specific variants (e.g., non-infectious encephalitis, encephalomyelitis, myelitis, myeloradiculomyelitis)); Cranial nerve disorders, (e.g., including paralyses/paresis (e.g., Bell's palsy)); Guillain-Barré syndrome, (e.g., including Miller Fisher syndrome and other variants); Immune-mediated peripheral neuropathies, Parsonage-Turner syndrome and plexopathies, (e.g., including chronic inflammatory demyelinating polyneuropathy, multifocal motor neuropathy, and polyneuropathies associated with monoclonal gammopathy); Multiple sclerosis; Narcolepsy; Optic neuritis; Transverse Myelitis; Alopecia areata; Autoimmune bullous skin diseases, including pemphigus, pemphigoid and dermatitis herpetiformis; Cutaneous lupus erythematosus; Erythema nodosum; Morphoea; Lichen planus; Psoriasis; Sweet's syndrome; Vitiligo; Large vessels vasculitis (e.g., including: giant cell arteritis such as Takayasu's arteritis and temporal arteritis); Medium sized and/or small vessels vasculitis (e.g., including: polyarteritis nodosa, Kawasaki's disease, microscopic polyangiitis, Wegener's granulomatosis, Churg-Strauss syndrome (allergic granulomatous angiitis), Buerger's disease thromboangiitis obliterans, necrotizing vasculitis and anti-neutrophil cytoplasmic antibody (ANCA) positive vasculitis (type unspecified), Henoch-Schonlein purpura, Behcet's syndrome, leukocytoclastic vasculitis); Antiphospholipid syndrome; Autoimmune hemolytic anemia; Autoimmune glomerulonephritis (including IgA nephropathy, glomerulonephritis rapidly progressive, membranous glomerulonephritis, membranoproliferative glomerulonephritis, and mesangioproliferative glomerulonephritis); Autoimmune myocarditis/cardiomyopathy; Autoimmune thrombocytopenia; Goodpasture syndrome; Idiopathic pulmonary fibrosis; Pernicious anemia; Raynaudvs phenomenon; Sarcoidosis; Sjögren's syndrome; Stevens-Johnson syndrome; Uveitis).

[1565] In certain aspects, a vaccination method of the embodiments does not result in a subject experiencing any adverse events of special interest (AESIs). As used herein AESIs are defined as a pIMD listed above; Anaphylaxis; Vasculitides; Enhanced disease following immunization; Multisystem inflammatory syndrome in children; Acute Respiratory Distress Syndrome; COVID-19 disease; Acute cardiac injury; Microangiopathy; Heart failure and cardiogenic shock; Stress cardiomyopathy; Coronary artery disease; Arrhythmia; Myocarditis, pericarditis; Thrombocytopenia; Deep vein thrombosis; Pulmonary embolus; Cerebrovascular stroke; Limb ischemia; Hemorrhagic disease; Acute kidney injury; Liver injury; Generalized convulsion; Guillain-Barré Syndrome; Acute disseminated encephalomyelitis; Anosmia, ageusia; Meningoencephalitis; Chilblain-like lesions; Single organ cutaneous vasculitis; Erythema multiforme; Serious local/systemic AR following immunization.

[1566] In a further aspects, a method of the embodiments comprises (i) obtaining a composition (e.g., a vaccine composition) of the embodiments, wherein the composition is lyophilized; (ii) solubilizing the lyophilized composition in a pharmaceutically acceptable liquid carrier to produce a liquid composition; and (iii) administering an effective amount of the liquid composition to the subject. In some aspects, the lyophilized composition comprises less than about 10% water content. For example, the lyophilized composition can preferably comprise about 0.1% to about 10%, 0.5% to 7.5% or 0.5% to 5.0% water.

[1567] In particular, such the method of treatment may comprise the steps of
[1568] a) providing at least one pharmaceutical composition of the first aspect, at least one vaccine of the second aspect, or the kit or kit of parts of the third aspect;
[1569] b) applying or administering said composition, vaccine, or kit or kit of parts to a subject as a first dose
[1570] c) optionally, applying or administering said composition, vaccine, or kit or kit of parts to a subject as a second dose or a further dose, preferably at least 1, 2, 3, 4, 5, 6, 7, 8, 9, 10, 11, 12, months after the first dose.

[1571] The first dosage, as used herein, refers to the initial/first dose, a second dose or any further doses, respectively, which are preferably administered in order to “boost” the immune reaction.

[1572] In certain aspects, the vaccine/composition is administered to a subject one, two three, four or more times. In some aspects, the vaccine/composition is administered to the subject at least first and a second time (e.g., a prime and boost). In some aspects, the send administration is at least 10 days, 14 days, 21 days, 28 days, 35 days, 42 days, 49 days or 56 days after the first administration. In some aspects, the time between the first administration and the second administration is between about 7 days and about 56 days; about 14 days and about 56 days; about 21 days and about 56 days; or about 28 days and about 56 days. In further aspects, the vaccine/composition is administered to a subject three or more times. In certain aspects, there is at least 10 days, 14 days, 21 days, 28 days, 35 days, 42 days, 49 days or 56 days between each administration of the vaccine/composition.

[1573] In some aspects, a subject for treatment according to the embodiments was previously infected with SARS-CoV-2 or was previously treated with at least a first SARS-CoV-2 vaccine composition. In some aspects, the subject was treated with one, two, three or more doses of a first SARS-CoV-2 vaccine composition. In some aspects, the composition of the embodiments used to treat a subject is a different type of vaccine composition than the composition previously used to treat the subject. In some aspects, the subject was previously treated with a mRNA vaccine, such as BNT162 or mRNA-1273. In further aspects, the subject was previously treated with a protein subunit vaccine, such as spike protein based vaccine, e.g., NVX-CoV2373 or COVAX. In further aspects, the subject was previously treated with a viral vector vaccine, such as an adenovirus vector based vaccine, e.g., ADZ1222 orAd26.COV-2.S. In further aspects, a subject previously treated with a vaccine composition has detectable SARS-CoV-2 binding antibodies, such as SARS-CoV-2 S protein-binding antibodies or SARS-CoV-2 N protein-binding antibodies. In further aspects, a subject for treatment according the embodiments was treated with a first SARS-CoV-2 vaccine composition at least about 3 month, 6 months, 9 months, 1 year, 1.5 years, 2 years or 3 years ago. In still further aspects, a subject for treatment according the embodiments was treated with a first SARS-CoV-2 vaccine composition between about 3 months and 2 years ago or between about 6 months and 2 years ago. In some aspects, a subjects treated with a further vaccine composition of the embodiments are protected from moderate and severe COVID-19 disease in at least 80%, 85%, 90% or 95% of treated subjects. For example, the treated subjects can be protected from moderate and severe COVID-19 disease in at least 80%, 85%, 90% or 95% of treated subjects from about 2 weeks to about 1 year after administration of the further composition. In still further aspects, administering the further vaccine composition of the embodiments prevents moderate and severe COVID-19 disease in at least 80%, 85%, 90% or 95% of treated subjects from about 2 weeks to about 3 month, 6 months, 9 months, 1 year, 1.5 years, 2 years or 3 years after said administration.

[1574] In certain aspects, a method of the embodiments is further defined as a method of stimulating an antibody or CD8+ T-cell response in a subject. In some aspects, the method is defined as a method of stimulating a neutralizing antibody response in a subject. In further aspects, the method is defined as a method of stimulating a protective immune response in a subject. In yet further aspects, the method is defined as a method of stimulating TH2 directed immune response in a subject.

[1575] In further aspects, administration of a vaccine/composition of the embodiments stimulates an antibody response that produces between about 10 and about 500 coronavirus spike protein-binding antibodies for every coronavirus neutralizing antibody in the subject. For example, the administration can stimulate an antibody response that produces no more than about 200 spike protein-binding antibodies for every coronavirus neutralizing antibody. In further aspects, the administration stimulates an antibody response that produces between about 10 and about 300; about 20 and about 300; about 20 and about 200; about 30 and about 100; or about 30 and about 80 coronavirus spike protein-binding antibodies for every coronavirus neutralizing antibody. In still further aspects, administration of composition of the embodiments stimulates an antibody response in a subject that includes a ratio of spike protein-binding antibodies to coronavirus neutralizing antibodies that is with 20%, 15%, 10% or 5% of the ratio of spike protein-binding antibodies to coronavirus neutralizing antibodies found in average convalescent patient serum (from a subject who has recovered from coronavirus infection).

[1576] In yet further aspects, administration of a composition of the embodiments stimulates an antibody response that produces between about 1 and about 500 coronavirus spike protein receptor binding domain (RBD)-binding antibodies for every coronavirus neutralizing antibody in the subject. In further aspects, the administration stimulates an antibody response that produces no more than about 50 spike protein RBD-binding antibodies for every coronavirus neutralizing antibody. In still further aspects, administration stimulates an antibody response that produces between about 1 and about 200; about 2 and about 100; about 3 and about 200; about 5 and about 100; about 5 and about 50; or about 5 and about 20 spike protein RBD-binding antibodies for every coronavirus neutralizing antibody. In still further aspects, administration of composition of the embodiments stimulates an antibody response in a subject that includes a ratio of spike protein RBD-binding antibodies to coronavirus neutralizing antibodies that is with 20%, 15%, 10% or 5% of the ratio of spike protein RBD-binding antibodies to coronavirus neutralizing antibodies found in average convalescent patient serum (from a subject who has recovered from coronavirus infection).

[1577] In still further aspects, administration of a vaccine/composition of the embodiments induces essentially no increase in IL-4, IL-13, TNF and/or IL-1β in the subject. In further aspects, the administration of a vaccine/composition of the embodiments induces essentially no increase in serum IL-4, IL-13, TNF and/or IL-1β in the subject. In some aspects, the administration of a vaccine/composition of the embodiments induces essentially no increase in IL-4, IL-13, TNF and/or IL-1β at the injection site (e.g., an intramuscular injection site) in the subject.

[1578] In still further aspects, a method of the embodiments comprises administration of a vaccine/composition of the embodiments to a human subject having a disease. In certain aspects, the subject has cardiovascular disease, kidney disease, lung disease or an autoimmune disease. In some aspects, a vaccine/composition of the embodiments is administered to a subject who is receiving anti-coagulation therapy.

[1579] In embodiments, the subject was previously treated with at least a first SARS-CoV-2 vaccine composition.

[1580] In embodiments, the first SARS-CoV-2 vaccine composition was a mRNA vaccine.

[1581] In embodiments, the first SARS-CoV-2 vaccine composition was BNT162 or mRNA-1273.

[1582] In embodiments, the first SARS-CoV-2 vaccine composition was a protein subunit vaccine.

[1583] In embodiments, the first SARS-CoV-2 vaccine composition was NVX-CoV2373 or COVAX.

[1584] In embodiments, the first SARS-CoV-2 vaccine composition was an adenovirus vector vaccine.

[1585] In embodiments, the first SARS-CoV-2 vaccine composition was ADZ1222 or Ad26.COV-2.S.

[1586] In embodiments, the subject has detectable SARS-CoV-2 binding antibodies after receiving the treatment as defined herein. In embodiments, the subject has detectable SARS-CoV-2 M protein-binding antibodies after receiving the treatment as defined herein. In embodiments, the subject has detectable SARS-CoV-2 N protein-binding antibodies after receiving the treatment as defined herein. In embodiments, the subject has detectable SARS-CoV-2 NSP protein-binding antibodies after receiving the treatment as defined herein. In embodiments, the subject has detectable SARS-CoV-2 E protein-binding antibodies after receiving the treatment as defined herein. In embodiments, the subject has detectable SARS-CoV-2 S protein-binding antibodies after receiving the treatment as defined herein.

[1587] According to a further aspect, the present invention also provides a method of manufacturing a composition or a vaccine, comprising the steps of:
[1588] a) optionally, adaptation of AU count of the respective coding sequences according to WO2019092153A1 (claims 1 to 70), thereby modifying the retention time of the nucleic acid on HPLC, allowing co-purification of the nucleic acid composition in step c);
[1589] b) RNA in vitro transcription step using a DNA template in the presence of a cap analogue to obtain capped mRNA, optionally wherein 2, 3, 4, 5, 6, 7, 8, 9, 10 or even more different RNAs are simultaneously produced in the RNA in vitro transcription step using 2, 3, 4, 5, 6, 7, 8, 9, 10 different DNA templates
[1590] c) Purifying the obtained capped RNA of step b) using RP-HPLC, and/or TFF, and/or Oligo(dT) purification and/or AEX, preferably using RP-HPLC and TFF;
[1591] d) Providing a first liquid composition comprising the purified capped RNA of step c);
[1592] e) Providing a second liquid composition comprising at least one cationic lipid as defined herein, a neutral lipid as defined herein, a steroid or steroid analogue as defined herein, and a PEG-lipid as defined herein;
[1593] f) Introducing the first liquid composition and the second liquid composition into at least one mixing means to allow the formation of LNPs comprising capped RNA;
[1594] g) Purifying the obtained LNPs comprising capped RNA;
[1595] h) optionally, lyophilizing the purified LNPs comprising capped RNA.

[1596] Preferably, the mixing means of step f) is a T-piece connector or a microfluidic mixing device. Preferably, the purifying step g) comprises at least one step selected from precipitation step, dialysis step, filtration step, TFF step. Optionally, an enzymatic polyadenylation step may be performed after step b). Optionally, further purification steps may be implemented to e.g. remove residual DNA, buffers, small RNA by-products etc. Optionally, RNA in vitro transcription is performed in the absence of a cap analog, and an enzymatic capping step is performed after RNA vitro transcription. Optionally, RNA in vitro transcription is performed in the presence of at least one modified nucleotide as defined herein.

[1597] Abbreviations
[1598] MERS-CoV: Middle East respiratory syndrome-related coronavirus
[1599] SARS-CoV: Severe acute respiratory syndrome-related coronavirus
[1600] SARS-CoV-2: Severe acute respiratory syndrome-related coronavirus 2
[1601] HCoV: Human coronavirus
[1602] Bat SARS-like CoV: Bat SARS-like coronavirus
[1603] BatCoV: Rousettus bat coronavirus
[1604] PDCoV: Porcine deltacoronavirus
[1605] PEDV: Porcine epidemic diarrhea virus
[1606] MHV: Murine hepatitis virus

### EXAMPLES

[1607] In the following, particular examples illustrating various embodiments and aspects of nucleic acid-based multivalent Coronavirus vaccines of the invention are presented, wherein the encoded antigens are selected or derived from SARS-CoV-2. However, the present invention shall not to be limited in scope by the specific embodiments relating to SARS-CoV-2 presented herein, and should rather be understood as being applicable to other Coronaviruses as defined in the specification, in particular to other pandemic Coronaviruses, e.g. MERS-CoV and/or SARS-CoV-1.

[1608] Accordingly, the following preparations and examples are given to enable those skilled in the art to more clearly understand and to practice the present invention. The present invention, is not limited in scope by the exemplified embodiments, which are intended as illustrations of single aspects of the invention only, and methods, which are functionally equivalent are within the scope of the invention. Indeed, various modifications of the invention in addition to those described herein will become readily apparent to those skilled in the art from the foregoing description and the examples below. All such modifications fall within the scope of the appended claims.

### Example 1: Preparation of DNA and RNA Constructs, Compositions, and Vaccines

[1609] The present example provides methods of obtaining the RNA of the invention as well as methods of generating a composition or a vaccine of the invention.

[1610] 1.1. Preparation of DNA and RNA Constructs:

[1611] DNA sequences encoding different Coronavirus antigens were prepared and used for subsequent RNA in vitro transcription reactions. Said DNA sequences were prepared by modifying the wild type or reference encoding DNA sequences by introducing a G/C optimized or modified coding sequence (e.g., “cds opt1”) for stabilization and expression optimization. Sequences were introduced into a pUC derived DNA vector to comprise stabilizing 3′-UTR sequences and, optionally, 5′-UTR sequences, additionally comprising a stretch of adenosines (e.g. A64 or A100), and optionally a histone-stem-loop (hSL) structure, and optionally a stretch of 30 cytosines (e.g. C30) (see Table 10). The obtained plasmid DNA constructs were transformed and propagated in bacteria using common protocols known in the art. Eventually, the plasmid DNA constructs were extracted, purified, and used for subsequent RNA in vitro transcription.

TABLE 10
mRNA used in Examples

| | | SEQ ID | SEQ ID | SEQ |
|---|---|---|---|---|
| | | NO: | NO: CDS | ID NO: |
| RNA ID | Name | Protein | opt1 (gc) | mRNA |
| R9922 | SARS-COV-2/Wuhan-Hu-1 membrane protein | 15235 | 17112 | 20866 |
| R9924 | SARS-COV-2/Wuhan-Hu-1 membrane protein (A100) | 15235 | 17112 | 18989 |
| R9923 | SARS-COV-2/Wuhan-Hu-1 nucleocapsid protein | 15310 | 17187 | 20941 |
| R9925 | SARS-COV-2/Wuhan-Hu-1 nucleocapsid protein (A100) | 15310 | 17187 | 19064 |
| R9941 | SARS-COV-2/Wuhan-Hu-1 non-structural protein 3 | 15733 | 17610 | 21364 |
| R9946 | SARS-COV-2/Wuhan-Hu-1 non-structural protein 3 (A100) | 15733 | 17610 | 19487 |
| R9942 | SARS-COV-2/Wuhan-Hu-1 non-structural protein 4 | 16415 | 18292 | 22046 |
| R9947 | SARS-COV-2/Wuhan-Hu-1 non-structural protein 4 (A100) | 16415 | 18292 | 20169 |
| R9943 | SARS-COV-2/Wuhan-Hu-1 non-structural protein 6 | 16582 | 18459 | 22213 |
| R9948 | SARS-COV-2/Wuhan-Hu-1 non-structural protein 6 (A100) | 16582 | 18459 | 20336 |
| R10354 | SARS-COV-2/Wuhan-Hu-1 non-structural protein 13 protein | 27908 | 28029 | 28401 |
| R10355 | SARS-COV-2/Wuhan-Hu-1 non-structural protein 14 protein | 27909 | 28030 | 28402 |
| R10382 | SARS-COV-2/Wuhan-Hu-1 non-structural protein 13 protein (A100) | 27908 | 28029 | 28150 |
| R10383 | SARS-COV-2/Wuhan-Hu-1 non-structural protein 14 protein (A100) | 27909 | 28030 | 28151 |
| R9944 | SARS-COV-2/Wuhan-Hu-1 ORF3a protein | 16684 | 18561 | 22315 |
| R9949 | SARS-COV-2/Wuhan-Hu-1 ORF3a protein (A100) | 16684 | 18561 | 20438 |
| R9945 | SARS-COV-2/Wuhan-Hu-1 ORF8 protein | 16997 | 18874 | 22628 |
| R9950 | SARS-COV-2/Wuhan-Hu-1 ORF8 protein (A100) | 16997 | 18874 | 20751 |
| R9515 | SARS-COV-2/Wuhan-Hu-1 or SARS-COV-2/Wuhan/WIV05/2019 | 10 | 137 | 163 |
| | S_stab_PP (K986P_V987P) | | | |
| R9707 | SARS-COV-2/Wuhan-Hu-1 or SARS-COV-2/Wuhan/WIV05/2019 | 10 | 137 | 149 |
| | S_stab_PP (K986P_V987P) (A100) | | | |
| R10384 | SARS-COV-2/Wuhan-Hu-1 or SARS-COV-2/Wuhan/WIV05/2019 | 22961 | 23091 | 23531 |
| | S_stab_PP | | | |
| | (K986P_V987P_L18F_D80A_D215G_L242del_A243del_L244del_ | | | |
| | R24 61_K417N_E484K_N501Y_D614G_A701V) | | | |
| R10385 | SARS-COV-2/Wuhan-Hu-1 or SARS-COV-2/Wuhan/WIV05/2019 | 22963 | 23093 | 23533 |
| | S_stab_PP | | | |
| | (K986P_V987P_L18F_T20N_P26S_D138Y_R190S_K417T_E484K_ | | | |
| | N 501Y_D614G_H655Y_T1027I) | | | |

[1612] 1.2. RNA In Vitro Transcription from Plasmid DNA Templates:

[1613] DNA plasmids prepared according to section 1.1 were enzymatically linearized using a restriction enzyme and used for DNA dependent RNA in vitro transcription using T7 RNA polymerase in the presence of a nucleotide mixture (ATP/GTP/CTP/UTP) and cap analog (e.g. m7GpppG, m7G(5′)ppp(5′)(2′OMeA)pG or m7G(5′)ppp(5′)(2′OMeG)pG)) under suitable buffer conditions. The obtained RNA constructs were purified using RP-HPLC (PureMessenger®, CureVac AG, Tubingen, Germany; WO2008077592) and used for in vitro and in vivo experiments. The generated RNA sequences/constructs are provided in Table 10 with the encoded antigenic protein indicated therein. Further indicated are the used codon optimization (CDS opt), the used UTR design (5′-UTR/3′-UTR), the used 3′ end of the construct (3′ end), and the respective protein, cds and mRNA sequences.

[1614] Generation of Chemically Modified RNA (Prophetic):

[1615] To obtain chemically modified mRNA, RNA in vitro transcription is performed in the presence of a modified nucleotide mixture comprising pseudouridine or N1-methylpseudouridine (m1ψ) instead of uracil. The obtained chemically modified RNA is purified using RP-HPLC (PureMessenger®, CureVac AG, Tubingen, Germany; WO2008077592) and used for further experiments.

[1616] Generation of Capped RNA Using Enzymatic Capping (Prophetic):

[1617] Some RNA constructs are in vitro transcribed in the absence of a cap analog. The cap-structure (cap0 or cap1) is then added enzymatically using capping enzymes as commonly known in the art. In short, in vitro transcribed RNA is capped using a capping kit to obtain cap0-RNA. cap0-RNA is additionally modified using cap specific 2′-O-methyltransferase to obtain cap1-RNA. cap1-RNA is purified e.g. as explained above and used for further experiments.

[1618] RNA for clinical development is produced under current good manufacturing practice e.g. according to WO2016180430, implementing various quality control steps on DNA and RNA level.

[1619] The RNA Constructs of the Examples:

[1620] The generated RNA sequences/constructs are provided in Table 10 with the encoded antigenic protein and the respective UTR elements. If not indicated otherwise, the RNA sequences/constructs of Table 4 have been produced using RNA in vitro transcription in the presence of a m7GpppG, m7G(5′)ppp(5′)(2′OMeA)pG; accordingly, the RNA sequences/constructs comprise a 5′ cap1 structure. If not indicated otherwise, the RNA sequences/constructs of Table 10 have been produced in the absence of chemically modified nucleotides (e.g. pseudouridine (ψ) or N1-methylpseudouridine (m1ψ).

[1621] 1.3. RNA In Vitro Transcription from PCR Amplified DNA Templates (Prophetic):

[1622] Purified PCR amplified DNA templates prepared according to paragraph 1.1 is transcribed in vitro using DNA dependent T7 RNA polymerase in the presence of a nucleotide mixture (ATP/GTP/CTP/UTP) and cap analog (m7GpppG or 3′-O-Me-m7G(5′)ppp(5′)G)) under suitable buffer conditions. Alternatively, PCR amplified DNA is transcribed in vitro using DNA dependent T7 RNA polymerase in the presence of a modified nucleotide mixture (ATP, GTP, CTP, N1-methylpseudouridine (m1ψ) or pseudouridine (ψ) and cap analogue (m7GpppG, m7G(5′)ppp(5′)(2′OMeA)pG or m7G(5′)ppp(5′)(2′OMeG)pG) under suitable buffer conditions. Some RNA constructs are in vitro transcribed in the absence of a cap analog and the cap-structure (cap0 or cap1) is added enzymatically using capping enzymes as commonly known in the art. The obtained RNA is purified e.g. as explained above and used for further experiments. The obtained mRNAs are purified e.g. using RP-HPLC (PureMessenger®, CureVac AG, Tubingen, Germany; WO2008077592) and used for in vitro and in vivo experiments.

[1623] 1.4. Preparation of an LNP Formulated mRNA Composition:

[1624] LNPs were prepared using cationic lipids, structural lipids, a PEG-lipids, and cholesterol. Lipid solution (in ethanol) was mixed with RNA solution (aqueous buffer) using T-piece formulation as outlined below. Obtained LNPs were re-buffered in a carbohydrate buffer via dialysis, and optionally up-concentrated to a target concentration using ultracentrifugation. LNP-formulated mRNA was stored at −80° C. prior to use in in vitro or in vivo experiments.

[1625] In short, lipid nanoparticles were prepared and tested according to the general procedures described in PCT Pub. Nos. WO2015199952, WO2017004143 and WO2017075531, the full disclosures of which are incorporated herein by reference. Lipid nanoparticle (LNP)-formulated mRNA was prepared using an ionizable amino lipid (cationic lipid), phospholipid, cholesterol and a PEGylated lipid (lipids see Table A). LNPs were prepared as follows. Cationic lipid according to formula III-3 (ALC-0315), DSPC, cholesterol and PEG-lipid according to formula IVa (ALC-0159) were solubilized in ethanol at a molar ratio of approximately 47.5:10:40.8:1.7. Lipid nanoparticles (LNP) comprising compound Ill-3 (ALC-0315) were prepared at a ratio of mRNA to total Lipid of 0.03-0.04 w/w. Briefly, the mRNA was diluted to 0.05 to 0.2 mg/mL in 10 to 50 mM citrate buffer, pH 4. Syringe pumps were used to mix the ethanolic lipid solution with the mRNA aqueous solution at a ratio of about 1:5 to 1:3 (vol/vol) with total flow rates above 15 ml/min. The ethanol was then removed and the external buffer replaced with PBS by dialysis. Finally, the lipid nanoparticles were filtered through a 0.2 μm pore sterile filter. Lipid nanoparticle particle diameter size was 60-90 nm as determined by quasi-elastic light scattering using a Malvern Zetasizer Nano (Malvern, UK).

TABLE A
Lipid-based carrier composition of the examples

| | | Ratio | | |
|---|---|---|---|---|
| | Compounds | (mol %) | Structure | Mass |
| 1 | Cholesterol | 40.9 | [chemical structure] | 386.4 |
| 2 | 1,2-distearoyl- sn-glycero-3- phosphocholine (DSPC) | 10 | [chemical structure] | 789.6 |
| 3 | Cationic Lipid | 47.4 | [chemical structure] | 765.7 |
| 4 | PEG Lipid | 1.7 | [chemical structure] | 2010.1 |

[1626] 1.5. Preparation of Combination mRNA Vaccines Comprising Antigen Combinations (Multivalent Vaccine Compositions):

[1627] Combination mRNA vaccines were formulated with LNPs either in a separate or co-formulated way. For separately mixed or formulated mRNA vaccines, each mRNA component was prepared and separately LNP formulated as described in Example 1.4, followed by mixing of the different LNP-formulated components. For co-formulated mRNA vaccine, the different mRNA components are firstly mixed together, followed by a co-formulation in LNPs as described in Example 1.4.

### Example 2: Expression Analysis of mRNA Constructs Encoding SARS-CoV-2 Proteins

[1628] 2.1. Expression of SARS-CoV-2 Proteins in an In Vitro Translation Assay

[1629] To determine in vitro protein expression of the mRNA constructs, each of the mRNA constructs prepared according to Example 1 and listed in Table 10 are mixed with components of Promega Rabbit Reticulocyte Lysate System according to manufacture protocol. The lysate contains the cellular components necessary for protein synthesis (tRNA, ribosomes, amino acids, initiation, elongation and termination factors). As positive control, Luciferase RNA from Lysate System Kit is used. The translation result is analyzed by SIDS-Page and Western Blot analysis (IRDye 800GW streptavidin antibody (1:2000)).

[1630] 2.2. Expression of SARS-CoV-2 Proteins in HeLa Cells and Analysis by FAGS

[1631] To determine in vitro protein expression of the mRNA constructs, HeLa cells are transiently transfected with each of the mRNA encoding SARS-CoV-2 proteins and stained using suitable antibodies (raised in mouse), counterstained with a FITC-coupled secondary antibody. HeLa cells are seeded in a 6-well plate at a density of 400,000 cells/well in cell culture medium (RPMI, 10% FCS, 1% L-Glutamine, 1% Pen/Strep), 24h prior to transfection. HeLa cells are transfected with 2 μg unformulated mRNA using Lipofectamine 2000 (Invitrogen). The mRNA constructs prepared according to Example 1 and listed in Table 10 are used in the experiment, including a negative control (water for injection). 24 hours post transfection, HeLa cells are stained with suitable antibodies (raised in mouse; 1:250) and anti-mouse FITC labelled secondary antibody (1:500) and are subsequently analyzed by flow cytometry (FACS) on a BD FACS Canto II using the FACS Diva software. Quantitative analysis of the fluorescent FITC signal is performed using the FlowJo software package (Tree Star, Inc.).

[1632] 2.3. Expression Analysis of SARS-CoV-2 Proteins Using Western Blot

[1633] For the analysis of SARS-CoV-2 protein expression, HeLa cells are transfected with unformulated mRNA using Lipofectamine as the transfection agent. HeLa cells are seeded in a 6-well plate at a density of 300,000 cells/well. HeLa cells are transfected with 2 μg unformulated mRNA using Lipofectamine 2000 (Invitrogen). The mRNA constructs prepared according to Example 1 and listed in Table 10 are used in the experiment, including a negative control (water for injection). 24h post transfection, HeLa cells are detached by trypsin-free/EDTA buffer, harvested, and cell lysates are prepared. Cell lysates are subjected to SDS-PAGE followed by western blot detection. Western blot analysis is performed using respective antibodies used in combination with a suitable secondary antibody.

### Example 3: Vaccination of Mice with mRNA Encoding SARS-CoV-2 Proteins

[1634] 3.1. Preparation of LNP Formulated mRNA Vaccine:

[1635] mRNA constructs are prepared as described in Example 1 (RNA in vitro transcription). HPLC purified mRNA is formulated with LNPs according to Example 1.4 prior to use in in vivo vaccination experiments. In the experiment, individual antigens are used and tested to assess the induction of immune responses of individual components of the nucleic acid-based multivalent Coronavirus vaccine.

[1636] 3.2. Immunization:

[1637] Female BALB/c mice (6-8 weeks old) are injected intramuscularly (i.m.) with mRNA vaccine compositions and doses as indicated in Table 11. As a negative control, one group of mice is vaccinated with buffer. All animals are vaccinated on day 0 and 21. Blood samples are collected on day 21 (post prime) and 42 (post boost) for the determination of antibody titers.

TABLE 11
Vaccination regimen (Example 3):

| Group | Antigen | mRNA ID | Formulation | Dose |
|---|---|---|---|---|
| 1 | M | R9922 | LNP | 1-5 μg |
| 2 | M | R9923 | LNP | 1-5 μg |
| 3 | N | R9923 | LNP | 1-5 μg |
| 4 | N | R9925 | LNP | 1-5 μg |
| 5 | NSP3 | R9941 | LNP | 1-5 μg |
| 6 | NSP4 | R9942 | LNP | 1-5 μg |
| 7 | NSP6 | R9943 | LNP | 1-5 μg |
| 8 | ORF3a | R9944 | LNP | 1-5 μg |
| 9 | ORF8 | R9945 | LNP | 1-5 μg |
| 10 | NSP3 | R9946 | LNP | 1-5 μg |
| 11 | NSP4 | R9947 | LNP | 1-5 μg |
| 12 | NSP6 | R9948 | LNP | 1-5 μg |
| 13 | ORF3a | R9949 | LNP | 1-5 μg |
| 14 | ORF8 | R9950 | LNP | 1-5 μg |
| 15 | S | R9151 | LNP | 5 μg |
| 16 | | buffer | | |

[1638] 3.3. Determination of IgG1 and IgG2 Antibody Titers Using ELISA:

[1639] ELISA is performed using recombinant SARS-CoV-2 protein for coating. Coated plates are incubated using respective serum dilutions, and binding of specific antibodies to the SARS-CoV-2 proteins are detected using biotinylated isotype specific anti-mouse antibodies followed by streptavidin-HRP (horse radish peroxidase) with Amplex as substrate. Endpoint titers of antibodies (IgG1, IgG2a) are measured by ELISA on day 21, and 42 post vaccinations.

[1640] 3.4. Detection of SARS-CoV-2 Protein-Specific Immune Responses:

[1641] Hela cells are transfected with 2 μg of mRNA encoding SARS-CoV-2 proteins using lipofectamine. The cells are harvested 20h post transfection, and seeded at 1×10⁵ per well into a 96 well plate. The cells are incubated with serum samples of vaccinated mice (diluted 1:50) followed by a FITC-conjugated anti-mouse IgG antibody. Cells were acquired on BD FACS Canto II using DIVA software and analyzed by FlowJo.

[1642] 3.5. Intracellular Cytokine Staining:

[1643] Splenocytes from vaccinated mice are isolated according to a standard protocol known in the art. Briefly, isolated spleens are grinded through a cell strainer and washed in PBS/1% FBS followed by red blood cell lysis. After an extensive washing step with PBS/1% FBS, splenocytes are seeded into 96-well plates (2×10⁶ cells per well). Cells are stimulated with a mixture of SARS-CoV-2 protein specific peptide epitopes (5 μg/ml of each peptide) in the presence of 2.5 μg/ml of an anti-CD28 antibody (BD Biosciences) for 6 hours at 37° C. in the presence of a protein transport inhibitor. After stimulation, cells are washed and stained for intracellular cytokines using the Cytofix/Cytoperm reagent (BD Biosciences) according to the manufacturer's instructions. The following antibodies are used for staining: Thy1.2-FITC (1:200), CD8-APC-H7 (1:100), TNF-PE (1:100), IFNγ-APC (1:100) (eBioscience), CD4-BD Horizon V450 (1:200) (BD Biosciences) and incubated with Fcγ-block diluted 1:100. Aqua Dye is used to distinguish live/dead cells (Invitrogen), Cells are acquired using a Canto II flow cytometer (Beckton Dickinson). Flow cytometry data is analyzed using FlowJo software package (Tree Star, Inc.)

[1644] 3.6. Determination of Virus Neutralization Titers:

[1645] Serum is collected for determination of SARS-CoV-2 neutralization titers (VNTs) detected via CPE (cytopathic effect) or via a pseudo typed particle-based assay.

### Example 4: Vaccination of Mice with Nucleic Acid Based Multivalent Vaccines

[1646] 4.1. Preparation of LNP Formulated mRNA Vaccine:

[1647] mRNA constructs for a multivalent SARS-CoV-2 vaccine are prepared as described in Example 1 (RNA in vitro transcription). HPLC purified mRNA is formulated with LNPs according to Example 1.4 prior to use in in vivo vaccination experiments.

[1648] 4.2. Immunization:

[1649] Female BALB/c mice (6-8 weeks old) are injected intramuscularly (i.m.) with mRNA vaccine (respective RNA identifiers and constructs can be derived from Table 10) with doses as indicated in Table 12. As a negative control, one group of mice is vaccinated with buffer. All animals are vaccinated on day 0 and 21. Blood samples are collected on day 21 (post prime) and 42 (post boost) for the determination of antibody titers. After vaccination experiments, the efficiency of the vaccines is determined.

TABLE 12
Overview of the nucleic acid based vaccines and vaccination scheme

| | Antigen combination | Formulation | Dose per antigen |
|---|---|---|---|
| 1 | M and N | LNP | 0.1-5 μg |
| 2 | M and NSP3 | LNP | 0.1-5 μg |
| 3 | M and NSP4 | LNP | 0.1-5 μg |
| 4 | M and NSP6 | LNP | 0.1-5 μg |
| 5 | M and ORF3A | LNP | 0.1-5 μg |
| 6 | M and ORF8 | LNP | 0.1-5 μg |
| 7 | N and NSP3 | LNP | 0.1-5 μg |
| 8 | N and NSP4 | LNP | 0.1-5 μg |
| 9 | N and NSP6 | LNP | 0.1-5 μg |
| 10 | N and ORF3A | LNP | 0.1-5 μg |
| 11 | N and ORF8 | LNP | 0.1-5 μg |
| 12 | M and N and S | LNP | 0.1-5 μg |
| 13 | M and NSP3 and S | LNP | 0.1-5 μg |
| 14 | M and NSP4 and S | LNP | 0.1-5 μg |
| 15 | M and NSP6 and S | LNP | 0.1-5 μg |
| 16 | M and ORF3A and S | LNP | 0.1-5 μg |
| 17 | M and ORF8 and S | LNP | 0.1-5 μg |
| 18 | N and NSP3 and S | LNP | 0.1-5 μg |
| 19 | N and NSP4 and S | LNP | 0.1-5 μg |
| 20 | N and NSP6 and S | LNP | 0.1-5 μg |
| 21 | N and ORF3A and S | LNP | 0.1-5 μg |
| 22 | N and ORF8 and S | LNP | 0.1-5 μg |
| 23 | N and NSP3 and NSP4 and ORF8 | LNP | 0.1-5 μg |
| 24 | N and NSP3 and NSP4 and ORF8 and S | LNP | 0.1-5 μg |
| | Buffer control | | |

[1650] 4.3. ELISA, FACS, ICS:

[1651] ELISA is performed essentially as described in Example 3. FAGS analysis is performed essentially as described in Example 3. Intracellular cytokine staining is performed essentially as described in Example 3.

[1652] 4.4. Determination of Virus Neutralization Titers:

[1653] Serum is collected for determination of neutralization titers (VNTs) detected via CPE (cytopathic effect) or via a pseudo typed particle-based assay.

### Example 5: Vaccination of Rats with mRNA Encoding SARS-CoV-2 Antigen

[1654] Preparation of LNP Formulated mRNA Vaccine:

[1655] mRNA constructs for a multivalent SARS-CoV-2 vaccine are prepared as described in Example 1 (RNA in vitro transcription). HPLC purified mRNA is formulated with LNPs according to Example 1.4 prior to use in in vivo vaccination experiments.

[1656] Immunization:

[1657] Rats were injected intramuscularly (i.m.) with mRNA vaccine compositions as indicated in Table 12 (see Example 4) in doses ranging from 0.5 μg to 80 μg. As a negative control, one group of rats was vaccinated with buffer. All animals were vaccinated on day 0 and day 21. Blood samples were collected on day 21 (post prime) and 42 (post boost) for the determination of antibody titers.

[1658] Determination of IgG1 and IgG2 Antibody Titers Using ELISA:

[1659] ELISA is performed using recombinant SARS-CoV-2 protein for coating. Coated plates were incubated using respective serum dilutions, and binding of specific antibodies to SARS-CoV-2 S were detected directly with labeled HRP antibody instead of a secondary HRP antibody used for mouse ELISA. The lack of signal amplification in rat ELISA might account for lower titers, therefore ELISA titers between rat and mouse studies are currently not comparable.

### Example 6: Challenge Study of Hamster with SARS-CoV-2

[1660] Preparation of LNP Formulated mRNA Vaccine:

[1661] mRNA constructs for a multivalent SARS-CoV-2 vaccine are prepared as described in Example 1 (RNA in vitro transcription). HPLC purified mRNA is formulated with LNPs according to Example 1.4 prior to use in in vivo vaccination experiments.

[1662] Immunization and Challenge:

[1663] Female hamsters are injected intramuscularly (i.m.) with mRNA vaccine compositions as indicated in Table 12, administered as a 0.4 μg, 2 μg, and 10 μg dose. As a negative control, one group of hamsters is vaccinated with buffer. Group 2 is infected intranasal with SARS-CoV-2 virus. All further animals are vaccinated on day 0 and 28. Blood samples were collected on day 28 (post prime) and 42 (post boost) for the determination of antibody titers. The animals are challenged with SARS-CoV-2 virus at day 56. Protection from challenge infection may be analyzed by viral load in lungs and upper respiratory tract, affected lung tissue, and histology of lungs, liver and heart (4 days after challenge or 7 days after challenge). Alternatively, the animals are challenged at a later time point to show an advantage effect for long-term immunogenicity mediated through e.g. T-cell induced immune responses.

### Example 7: Challenge Study in K18-hACE2 Transgenic Mice

[1664] 7.1 Preparation of LNP Formulated mRNA Vaccine:

[1665] mRNA constructs for a SARS-CoV-2 vaccine are prepared as described in Example 1 (RNA in vitro transcription). HPLC purified mRNA is formulated with LNPs according to Example 1.4 prior to use in in vivo vaccination experiments.

[1666] 7.2. Immunization and Challenge:

[1667] K18-hACE2 transgenic mice are injected intramuscularly (i.m.) with mRNA vaccine compositions as indicated in Table 11 or 12, with doses ranging from 0.1-4 μg per group. As a negative control, one group of mice is vaccinated with buffer. All animals are vaccinated on day 0 and day 28. Blood samples were collected on day 0, day 28 (post prime), and day 56 (post boost) for the determination of antibody titers. The animals are challenged with SARS-CoV-2 virus at day 56 and monitored for 10 days for changes in body weight and survival, which indicates protection from challenge. Alternatively, the animals are challenged at a later time point to show an advantage effect for long-term immunogenicity mediated through e.g. T-cell induced immune responses. Additional parameters of protection include reduced viral loads in lungs and other organs and reduced pathology of the lung.

### Example 8: Challenge Study in K18-hACE2 Transgenic Mice

[1668] Generally, mice are not susceptible to infection with SARS-CoV-2, but a genetically engineered mouse model has been developed that expresses the human receptor ACE2 (hACE2), required for entry of the virus into the host cell under the K18 promoter. The model was originally developed to investigate the causative agent of SARS (SARS-CoV) (MCCRAY, Paul B., et al. Lethal infection of K18-hACE2 mice infected with severe acute respiratory syndrome coronavirus. Journal of virology, 2007, 81. Jg., Nr. 2, S. 813-821) but is now also used as a suitable small animal model for COVID-19. Previously, hACE2 mice have been shown to be susceptible to SARS-CoV-2 and to exhibit a disease course with weight loss, pulmonary pathology, and symptoms similar to those in humans (e.g. BAO, Linlin, et al. The pathogenicity of SARS-CoV-2 in hACE2 transgenic mice. Nature, 2020, 583. Jg., Nr. 7818, S. 830-833, or YINDA, Claude Kwe, et al. K18-hACE2 mice develop respiratory disease resembling severe COVID-19. PLoS pathogens, 2021, 17. Jg., Nr. 1, S. e1009195; DE ALWIS, Ruklanthi M., et al. A Single Dose of Self-Transcribing and Replicating RNA Based SARS-CoV-2 Vaccine Produces Protective Adaptive Immunity In Mice. BioRxiv, 2020.). In principle, the K18-hACE2 mouse is suitable for vaccine studies to investigate the prevention of infection with SARS-CoV-2 or the reduction of viral load, and at the same time to investigate the correlates and causes of a protective effect of an mRNA vaccine against COVID-19 with well-established immunological methods, which are generally available for mouse models.

[1669] The present example shows that multivalent SARS-CoV-2 S mRNA vaccines are able to protect K18-hACE2 mice from SARS-CoV-2 viral challenge, which can be shown e.g. by measuring the viral loads of infected animals, by monitoring the disease progression with weight loss, pulmonary pathology and other symptoms, or by histopathology and survival.

[1670] 8.1 Preparation of LNP Formulated mRNA Vaccine:

[1671] mRNA constructs for a multivalent SARS-CoV-2 vaccine were prepared as described in Example 1 (RNA in vitro transcription). HPLC purified mRNA was formulated with LNPs according to Example 1.4 and Example 1.5 (separately mixed or formulated mRNA vaccines) prior to use in in vivo vaccination experiments.

[1672] 8.2. Immunization and Challenge:

[1673] K18-hACE2 transgenic mice (female, n=10) were injected intramuscularly (i.m.) with a mRNA vaccine composition as indicated in Table 13 (group A). As a negative control, one group of mice was treated with buffer. The animals were vaccinated on day 0 and day 28 with indicated doses at a volume of 20 μl. Blood samples were collected on day 0, day 28 (post prime), and day 56 (post boost) for the determination of antibody titers. The animals were challenged/infected with SARS-CoV-2 virus (10⁵ TCID50 SARS-CoV-2 BavPat1) at day 56 and monitored for 10 days for changes in body weight, general health and survival, which indicates protection from challenge. Additional parameters of protection include reduced viral loads in lungs and other organs and reduced pathology of the lung. RNA extraction and RT-qPCR and sgRNA RT-PCR can be performed as described in Hoffmann et al 2021 (Hoffmann, D., Corleis, B., Rauch, S. et al. CVnCoV and CV2CoV protect human ACE2 transgenic mice from ancestral B BavPat1 and emerging B.1.351 SARS-CoV-2. Nat Commun 12, 4048 (2021)).

TABLE 13
Vaccination regimen (Example 8):

| | | | 5′-UTR/ | | SEQ ID | SEQ ID | |
|---|---|---|---|---|---|---|---|
| | | mRNA | 3′-UTR; | | NO: | NO: | |
| Group | Vaccine composition | ID | UTR Design | 3′-end | Protein | RNA | Dose |
| A | mRNA encoding | | | | | | |
| | N | R9925, | HSD17B4/ | hSL-A100 | 15310 | 17187 | 4 μg |
| | nsp3 | R9946, | PSMB3; a-1 | | 15733 | 17610 | 4 μg |
| | nsp4 | R9947, | | | 16415 | 18292 | 4 μg |
| | Orf8 | R9950 | | | 16997 | 18874 | 4 μg |
| | formulated in LNPs | | | | | | (in total 16 μg) |
| | NaCl buffer | | | | | | |

[1674] RBD Antibody Enzyme-Linked Immunosorbent Assay (ELISA)

[1675] Sera were analyzed using an indirect multi-species ELISA based on the RBD of SARS-CoV-234. For this, ELISA plates (Greiner Bio-One GmbH) were coated with 100 ng/well the RBD overnight at 4° C. in 0.1M carbonate buffer (1.59 g Na₂CO₃ and 2.93 g NaHCO₃, ad. 1 L aqua dest., pH9.6) or were treated with the coating buffer only. Afterwards, the plates were blocked for 1h at 37° C. using 5% skim milk in PBS. Sera were pre-diluted 1/100 in TBS-Tween (TBST) and incubated on the coated and uncoated wells for 1h at RT. A multi-species conjugate (SBVMILK; obtained from ID Screen® Schmallenberg virus Milk Indirect ELISA; IDvet) was diluted 1/80 and then added for 1h at RT. Following the addition of tetramethylbenzidine substrate (IDEXX), the ELISA readings were taken at a wavelength of 450 nm on a Tecan Spectra Mini instrument (Tecan Group Ltd.). Between each step, the plates were washed three times with TBST. The absorbance was calculated by subtracting the optical density measured on the uncoated wells from the values obtained from the protein-coated wells for the respective sample. Of note, the ELISA determines relative abundance of anti-RBD Ig levels and therefore does not allow a direct comparison between different studies.

[1676] Results:

[1677] As shown in FIGS. 1A,1B, and 2 mice of group A benefit from treatment with multivalent vaccine composition comprising mRNA encoding SARS-CoV-2 antigens N, NSP3, NSP4 and ORF8. FIG. 1 demonstrates the percentage body weight changes in days post infection/challenge (FIG. 1A: mean percentage body weight, FIG. 1B: percentage body weight per mouse). FIG. 2 demonstrates survival of challenged mice in days post infection/challenge. The multivalent vaccine composition comprising mRNA encoding SARS-CoV-2 antigens N, NSP3, NSP4 and ORF8 protects 30% of challenged mice.

### Example 9: Challenge Study in K18-hACE2 Transgenic Mice (Prophetic)

[1678] The present example analyses multivalent SARS-CoV-2 S mRNA vaccines (including optionally Spike S as an additional antigen) in the described K18-hACE2 mice challenge model. Readouts are e.g. measuring the viral loads of infected animals, by monitoring the disease progression with weight loss, pulmonary pathology and other symptoms, or by histopathology and survival.

[1679] 8.1 Preparation of LNP Formulated mRNA Vaccine:

[1680] mRNA constructs for a multivalent SARS-CoV-2 vaccine are prepared as described in Example 1 (RNA in vitro transcription). HPLC purified mRNA are formulated with LNPs according to Example 1.4 and Example 1.5 (separately mixed or formulated mRNA vaccines) prior to use in in vivo vaccination experiments.

[1681] 8.2. Immunization and Challenge:

[1682] K18-hACE2 transgenic mice (female, n=10) are injected intramuscularly (i.m.) with mRNA vaccine compositions as indicated in Table 14 and described in Example 8. The multivalent vaccine compositions are chosen exemplary and can be changed according to disclosed multivalent composition/combinations of M, N, NSP3, NSP4, NSP6, NSP13, NSP14, ORF3A, ORF8, and/or E and optionally with additional S.

TABLE 14
Vaccination regimen (Example 9):

| | | | 5′-UTR/3′- | | SEQ ID | SEQ ID | | |
|---|---|---|---|---|---|---|---|---|
| | Vaccine | mRNA | UTR; UTR | | NO: | NO: | | |
| Group | composition | ID | Design | 3′-end | Protein | RNA | Dose | |
| A | mRNA encoding | R9707 | HSD17B4/ | hSL-A100 | 10 | 149 | 0.5 | μg |
| | S_stab formulated | | PSMB3; a-1 | | | | | |
| | in LNPs | | | | | | | |
| B | mRNA encoding | | | | | | 0.5 | μg |
| | S_stab | R9707, | HSD17B4/ | hSL-A100 | 10 | 149 | 4 | μg |
| | N | R9925, | PSMB3; a-1 | | 15310 | 17187 | 4 | μg |
| | nsp3 | R9946, | | | 15733 | 17610 | 4 | μg |
| | nsp4 | R9947, | | | 16415 | 18292 | 4 | μg |
| | Orf8 | R9950 | | | 16997 | 18874 | | |
| | formulated in LNPs | | | | | | (in total 16.5 μg) | |
| C | mRNA encoding | | | | | | | |
| | N | R9925, | HSD17B4/ | hSL-A100 | 15310 | 17187 | 4 | μg |
| | nsp3 | R9946, | PSMB3; a-1 | | 15733 | 17610 | 4 | μg |
| | nsp4 | R9947, | | | 16415 | 18292 | 4 | μg |
| | Orf8 | R9950 | | | 16997 | 18874 | 4 | μg |
| | formulated in LNPs | | | | | | (in total 16 μg) | |
| D | NaCl buffer | | | | | | | |

[1683] Measurements to determine humoral or cellular immune responses can be performed as follows:

[1684] RBD Antibody Enzyme-Linked Immunosorbent Assay (ELISA):

[1685] Sera are analyzed using an indirect multi-species ELISA based on the RBD of SARS-CoV-234. For this, ELISA plates (Greiner Bio-One GmbH) are coated with 100 ng/well the RBD overnight at 40C in 0.1 M carbonate buffer (1.59 g Na₂CO₃ and 2.93 g NaHCO₃, ad. 1 L aqua dest., pH9.6) or are treated with the coating buffer only. Afterwards, the plates are blocked for 1 h at 3700 using 5% skim milk in PBS. Sera are pre-diluted 1/100 in TBS-Tween (TBST) and incubated on the coated and uncoated wells for 1 h at RT. A multi-species conjugate (SBVMILK; obtained from ID Screen® Schmallenberg virus Milk Indirect ELISA; IDvet) is diluted 1/80 and then added for 1h at RT. Following the addition of tetramethylbenzidine substrate (IDEXX), the ELISA readings are taken at a wavelength of 450 nm on a Tecan Spectra Mini instrument (Tecan Group Ltd.). Between each step, the plates are washed three times with TBST. The absorbance is calculated by subtracting the optical density measured on the uncoated wells from the values obtained from the protein-coated wells for the respective sample. Of note, the ELISA determines relative abundance of anti-RBD Ig levels and therefore does not allow a direct comparison between different studies.

[1686] Determination of IgG1 and IgG2 Antibody Titers Using ELISA:

[1687] Alternatively, ELISA is performed using recombinant SARS-CoV-2 S (extracellular domain) protein for coating. Coated plates are incubated using respective serum dilutions, and binding of specific antibodies to SARS-CoV-2 S are detected using biotinylated isotype specific anti-mouse antibodies followed by streptavidin-HRP (horse radish peroxidase) with Amplex as substrate. Endpoint titers of antibodies (IgG1, IgG2a) are measured by ELISA on day 21, and 42 post prime vaccination. To determine SARS-CoV-2 specific antibody titers to e.g. Nucleoprotein N, plates are coated with recombinant N protein.

[1688] Determination of Virus Neutralization Titers (VNTs):

[1689] A Virus neutralization test is performed to evaluate specifically the presence of virus neutralizing antibodies in serum samples (pre-challenge), Therefore, sera are pre-diluted 1/16 or 1/32 with Dulbecco's modified Eagle's medium (DMEM) in a 96-well deep well master plate. Three times 100 μl, representing three technical replicates, of this pre-dilution are transferred into a 96-well plate. A log 2 dilution is conducted by passaging 50 μl of the serum dilution in 50 μl DMEM, leaving 50 μl of sera dilution in each well. Subsequently, 50 μl of the respective SARS-CoV-2 (BavPat1) virus dilution (100 TCID50/well) is added to each well and incubated for 1h at 37° C. Lastly, 100 μl of trypsinated VeroE6 cells (cells of one confluent TC175 flask per 100 ml) in DMEM with 1% penicillin/streptomycin supplementation is added to each well. After 72h incubation at 37° C., the cells are evaluated by light microscopy for a specific CPE.

[1690] A serum dilution is counted as neutralizing in the case no specific CPE was visible. The virus titer is confirmed by virus titration; positive and negative serum samples were included.

[1691] Intracellular Cytokine Staining:

[1692] Splenocytes from vaccinated mice are isolated according to a standard protocol known in the art. Briefly, isolated spleens are grinded through a cell strainer and washed in PBS/1% FBS followed by red blood cell lysis. After an extensive washing step with PBS/1% FBS, splenocytes are seeded into 96-well plates (2×10⁶ cells per well). Cells are stimulated with a mixture of SARS-CoV-2 S protein specific peptide epitopes (5 μg/ml of each peptide) in the presence of 2.5 μg/ml of an anti-CD28 antibody (BD Biosciences) for 6 hours at 37° C. in the presence of a protein transport inhibitor. After stimulation, cells are washed and stained for intracellular cytokines using the Cytofix/Cytoperm reagent (BD Biosciences) according to the manufacturer's instructions. The following antibodies are used for staining: Thy1.2-FITC (1:200), CD8-APC-H7 (1:100), TNF-PE (1:100), IFNγ-APC (1:100) (eBioscience), CD4-BD Horizon V450 (1:200) (BD Biosciences) and incubated with Fcγ-block diluted 1:100. Aqua Dye is used to distinguish live/dead cells (Invitrogen). Cells are acquired using a Canto II flow cytometer (Beckton Dickinson). Flow cytometry data is analyzed using FlowJo software package (Tree Star, Inc.)

[1693] The immunization and challenge of K18-hACE2 mice as described in the present Example can be used to determine the protective efficacy of further inventive mRNA constructs and compositions. Furthermore, by using mutated virus variants or isolates of SARS-CoV-2 (e.g. B.1.351, see also Table 15), it can be shown, that the inventive mRNA vaccine compositions are effective in addition against these virus variants or isolates. Emerging SARS-CoV-2 variants or isolates for analysis are listed in List 1C. Further variants may arise or exist and can be tested as well.

1. A pharmaceutical composition comprising at least one nucleic acid comprising at least one RNA coding sequence encoding at least one antigenic peptide or protein from at least one Coronavirus, wherein the at least one antigenic peptide or protein is a nucleocapsid protein (N) having a sequence at least 90% identical to the sequence according to SEQ ID No.: 15310.

2-11. (canceled)

12. The pharmaceutical composition of claim 1, wherein the at least one RNA coding sequence comprises or consists at least one nucleic acid sequence encoding a nucleocapsid protein (N) being identical or at least 85% identical to any one of the nucleic acid sequences selected from SEQ ID NOs: 17187, 19064 and 20941.

13-43. (canceled)

44. The pharmaceutical composition of claim 1, comprising the at least one further RNA coding sequence encoding at least one further antigenic peptide or protein from a Coronavirus.

45. The pharmaceutical composition of claim 44, comprising at least two RNA nucleic acid sequences according to the following combinations:
M and N; N and NSP4; N and NSP6; N and NSP13; N and NSP 14; N and ORF3A; or N and ORF8.

46. (canceled)

47. The pharmaceutical composition of claim 44, comprising at least four RNA coding sequences encoding:
NSP3 and NSP4 and NSP6 and N; NSP3 and NSP4 and ORF3A and N;
NSP3 and NSP4 and ORF8 and N; NSP3 and NSP6 and ORF3A and N;
NSP3 and NSP6 and ORF8 and N; NSP3 and ORF3A and ORF8 and N;
NSP4 and NSP6 and ORF3A and N; NSP4 and NSP6 and ORF8 and N; or
NSP4 and ORF3A and ORF8 and N; NSP6 and ORF3A and ORF8 and N.

48. The pharmaceutical composition of claim 44, comprising at least five RNA coding sequences encoding:
NSP3 and NSP4 and NSP6 and M and N; NSP3 and NSP4 and ORF3A and M and N;
NSP3 and NSP4 and ORF8 and M and N; NSP3 and NSP6 and ORF3A and M and N;
NSP3 and NSP6 and ORF8 and M and N; NSP3 and ORF3A and ORF8 and M and N;
NSP4 and NSP6 and ORF3A and M and N; NSP4 and NSP6 and ORF8 and M and N; or
NSP4 and ORF3A and ORF8 and M and N; NSP6 and ORF3A and ORF8 and M and N.

49. The pharmaceutical composition of claim 1, additionally comprising at least one RNA comprising at least one coding sequence encoding at least one antigenic peptide or protein selected or derived from at least one Coronavirus spike protein (S), or an immunogenic fragment thereof.

50-53. (canceled)

54. The pharmaceutical composition of claim 49, wherein the Coronavirus spike protein (S) is a SARS-CoV-2 spike protein (S1, S2, or S1 and S2), or an immunogenic fragment thereof

55. The pharmaceutical composition of claim 54, wherein the spike protein is a pre-fusion stabilized spike protein (S_stab) comprising at least one pre-fusion stabilizing mutation.

56. The pharmaceutical composition of claim 55, wherein the at least one pre-fusion stabilizing mutation comprises the following amino acid substitutions: K986P and V987P.

57-96. (canceled)

97. The pharmaceutical composition of claim 96, wherein the at least one RNA coding sequence is a codon modified coding sequence having an increased G/C content.

98. The pharmaceutical composition of claim 97, wherein the at least one RNA coding sequence has a G/C content of at least about 50%, 55%, or 60%.

99. The pharmaceutical composition of claim 1, wherein the at least one nucleic acid comprises at least one heterologous untranslated region selected from at least one heterologous 5′-UTR and/or at least one heterologous 3′-UTR.

100-106. (canceled)

107. The pharmaceutical composition of claim 1, wherein the at least one nucleic acid is a e N mRNA, a self-replicating RNA, a circular RNA, or a replicon RNA.

108. The pharmaceutical composition of claim 107, wherein the at least one nucleic acid is an mRNA.

109-110. (canceled)

111. The pharmaceutical composition of claim 107, wherein all uracil nucleotides are replaced by pseudouridine (Ψ) nucleotides and/or N1-methylpseudouridine (m1Ψ) nucleotides.

112-115. (canceled)

116. The pharmaceutical composition of claim 1, wherein the at least one nucleic acid is complexed or associated with one or more lipids thereby forming lipid nanoparticles (LNPs).

117-146. (canceled)

147. A Kit or kit of parts, comprising at least one pharmaceutical composition of claim 1 and technical instructions providing information on administration and dosage of the kit components.

148-149. (canceled)

150. A method of treating or preventing a disorder, wherein the method comprises applying or administering to a subject in need thereof the pharmaceutical composition of claim 1.

151-156. (canceled)

157. A method of stabilizing a pharmaceutical composition of claim 1 comprising lyophilizing the composition or vaccine to a produce a stabilized composition or vaccine.

158-160. (canceled)

The application's sequence listing, which the Patent Office published only in electronic form, follows.

SEQUENCE LISTING (28521 sequences)

SEQ ID NO: 1 - protein, 1273 aa, Artificial Sequence
  SARS-CoV-2/Wuhan/WIV05/2019__EPI_ISL_402128 spike protein (1-1273)
MFVFLVLLPLVSSQCVNLTTRTQLPPAYTNSFTRGVYYPDKVFRSSVLHSTQDLFLPFFSNVTWFHAIHVSGTNGTKRFDNPVLPFNDGVYFASTEKSNIIRGWIFGTTLDSKTQSLLIVNNATNVVIKVCEFQFCNDPFLGVYYHKNNKSWMESEFRVYSSANNCTFEYVSQPFLMDLEGKQGNFKNLREFVFKNIDGYFKIYSKHTPINLVRDLPQGFSALEPLVDLPIGINITRFQTLLALHRSYLTPGDSSSGWTAGAAAYYVGYLQPRTFLLKYNENGTITDAVDCALDPLSETKCTLKSFTVEKGIYQTSNFRVQPTESIVRFPNITNLCPFGEVFNATRFASVYAWNRKRISNCVADYSVLYNSASFSTFKCYGVSPTKLNDLCFTNVYADSFVIRGDEVRQIAPGQTGKIADYNYKLPDDFTGCVIAWNSNNLDSKVGGNYNYLYRLFRKSNLKPFERDISTEIYQAGSTPCNGVEGFNCYFPLQSYGFQPTNGVGYQPYRVVVLSFELLHAPATVCGPKKSTNLVKNKCVNFNFNGLTGTGVLTESNKKFLPFQQFGRDIADTTDAVRDPQTLEILDITPCSFGGVSVITPGTNTSNQVAVLYQDVNCTEVPVAIHADQLTPTWRVYSTGSNVFQTRAGCLIGAEHVNNSYECDIPIGAGICASYQTQTNSPRRARSVASQSIIAYTMSLGAENSVAYSNNSIAIPTNFTISVTTEILPVSMTKTSVDCTMYICGDSTECSNLLLQYGSFCTQLNRALTGIAVEQDKNTQEVFAQVKQIYKTPPIKDFGGFNFSQILPDPSKPSKRSFIEDLLFNKVTLADAGFIKQYGDCLGDIAARDLICAQKFNGLTVLPPLLTDEMIAQYTSALLAGTITSGWTFGAGAALQIPFAMQMAYRFNGIGVTQNVLYENQKLIANQFNSAIGKIQDSLSSTASALGKLQDVVNQNAQALNTLVKQLSSNFGAISSVLNDILSRLDKVEAEVQIDRLITGRLQSLQTYVTQQLIRAAEIRASANLAATKMSECVLGQSKRVDFCGKGYHLMSFPQSAPHGVVFLHVTYVPAQEKNFTTAPAICHDGKAHFPREGVFVSNGTHWFVTQRNFYEPQIITTDNTFVSGNCDVVIGIVNNTVYDPLQPELDSFKEELDKYFKNHTSPDVDLGDISGINASVVNIQKEIDRLNEVAKNLNESLIDLQELGKYEQYIKWPWYIWLGFIAGLIAIVMVTIMLCCMTSCCSCLKGCCSCGSCCKFDEDDSEPVLKGVKLHYT

SEQ ID NO: 2 - protein, 1269 aa, Artificial Sequence
  SARS-CoV-2/bat/Yunnan/RaTG13/2013__EPI_ISL_402131 spike protein (1-1269)
MFVFLVLLPLVSSQCVNLTTRTQLPPAYTNSSTRGVYYPDKVFRSSVLHLTQDLFLPFFSNVTWFHAIHVSGTNGIKRFDNPVLPFNDGVYFASTEKSNIIRGWIFGTTLDSKTQSLLIVNNATNVVIKVCEFQFCNDPFLGVYYHKNNKSWMESEFRVYSSANNCTFEYVSQPFLMDLEGKQGNFKNLREFVFKNIDGYFKIYSKHTPINLVRDLPPGFSALEPLVDLPIGINITRFQTLLALHRSYLTPGDSSSGWTAGAAAYYVGYLQPRTFLLKYNENGTITDAVDCALDPLSETKCTLKSFTVEKGIYQTSNFRVQPTDSIVRFPNITNLCPFGEVFNATTFASVYAWNRKRISNCVADYSVLYNSTSFSTFKCYGVSPTKLNDLCFTNVYADSFVITGDEVRQIAPGQTGKIADYNYKLPDDFTGCVIAWNSKHIDAKEGGNFNYLYRLFRKANLKPFERDISTEIYQAGSKPCNGQTGLNCYYPLYRYGFYPTDGVGHQPYRVVVLSFELLNAPATVCGPKKSTNLVKNKCVNFNFNGLTGTGVLTESNKKFLPFQQFGRDIADTTDAVRDPQTLEILDITPCSFGGVSVITPGTNASNQVAVLYQDVNCTEVPVAIHADQLTPTWRVYSTGSNVFQTRAGCLIGAEHVNNSYECDIPIGAGICASYQTQTNSRSVASQSIIAYTMSLGAENSVAYSNNSIAIPTNFTISVTTEILPVSMTKTSVDCTMYICGDSTECSNLLLQYGSFCTQLNRALTGIAVEQDKNTQEVFAQVKQIYKTPPIKDFGGFNFSQILPDPSKPSKRSFIEDLLFNKVTLADAGFIKQYGDCLGDIAARDLICAQKFNGLTVLPPLLTDEMIAQYTSALLAGTITSGWTFGAGAALQIPFAMQMAYRFNGIGVTQNVLYENQKLIANQFNSAIGKIQDSLSSTASALGKLQDVVNQNAQALNTLVKQLSSNFGAISSVLNDILSRLDKVEAEVQIDRLITGRLQSLQTYVTQQLIRAAEIRASANLAATKMSECVLGQSKRVDFCGKGYHLMSFPQSAPHGVVFLHVTYVPAQEKNFTTAPAICHDGKAHFPREGVFVSNGTHWFVTQRNFYEPQIITTDNTFVSGSCDVVIGIVNNTVYDPLQPELDSFKEELDKYFKNHTSPDVDLGDISGINASVVNIQKEIDRLNEVAKNLNESLIDLQELGKYEQYIKWPWYIWLGFIAGLIAIIMVTIMLCCMTSCCSCLKGCCSCGSCCKFDEDDSEPVLKGVKLHYT

SEQ ID NO: 3 - protein, 1273 aa, Artificial Sequence
  SARS-CoV-2/Wuhan/HBCDC-HB-01/2019__EPI_ISL_402132 spike protein (1-1273)
MFVFLVLLPLVSSQCVNLTTRTQLPPAYTNSITRGVYYPDKVFRSSVLHSTQDLFLPFFSNVTWFHAIHVSGTNGTKRFDNPVLPFNDGVYFASTEKSNIIRGWIFGTTLDSKTQSLLIVNNATNVVIKVCEFQFCNDPFLGVYYHKNNKSWMESEFRVYSSANNCTFEYVSQPFLMDLEGKQGNFKNLREFVFKNIDGYFKIYSKHTPINLVRDLPQGFSALEPLVDLPIGINITRFQTLLALHRSYLTPGDSSSGWTAGAAAYYVGYLQPRTFLLKYNENGTITDAVDCALDPLSETKCTLKSFTVEKGIYQTSNFRVQPTESIVRFPNITNLCPFGEVFNATRFASVYAWNRKRISNCVADYSVLYNSASFSTFKCYGVSPTKLNDLCFTNVYADSFVIRGDEVRQIAPGQTGKIADYNYKLPDDFTGCVIAWNSNNLDSKVGGNYNYLYRLFRKSNLKPFERDISTEIYQAGSTPCNGVEGFNCYFPLQSYGFQPTNGVGYQPYRVVVLSFELLHAPATVCGPKKSTNLVKNKCVNFNFNGLTGTGVLTESNKKFLPFQQFGRDIADTTDAVRDPQTLEILDITPCSFGGVSVITPGTNTSNQVAVLYQDVNCTEVPVAIHADQLTPTWRVYSTGSNVFQTRAGCLIGAEHVNNSYECDIPIGAGICASYQTQTNSPRRARSVASQSIIAYTMSLGAENSVAYSNNSIAIPTNFTISVTTEILPVSMTKTSVDCTMYICGDSTECSNLLLQYGSFCTQLNRALTGIAVEQDKNTQEVFAQVKQIYKTPPIKDFGGFNFSQILPDPSKPSKRSFIEDLLFNKVTLADAGFIKQYGDCLGDIAARDLICAQKFNGLTVLPPLLTDEMIAQYTSALLAGTITSGWTFGAGAALQIPFAMQMAYRFNGIGVTQNVLYENQKLIANQFNSAIGKIQDSLSSTASALGKLQDVVNQNAQALNTLVKQLSSNFGAISSVLNDILSRLDKVEAEVQIDRLITGRLQSLQTYVTQQLIRAAEIRASANLAATKMSECVLGQSKRVDFCGKGYHLMSFPQSAPHGVVFLHVTYVPAQEKNFTTAPAICHDGKAHFPREGVFVSNGTHWFVTQRNFYEPQIITTDNTFVSGNCDVVIGIVNNTVYDPLQPELDSFKEELDKYFKNHTSPDVDLGDISGINASVVNIQKEIDRLNEVAKNLNESLIDLQELGKYEQYIKWPWYIWLGFIAGLIAIVMVTIMLCCMTSCCSCLKGCCSCGSCCKFDEDDSEPVLKGVKLHYT

SEQ ID NO: 4 - protein, 1273 aa, Artificial Sequence
  SARS-CoV-2/Guangdong/20SF028/2020__EPI_ISL_403936 spike protein (1-1273)
MFVFLVLLPLVSSQCVNLTTRTQLPPAYTNSFTRGVYYPDKVFRSSVLYSTQDLFLPFFSNVTWFHAIHVSGTNGTKRFDNPVLPFNDGVYFASTEKSNIIRGWIFGTTLDSKTQSLLIVNNATNVVIKVCEFQFCNDPFLGVYYHKNNKSWMESEFRVYSSANNCTFEYVSQPFLMDLEGKQGNFKNLREFVFKNIDGYFKIYSKHTPINLVRDLPQGFSALEPLVDLPIGINITRFQTLLALHRSYLTPGDSSSGWTAGAAAYYVGYLQPRTFLLKYNENGTITDAVDCALDPLSETKCTLKSFTVEKGIYQTSNFRVQPTESIVRFPNITNLCPFGEVFNATRFASVYAWNRKRISNCVADYSVLYNSASFSTFKCYGVSPTKLNDLCFTNVYADSFVIRGDEVRQIAPGQTGKIADYNYKLPDDFTGCVIAWNSNNLDSKVGGNYNYLYRLFRKSNLKPFERDISTEIYQAGSTPCNGVEGFNCYFPLQSYGFQPTNGVGYQPYRVVVLSFELLHAPATVCGPKKSTNLVKNKCVNFNFNGLTGTGVLTESNKKFLPFQQFGRDIADTTDAVRDPQTLEILDITPCSFGGVSVITPGTNTSNQVAVLYQDVNCTEVPVAIHADQLTPTWRVYSTGSNVFQTRAGCLIGAEHVNNSYECDIPIGAGICASYQTQTNSPRRARSVASQSIIAYTMSLGAENSVAYSNNSIAIPTNFTISVTTEILPVSMTKTSVDCTMYICGDSTECSNLLLQYGSFCTQLNRALTGIAVEQDKNTQEVFAQVKQIYKTPPIKDFGGFNFSQILPDPSKPSKRSFIEDLLFNKVTLADAGFIKQYGDCLGDIAARDLICAQKFNGLTVLPPLLTDEMIAQYTSALLAGTITSGWTFGAGAALQIPFAMQMAYRFNGIGVTQNVLYENQKLIANQFNSAIGKIQDSLSSTASALGKLQDVVNQNAQALNTLVKQLSSNFGAISSVLNDILSRLDKVEAEVQIDRLITGRLQSLQTYVTQQLIRAAEIRASANLAATKMSECVLGQSKRVDFCGKGYHLMSFPQSAPHGVVFLHVTYVPAQEKNFTTAPAICHDGKAHFPREGVFVSNGTHWFVTQRNFYEPQIITTDNTFVSGNCDVVIGIVNNTVYDPLQPELDSFKEELDKYFKNHTSPDVDLGDISGINASVVNIQKEIDRLNEVAKNLNESLIDLQELGKYEQYIKWPWYIWLGFIAGLIAIVMVTIMLCCMTSCCSCLKGCCSCGSCCKFDEDDSEPVLKGVKLHYT

SEQ ID NO: 5 - protein, 1273 aa, Artificial Sequence
  SARS-CoV-2/Shenzhen/SZTH-001/2020__EPI_ISL_406592 spike protein (1-1273)
MFVFLVLLPLVSSQCVNLTTRTQLPPAYTNSFTRGVYYPDKVFRSSVLHSTQDLFLPFFSNVTWFHAIHVSGTNGTKRFDNPVLPFNDGVYFASTEKSNIIRGWIFGTTLDSKTQSLLIVNNATNVVIKVCEFQFCNDPFLGVYYHKNNKSWMESEFRVYSSANNCTFEYVSQPFLMDLEGKQGNFKNLREFVFKNIDGYFKIYSKHTPINLVRDLPQGFSALEPLVDLPIGINITRFQTLLALHRSYLTPGDSSSGWTAGAAAYYVGYLQPRTFLLKYNENGTITDAVDCALDPLSETKCTLKSFTVEKGIYQTSNFRVQPTESIVRFPNITNLCPFGEVFNATRFASVYAWNRKRISNCVADYSVLYNSASFSTFKCYGVSPTKLNDLCFTNVYADSFVIRGDEVRQIAPGQTGKIADYNYKLPDDFTGCVIAWNSNNLDSKVGGNYNYLYRLFRKSNLKPFERDISTEIYQAGSTPCNGVEGFNCYFPLQSYGFQPTNGVGYQPYRVVVLSFELLHAPATVCGPKKSTNLVKNKCVNFNFNGLTGTGVLTESNKKFLPFQQFGRDIADTTDAVRDPQTLEILDITPCSFGGVSVITPGTNTSNQVAVLYQDVNCTEVPVAIHADQLTPTWRVYSTGSNVFQTRAGCLIGAEHVNNSYECDIPIGAGICASYQTQTNSPRRARSVASQSIIAYTMSLGAENSVAYSNNSIAIPTNFTISVTTEILPVSMTKTSVDCTMYICGDSTECSNLLLQYGSFCTQLNRALTGIAVEQDKNTQEVFAQVKQIYKTPPIKDFGGFNFSQILPDPSKPSKRSFIEDLLFNKVTLADAGFIKQYGDCLGDIAARDLICAQKFNGLTVLPPLLTDEMIAQYTSALLAGTITSGWTFGAGAALQIPFAMQMAYRFNGIGVTQNVLYENQKLIANQFNSAIGKIQDSLSSTASALGKLQDVVNQNAQALNTLVKQLSSNFGAISSVLNDILSRLDKVEAEVQIDRLITGRLQSLQTYVTQQLIRAAEIRASANLAATKMSECVLGQSKRVDFCGKGYHLMSFPQSAPHGVVFLHVTYVPAQEKNFTTAPAICHDGKAHFPREGVFVSNGTHWFVTQRNFYEPQIITTDNTFVSGNCDVLIGIVNNTVYDPLQPELDSFKEELDKYFKNHTSPDVDLGDISGINASVVNIQKEIDRLNEVAKNLNESLIDLQELGKYEQYIKWPWYIWLGFIAGLIAIVMVTIMLCCMTSCCSCLKGCCSCGSCCKFDEDDSGPVLKGVKLHYT

SEQ ID NO: 6 - protein, 1273 aa, Artificial Sequence
  SARS-CoV-2/Shenzhen/SZTH-004/2020__EPI_ISL_406595 spike protein (1-1273)
MFVFLVLLPLVSSQCVNLTTRTQLPPAYTNSFTRGVYYPDKVFRSSVLHSTQDLFLPFFSNVTWFHAIHVSGTNGTKRFDNPVLPFNDGVYFASTEKSNIIRGWIFGTTLDSKTQSLLIVNNATNVVIKVCEFQFCNDPFLGVYYHKNNKSWMESEFRVYSSANNCTFEYVSQPFLMDLEGKQGNFKNLREFVFKNIDGYFKIYSKHTPINLVRDLPQGFSALEPLVDLPIGINITRFQTLLALHRSYLTPGDSSSGWTAGAAAYYVGYLQPRTFLLKYNENGTITDAVDCALDPLSETKCTLKSFTVEKGIYQTSNFRVQPTESIVRFPNITNLCPFGEVFNATRFASVYAWDRKRISNCVAYYSVLYNSASFSTFKCYGVSPTKLNDLCFTNVYADSFVIRGDEVRQIAPGQTGKIADYNYKLPDDFTGCVIAWNSNNLDSKVGGNYNYLYRLFRKSNLKPFERDISTEIYQAGSTPCNGVEGFNCYFPLQSYGFQPTNGVGYQPYRVVVLSFELLHAPATVCGPKKSTNLVKNKCVNFNFNGLTGTGVLTESNKKFLPFQQFGRDIADTTDAVRDPQTLEILDITPCSFGGVSVITPGTNTSNQVAVLYQDVNCTEVPVAIHADQLTPTWRVYSTGSNVFQTRAGCLIGAEHVNNSYECDIPIGAGICASYQTQTNSPRRARSVASQSIIAYTMSLGAENSVAYSNNSIAIPTNFTISVTTEILPVSMTKTSVDCTMYICGDSTECSNLLLQYGSFCTQLNRALTGIAVEQDKNTQEVFAQVKQIYKTPPIKDFGGFNFSQILPDPSKPSKRSFIEDLLFNKVTLADAGFIKQYGDCLGDIAARDLICAQKFNGLTVLPPLLTDEMIAQYTSALLAGTITSGWTFGAGAALQIPFAMQMAYRFNGIGVTQNVLYENQKLIANQFNSAIGKIQDSLSSTASALGKLQDVVNQNAQALNTLVKQLSSNFGAISSVLNDILSRLDKVEAEVQIDRLITGRLQSLQTYVTQQLIRAAEIRASANLAATKMSECVLGQSKRVDFCGKGYHLMSFPQSAPHGVVFLHVTYVPAQEKNFTTAPAICHDGKAHFPREGVFVSNGTHWFVTQRNFYEPQIITTDNTFVSGNCDVVIGIVNNTVYDPLQPELDSFKEELDKYFKNHTSPDVDLGDISGINASVVNIQKEIDRLNEVAKNLNESLIDLQELGKYEQYIKWPWYIWLGFIAGLIAIVMVTIMLCCMTSCCSCLKGCCSCGSCCKFDEDDSEPVLKGVKLHYT

SEQ ID NO: 7 - protein, 1273 aa, Artificial Sequence
  SARS-CoV-2/France/IDF0372/2020__EPI_ISL_406596 spike protein (1-1273)
MFVFLVLLPLVSSQCVNLTTRTQLPPAYTNSFTRGVYYPDKVFRSSVLHSTQDLFLPFFSNVTWFHAIHVSGTNGTKRFDNPVLPFNDGVYFASTEKSNIIRGWIFGTTLDSKTQSLLIVNNATNVVIKVCEFQFCNDPFLGVYYHKNNKSWMESEFRVYSSANNCTFEYVSQPFLMDLEGKQGNFKNLREFVFKNIDGYFKIYSKHTPINLVRDLPQGFSALEPLVDLPIGINITRFQTLLALHRSYLTPGDSSSGWTAGAAAYYVGYLQPRTFLLKYNENGTITDAVDCALDPLSETKCTLKSFTVEKGIYQTSNFRVQPTESIVRFPNITNLCPFGEVFNATRFASVYAWNRKRISNCVADYSFLYNSASFSTFKCYGVSPTKLNDLCFTNVYADSFVIRGDEVRQIAPGQTGKIADYNYKLPDDFTGCVIAWNSNNLDSKVGGNYNYLYRLFRKSNLKPFERDISTEIYQAGSTPCNGVEGFNCYFPLQSYGFQPTNGVGYQPYRVVVLSFELLHAPATVCGPKKSTNLVKNKCVNFNFNGLTGTGVLTESNKKFLPFQQFGRDIADTTDAVRDPQTLEILDITPCSFGGVSVITPGTNTSNQVAVLYQDVNCTEVPVAIHADQLTPTWRVYSTGSNVFQTRAGCLIGAEHVNNSYECDIPIGAGICASYQTQTNSPRRARSVASQSIIAYTMSLGAENSVAYSNNSIAIPTNFTISVTTEILPVSMTKTSVDCTMYICGDSTECSNLLLQYGSFCTQLNRALTGIAVEQDKNTQEVFAQVKQIYKTPPIKDFGGFNFSQILPDPSKPSKRSFIEDLLFNKVTLADAGFIKQYGDCLGDIAARDLICAQKFNGLTVLPPLLTDEMIAQYTSALLAGTITSGWTFGAGAALQIPFAMQMAYRFNGIGVTQNVLYENQKLIANQFNSAIGKIQDSLSSTASALGKLQDVVNQNAQALNTLVKQLSSNFGAISSVLNDILSRLDKVEAEVQIDRLITGRLQSLQTYVTQQLIRAAEIRASANLAATKMSECVLGQSKRVDFCGKGYHLMSFPQSAPHGVVFLHVTYVPAQEKNFTTAPAICHDGKAHFPREGVFVSNGTHWFVTQRNFYEPQIITTDNTFVSGNCDVVIGIVNNTVYDPLQPELDSFKEELDKYFKNHTSPDVDLGDISGINASVVNIQKEIDRLNEVAKNLNESLIDLQELGKYEQYIKWPWYIWLGFIAGLIAIVMVTIMLCCMTSCCSCLKGCCSCGSCCKFDEDDSEPVLKGVKLHYT

SEQ ID NO: 8 - protein, 1273 aa, Artificial Sequence
  SARS-CoV-2/Australia/VIC01/2020__EPI_ISL_406844 spike protein (1-1273)
MFVFLVLLPLVSSQCVNLTTRTQLPPAYTNSFTRGVYYPDKVFRSSVLHSTQDLFLPFFSNVTWFHAIHVSGTNGTKRFDNPVLPFNDGVYFASTEKSNIIRGWIFGTTLDSKTQSLLIVNNATNVVIKVCEFQFCNDPFLGVYYHKNNKSWMESEFRVYSSANNCTFEYVSQPFLMDLEGKQGNFKNLREFVFKNIDGYFKIYSKHTPINLVRDLPQGFSALEPLVDLPIGINITRFQTLLALHRRYLTPGDSSSGWTAGAAAYYVGYLQPRTFLLKYNENGTITDAVDCALDPLSETKCTLKSFTVEKGIYQTSNFRVQPTESIVRFPNITNLCPFGEVFNATRFASVYAWNRKRISNCVADYSVLYNSASFSTFKCYGVSPTKLNDLCFTNVYADSFVIRGDEVRQIAPGQTGKIADYNYKLPDDFTGCVIAWNSNNLDSKVGGNYNYLYRLFRKSNLKPFERDISTEIYQAGSTPCNGVEGFNCYFPLQSYGFQPTNGVGYQPYRVVVLSFELLHAPATVCGPKKSTNLVKNKCVNFNFNGLTGTGVLTESNKKFLPFQQFGRDIADTTDAVRDPQTLEILDITPCSFGGVSVITPGTNTSNQVAVLYQDVNCTEVPVAIHADQLTPTWRVYSTGSNVFQTRAGCLIGAEHVNNSYECDIPIGAGICASYQTQTNSPRRARSVASQSIIAYTMSLGAENSVAYSNNSIAIPTNFTISVTTEILPVSMTKTSVDCTMYICGDSTECSNLLLQYGSFCTQLNRALTGIAVEQDKNTQEVFAQVKQIYKTPPIKDFGGFNFSQILPDPSKPSKRSFIEDLLFNKVTLADAGFIKQYGDCLGDIAARDLICAQKFNGLTVLPPLLTDEMIAQYTSALLAGTITSGWTFGAGAALQIPFAMQMAYRFNGIGVTQNVLYENQKLIANQFNSAIGKIQDSLSSTASALGKLQDVVNQNAQALNTLVKQLSSNFGAISSVLNDILSRLDKVEAEVQIDRLITGRLQSLQTYVTQQLIRAAEIRASANLAATKMSECVLGQSKRVDFCGKGYHLMSFPQSAPHGVVFLHVTYVPAQEKNFTTAPAICHDGKAHFPREGVFVSNGTHWFVTQRNFYEPQIITTDNTFVSGNCDVVIGIVNNTVYDPLQPELDSFKEELDKYFKNHTSPDVDLGDISGINASVVNIQKEIDRLNEVAKNLNESLIDLQELGKYEQYIKWPWYIWLGFIAGLIAIVMVTIMLCCMTSCCSCLKGCCSCGSCCKFDEDDSEPVLKGVKLHYT

SEQ ID NO: 9 - protein, 1273 aa, Artificial Sequence
  SARS-CoV-2/Germany/BavPat1/2020__EPI_ISL_406862 spike protein (1-1273)
MFVFLVLLPLVSSQCVNLTTRTQLPPAYTNSFTRGVYYPDKVFRSSVLHSTQDLFLPFFSNVTWFHAIHVSGTNGTKRFDNPVLPFNDGVYFASTEKSNIIRGWIFGTTLDSKTQSLLIVNNATNVVIKVCEFQFCNDPFLGVYYHKNNKSWMESEFRVYSSANNCTFEYVSQPFLMDLEGKQGNFKNLREFVFKNIDGYFKIYSKHTPINLVRDLPQGFSALEPLVDLPIGINITRFQTLLALHRSYLTPGDSSSGWTAGAAAYYVGYLQPRTFLLKYNENGTITDAVDCALDPLSETKCTLKSFTVEKGIYQTSNFRVQPTESIVRFPNITNLCPFGEVFNATRFASVYAWNRKRISNCVADYSVLYNSASFSTFKCYGVSPTKLNDLCFTNVYADSFVIRGDEVRQIAPGQTGKIADYNYKLPDDFTGCVIAWNSNNLDSKVGGNYNYLYRLFRKSNLKPFERDISTEIYQAGSTPCNGVEGFNCYFPLQSYGFQPTNGVGYQPYRVVVLSFELLHAPATVCGPKKSTNLVKNKCVNFNFNGLTGTGVLTESNKKFLPFQQFGRDIADTTDAVRDPQTLEILDITPCSFGGVSVITPGTNTSNQVAVLYQGVNCTEVPVAIHADQLTPTWRVYSTGSNVFQTRAGCLIGAEHVNNSYECDIPIGAGICASYQTQTNSPRRARSVASQSIIAYTMSLGAENSVAYSNNSIAIPTNFTISVTTEILPVSMTKTSVDCTMYICGDSTECSNLLLQYGSFCTQLNRALTGIAVEQDKNTQEVFAQVKQIYKTPPIKDFGGFNFSQILPDPSKPSKRSFIEDLLFNKVTLADAGFIKQYGDCLGDIAARDLICAQKFNGLTVLPPLLTDEMIAQYTSALLAGTITSGWTFGAGAALQIPFAMQMAYRFNGIGVTQNVLYENQKLIANQFNSAIGKIQDSLSSTASALGKLQDVVNQNAQALNTLVKQLSSNFGAISSVLNDILSRLDKVEAEVQIDRLITGRLQSLQTYVTQQLIRAAEIRASANLAATKMSECVLGQSKRVDFCGKGYHLMSFPQSAPHGVVFLHVTYVPAQEKNFTTAPAICHDGKAHFPREGVFVSNGTHWFVTQRNFYEPQIITTDNTFVSGNCDVVIGIVNNTVYDPLQPELDSFKEELDKYFKNHTSPDVDLGDISGINASVVNIQKEIDRLNEVAKNLNESLIDLQELGKYEQYIKWPWYIWLGFIAGLIAIVMVTIMLCCMTSCCSCLKGCCSCGSCCKFDEDDSEPVLKGVKLHYT

SEQ ID NO: 10 - protein, 1273 aa, Artificial Sequence
  SARS-CoV-2/Wuhan/WIV05/2019__EPI_ISL_402128 spike protein (1-1273)(K986P_V987P)
MFVFLVLLPLVSSQCVNLTTRTQLPPAYTNSFTRGVYYPDKVFRSSVLHSTQDLFLPFFSNVTWFHAIHVSGTNGTKRFDNPVLPFNDGVYFASTEKSNIIRGWIFGTTLDSKTQSLLIVNNATNVVIKVCEFQFCNDPFLGVYYHKNNKSWMESEFRVYSSANNCTFEYVSQPFLMDLEGKQGNFKNLREFVFKNIDGYFKIYSKHTPINLVRDLPQGFSALEPLVDLPIGINITRFQTLLALHRSYLTPGDSSSGWTAGAAAYYVGYLQPRTFLLKYNENGTITDAVDCALDPLSETKCTLKSFTVEKGIYQTSNFRVQPTESIVRFPNITNLCPFGEVFNATRFASVYAWNRKRISNCVADYSVLYNSASFSTFKCYGVSPTKLNDLCFTNVYADSFVIRGDEVRQIAPGQTGKIADYNYKLPDDFTGCVIAWNSNNLDSKVGGNYNYLYRLFRKSNLKPFERDISTEIYQAGSTPCNGVEGFNCYFPLQSYGFQPTNGVGYQPYRVVVLSFELLHAPATVCGPKKSTNLVKNKCVNFNFNGLTGTGVLTESNKKFLPFQQFGRDIADTTDAVRDPQTLEILDITPCSFGGVSVITPGTNTSNQVAVLYQDVNCTEVPVAIHADQLTPTWRVYSTGSNVFQTRAGCLIGAEHVNNSYECDIPIGAGICASYQTQTNSPRRARSVASQSIIAYTMSLGAENSVAYSNNSIAIPTNFTISVTTEILPVSMTKTSVDCTMYICGDSTECSNLLLQYGSFCTQLNRALTGIAVEQDKNTQEVFAQVKQIYKTPPIKDFGGFNFSQILPDPSKPSKRSFIEDLLFNKVTLADAGFIKQYGDCLGDIAARDLICAQKFNGLTVLPPLLTDEMIAQYTSALLAGTITSGWTFGAGAALQIPFAMQMAYRFNGIGVTQNVLYENQKLIANQFNSAIGKIQDSLSSTASALGKLQDVVNQNAQALNTLVKQLSSNFGAISSVLNDILSRLDPPEAEVQIDRLITGRLQSLQTYVTQQLIRAAEIRASANLAATKMSECVLGQSKRVDFCGKGYHLMSFPQSAPHGVVFLHVTYVPAQEKNFTTAPAICHDGKAHFPREGVFVSNGTHWFVTQRNFYEPQIITTDNTFVSGNCDVVIGIVNNTVYDPLQPELDSFKEELDKYFKNHTSPDVDLGDISGINASVVNIQKEIDRLNEVAKNLNESLIDLQELGKYEQYIKWPWYIWLGFIAGLIAIVMVTIMLCCMTSCCSCLKGCCSCGSCCKFDEDDSEPVLKGVKLHYT

SEQ ID NO: 11 - protein, 1269 aa, Artificial Sequence
  SARS-CoV-2/bat/Yunnan/RaTG13/2013__EPI_ISL_402131 spike protein (1-1269)(K982P_V983P)
MFVFLVLLPLVSSQCVNLTTRTQLPPAYTNSSTRGVYYPDKVFRSSVLHLTQDLFLPFFSNVTWFHAIHVSGTNGIKRFDNPVLPFNDGVYFASTEKSNIIRGWIFGTTLDSKTQSLLIVNNATNVVIKVCEFQFCNDPFLGVYYHKNNKSWMESEFRVYSSANNCTFEYVSQPFLMDLEGKQGNFKNLREFVFKNIDGYFKIYSKHTPINLVRDLPPGFSALEPLVDLPIGINITRFQTLLALHRSYLTPGDSSSGWTAGAAAYYVGYLQPRTFLLKYNENGTITDAVDCALDPLSETKCTLKSFTVEKGIYQTSNFRVQPTDSIVRFPNITNLCPFGEVFNATTFASVYAWNRKRISNCVADYSVLYNSTSFSTFKCYGVSPTKLNDLCFTNVYADSFVITGDEVRQIAPGQTGKIADYNYKLPDDFTGCVIAWNSKHIDAKEGGNFNYLYRLFRKANLKPFERDISTEIYQAGSKPCNGQTGLNCYYPLYRYGFYPTDGVGHQPYRVVVLSFELLNAPATVCGPKKSTNLVKNKCVNFNFNGLTGTGVLTESNKKFLPFQQFGRDIADTTDAVRDPQTLEILDITPCSFGGVSVITPGTNASNQVAVLYQDVNCTEVPVAIHADQLTPTWRVYSTGSNVFQTRAGCLIGAEHVNNSYECDIPIGAGICASYQTQTNSRSVASQSIIAYTMSLGAENSVAYSNNSIAIPTNFTISVTTEILPVSMTKTSVDCTMYICGDSTECSNLLLQYGSFCTQLNRALTGIAVEQDKNTQEVFAQVKQIYKTPPIKDFGGFNFSQILPDPSKPSKRSFIEDLLFNKVTLADAGFIKQYGDCLGDIAARDLICAQKFNGLTVLPPLLTDEMIAQYTSALLAGTITSGWTFGAGAALQIPFAMQMAYRFNGIGVTQNVLYENQKLIANQFNSAIGKIQDSLSSTASALGKLQDVVNQNAQALNTLVKQLSSNFGAISSVLNDILSRLDPPEAEVQIDRLITGRLQSLQTYVTQQLIRAAEIRASANLAATKMSECVLGQSKRVDFCGKGYHLMSFPQSAPHGVVFLHVTYVPAQEKNFTTAPAICHDGKAHFPREGVFVSNGTHWFVTQRNFYEPQIITTDNTFVSGSCDVVIGIVNNTVYDPLQPELDSFKEELDKYFKNHTSPDVDLGDISGINASVVNIQKEIDRLNEVAKNLNESLIDLQELGKYEQYIKWPWYIWLGFIAGLIAIIMVTIMLCCMTSCCSCLKGCCSCGSCCKFDEDDSEPVLKGVKLHYT

SEQ ID NO: 12 - protein, 1273 aa, Artificial Sequence
  SARS-CoV-2/Wuhan/HBCDC-HB-01/2019__EPI_ISL_402132 spike protein (1-1273)(K986P_V987P)
MFVFLVLLPLVSSQCVNLTTRTQLPPAYTNSITRGVYYPDKVFRSSVLHSTQDLFLPFFSNVTWFHAIHVSGTNGTKRFDNPVLPFNDGVYFASTEKSNIIRGWIFGTTLDSKTQSLLIVNNATNVVIKVCEFQFCNDPFLGVYYHKNNKSWMESEFRVYSSANNCTFEYVSQPFLMDLEGKQGNFKNLREFVFKNIDGYFKIYSKHTPINLVRDLPQGFSALEPLVDLPIGINITRFQTLLALHRSYLTPGDSSSGWTAGAAAYYVGYLQPRTFLLKYNENGTITDAVDCALDPLSETKCTLKSFTVEKGIYQTSNFRVQPTESIVRFPNITNLCPFGEVFNATRFASVYAWNRKRISNCVADYSVLYNSASFSTFKCYGVSPTKLNDLCFTNVYADSFVIRGDEVRQIAPGQTGKIADYNYKLPDDFTGCVIAWNSNNLDSKVGGNYNYLYRLFRKSNLKPFERDISTEIYQAGSTPCNGVEGFNCYFPLQSYGFQPTNGVGYQPYRVVVLSFELLHAPATVCGPKKSTNLVKNKCVNFNFNGLTGTGVLTESNKKFLPFQQFGRDIADTTDAVRDPQTLEILDITPCSFGGVSVITPGTNTSNQVAVLYQDVNCTEVPVAIHADQLTPTWRVYSTGSNVFQTRAGCLIGAEHVNNSYECDIPIGAGICASYQTQTNSPRRARSVASQSIIAYTMSLGAENSVAYSNNSIAIPTNFTISVTTEILPVSMTKTSVDCTMYICGDSTECSNLLLQYGSFCTQLNRALTGIAVEQDKNTQEVFAQVKQIYKTPPIKDFGGFNFSQILPDPSKPSKRSFIEDLLFNKVTLADAGFIKQYGDCLGDIAARDLICAQKFNGLTVLPPLLTDEMIAQYTSALLAGTITSGWTFGAGAALQIPFAMQMAYRFNGIGVTQNVLYENQKLIANQFNSAIGKIQDSLSSTASALGKLQDVVNQNAQALNTLVKQLSSNFGAISSVLNDILSRLDPPEAEVQIDRLITGRLQSLQTYVTQQLIRAAEIRASANLAATKMSECVLGQSKRVDFCGKGYHLMSFPQSAPHGVVFLHVTYVPAQEKNFTTAPAICHDGKAHFPREGVFVSNGTHWFVTQRNFYEPQIITTDNTFVSGNCDVVIGIVNNTVYDPLQPELDSFKEELDKYFKNHTSPDVDLGDISGINASVVNIQKEIDRLNEVAKNLNESLIDLQELGKYEQYIKWPWYIWLGFIAGLIAIVMVTIMLCCMTSCCSCLKGCCSCGSCCKFDEDDSEPVLKGVKLHYT

SEQ ID NO: 13 - protein, 1273 aa, Artificial Sequence
  SARS-CoV-2/Guangdong/20SF028/2020__EPI_ISL_403936 spike protein (1-1273)(K986P_V987P)
MFVFLVLLPLVSSQCVNLTTRTQLPPAYTNSFTRGVYYPDKVFRSSVLYSTQDLFLPFFSNVTWFHAIHVSGTNGTKRFDNPVLPFNDGVYFASTEKSNIIRGWIFGTTLDSKTQSLLIVNNATNVVIKVCEFQFCNDPFLGVYYHKNNKSWMESEFRVYSSANNCTFEYVSQPFLMDLEGKQGNFKNLREFVFKNIDGYFKIYSKHTPINLVRDLPQGFSALEPLVDLPIGINITRFQTLLALHRSYLTPGDSSSGWTAGAAAYYVGYLQPRTFLLKYNENGTITDAVDCALDPLSETKCTLKSFTVEKGIYQTSNFRVQPTESIVRFPNITNLCPFGEVFNATRFASVYAWNRKRISNCVADYSVLYNSASFSTFKCYGVSPTKLNDLCFTNVYADSFVIRGDEVRQIAPGQTGKIADYNYKLPDDFTGCVIAWNSNNLDSKVGGNYNYLYRLFRKSNLKPFERDISTEIYQAGSTPCNGVEGFNCYFPLQSYGFQPTNGVGYQPYRVVVLSFELLHAPATVCGPKKSTNLVKNKCVNFNFNGLTGTGVLTESNKKFLPFQQFGRDIADTTDAVRDPQTLEILDITPCSFGGVSVITPGTNTSNQVAVLYQDVNCTEVPVAIHADQLTPTWRVYSTGSNVFQTRAGCLIGAEHVNNSYECDIPIGAGICASYQTQTNSPRRARSVASQSIIAYTMSLGAENSVAYSNNSIAIPTNFTISVTTEILPVSMTKTSVDCTMYICGDSTECSNLLLQYGSFCTQLNRALTGIAVEQDKNTQEVFAQVKQIYKTPPIKDFGGFNFSQILPDPSKPSKRSFIEDLLFNKVTLADAGFIKQYGDCLGDIAARDLICAQKFNGLTVLPPLLTDEMIAQYTSALLAGTITSGWTFGAGAALQIPFAMQMAYRFNGIGVTQNVLYENQKLIANQFNSAIGKIQDSLSSTASALGKLQDVVNQNAQALNTLVKQLSSNFGAISSVLNDILSRLDPPEAEVQIDRLITGRLQSLQTYVTQQLIRAAEIRASANLAATKMSECVLGQSKRVDFCGKGYHLMSFPQSAPHGVVFLHVTYVPAQEKNFTTAPAICHDGKAHFPREGVFVSNGTHWFVTQRNFYEPQIITTDNTFVSGNCDVVIGIVNNTVYDPLQPELDSFKEELDKYFKNHTSPDVDLGDISGINASVVNIQKEIDRLNEVAKNLNESLIDLQELGKYEQYIKWPWYIWLGFIAGLIAIVMVTIMLCCMTSCCSCLKGCCSCGSCCKFDEDDSEPVLKGVKLHYT

SEQ ID NO: 14 - protein, 1273 aa, Artificial Sequence
  SARS-CoV-2/Shenzhen/SZTH-001/2020__EPI_ISL_406592 spike protein (1-1273)(K986P_V987P)
MFVFLVLLPLVSSQCVNLTTRTQLPPAYTNSFTRGVYYPDKVFRSSVLHSTQDLFLPFFSNVTWFHAIHVSGTNGTKRFDNPVLPFNDGVYFASTEKSNIIRGWIFGTTLDSKTQSLLIVNNATNVVIKVCEFQFCNDPFLGVYYHKNNKSWMESEFRVYSSANNCTFEYVSQPFLMDLEGKQGNFKNLREFVFKNIDGYFKIYSKHTPINLVRDLPQGFSALEPLVDLPIGINITRFQTLLALHRSYLTPGDSSSGWTAGAAAYYVGYLQPRTFLLKYNENGTITDAVDCALDPLSETKCTLKSFTVEKGIYQTSNFRVQPTESIVRFPNITNLCPFGEVFNATRFASVYAWNRKRISNCVADYSVLYNSASFSTFKCYGVSPTKLNDLCFTNVYADSFVIRGDEVRQIAPGQTGKIADYNYKLPDDFTGCVIAWNSNNLDSKVGGNYNYLYRLFRKSNLKPFERDISTEIYQAGSTPCNGVEGFNCYFPLQSYGFQPTNGVGYQPYRVVVLSFELLHAPATVCGPKKSTNLVKNKCVNFNFNGLTGTGVLTESNKKFLPFQQFGRDIADTTDAVRDPQTLEILDITPCSFGGVSVITPGTNTSNQVAVLYQDVNCTEVPVAIHADQLTPTWRVYSTGSNVFQTRAGCLIGAEHVNNSYECDIPIGAGICASYQTQTNSPRRARSVASQSIIAYTMSLGAENSVAYSNNSIAIPTNFTISVTTEILPVSMTKTSVDCTMYICGDSTECSNLLLQYGSFCTQLNRALTGIAVEQDKNTQEVFAQVKQIYKTPPIKDFGGFNFSQILPDPSKPSKRSFIEDLLFNKVTLADAGFIKQYGDCLGDIAARDLICAQKFNGLTVLPPLLTDEMIAQYTSALLAGTITSGWTFGAGAALQIPFAMQMAYRFNGIGVTQNVLYENQKLIANQFNSAIGKIQDSLSSTASALGKLQDVVNQNAQALNTLVKQLSSNFGAISSVLNDILSRLDPPEAEVQIDRLITGRLQSLQTYVTQQLIRAAEIRASANLAATKMSECVLGQSKRVDFCGKGYHLMSFPQSAPHGVVFLHVTYVPAQEKNFTTAPAICHDGKAHFPREGVFVSNGTHWFVTQRNFYEPQIITTDNTFVSGNCDVLIGIVNNTVYDPLQPELDSFKEELDKYFKNHTSPDVDLGDISGINASVVNIQKEIDRLNEVAKNLNESLIDLQELGKYEQYIKWPWYIWLGFIAGLIAIVMVTIMLCCMTSCCSCLKGCCSCGSCCKFDEDDSGPVLKGVKLHYT

SEQ ID NO: 15 - protein, 1273 aa, Artificial Sequence
  SARS-CoV-2/Shenzhen/SZTH-004/2020__EPI_ISL_406595 spike protein (1-1273)(K986P_V987P)
MFVFLVLLPLVSSQCVNLTTRTQLPPAYTNSFTRGVYYPDKVFRSSVLHSTQDLFLPFFSNVTWFHAIHVSGTNGTKRFDNPVLPFNDGVYFASTEKSNIIRGWIFGTTLDSKTQSLLIVNNATNVVIKVCEFQFCNDPFLGVYYHKNNKSWMESEFRVYSSANNCTFEYVSQPFLMDLEGKQGNFKNLREFVFKNIDGYFKIYSKHTPINLVRDLPQGFSALEPLVDLPIGINITRFQTLLALHRSYLTPGDSSSGWTAGAAAYYVGYLQPRTFLLKYNENGTITDAVDCALDPLSETKCTLKSFTVEKGIYQTSNFRVQPTESIVRFPNITNLCPFGEVFNATRFASVYAWDRKRISNCVAYYSVLYNSASFSTFKCYGVSPTKLNDLCFTNVYADSFVIRGDEVRQIAPGQTGKIADYNYKLPDDFTGCVIAWNSNNLDSKVGGNYNYLYRLFRKSNLKPFERDISTEIYQAGSTPCNGVEGFNCYFPLQSYGFQPTNGVGYQPYRVVVLSFELLHAPATVCGPKKSTNLVKNKCVNFNFNGLTGTGVLTESNKKFLPFQQFGRDIADTTDAVRDPQTLEILDITPCSFGGVSVITPGTNTSNQVAVLYQDVNCTEVPVAIHADQLTPTWRVYSTGSNVFQTRAGCLIGAEHVNNSYECDIPIGAGICASYQTQTNSPRRARSVASQSIIAYTMSLGAENSVAYSNNSIAIPTNFTISVTTEILPVSMTKTSVDCTMYICGDSTECSNLLLQYGSFCTQLNRALTGIAVEQDKNTQEVFAQVKQIYKTPPIKDFGGFNFSQILPDPSKPSKRSFIEDLLFNKVTLADAGFIKQYGDCLGDIAARDLICAQKFNGLTVLPPLLTDEMIAQYTSALLAGTITSGWTFGAGAALQIPFAMQMAYRFNGIGVTQNVLYENQKLIANQFNSAIGKIQDSLSSTASALGKLQDVVNQNAQALNTLVKQLSSNFGAISSVLNDILSRLDPPEAEVQIDRLITGRLQSLQTYVTQQLIRAAEIRASANLAATKMSECVLGQSKRVDFCGKGYHLMSFPQSAPHGVVFLHVTYVPAQEKNFTTAPAICHDGKAHFPREGVFVSNGTHWFVTQRNFYEPQIITTDNTFVSGNCDVVIGIVNNTVYDPLQPELDSFKEELDKYFKNHTSPDVDLGDISGINASVVNIQKEIDRLNEVAKNLNESLIDLQELGKYEQYIKWPWYIWLGFIAGLIAIVMVTIMLCCMTSCCSCLKGCCSCGSCCKFDEDDSEPVLKGVKLHYT

SEQ ID NO: 16 - protein, 1273 aa, Artificial Sequence
  SARS-CoV-2/France/IDF0372/2020__EPI_ISL_406596 spike protein (1-1273)(K986P_V987P)
MFVFLVLLPLVSSQCVNLTTRTQLPPAYTNSFTRGVYYPDKVFRSSVLHSTQDLFLPFFSNVTWFHAIHVSGTNGTKRFDNPVLPFNDGVYFASTEKSNIIRGWIFGTTLDSKTQSLLIVNNATNVVIKVCEFQFCNDPFLGVYYHKNNKSWMESEFRVYSSANNCTFEYVSQPFLMDLEGKQGNFKNLREFVFKNIDGYFKIYSKHTPINLVRDLPQGFSALEPLVDLPIGINITRFQTLLALHRSYLTPGDSSSGWTAGAAAYYVGYLQPRTFLLKYNENGTITDAVDCALDPLSETKCTLKSFTVEKGIYQTSNFRVQPTESIVRFPNITNLCPFGEVFNATRFASVYAWNRKRISNCVADYSFLYNSASFSTFKCYGVSPTKLNDLCFTNVYADSFVIRGDEVRQIAPGQTGKIADYNYKLPDDFTGCVIAWNSNNLDSKVGGNYNYLYRLFRKSNLKPFERDISTEIYQAGSTPCNGVEGFNCYFPLQSYGFQPTNGVGYQPYRVVVLSFELLHAPATVCGPKKSTNLVKNKCVNFNFNGLTGTGVLTESNKKFLPFQQFGRDIADTTDAVRDPQTLEILDITPCSFGGVSVITPGTNTSNQVAVLYQDVNCTEVPVAIHADQLTPTWRVYSTGSNVFQTRAGCLIGAEHVNNSYECDIPIGAGICASYQTQTNSPRRARSVASQSIIAYTMSLGAENSVAYSNNSIAIPTNFTISVTTEILPVSMTKTSVDCTMYICGDSTECSNLLLQYGSFCTQLNRALTGIAVEQDKNTQEVFAQVKQIYKTPPIKDFGGFNFSQILPDPSKPSKRSFIEDLLFNKVTLADAGFIKQYGDCLGDIAARDLICAQKFNGLTVLPPLLTDEMIAQYTSALLAGTITSGWTFGAGAALQIPFAMQMAYRFNGIGVTQNVLYENQKLIANQFNSAIGKIQDSLSSTASALGKLQDVVNQNAQALNTLVKQLSSNFGAISSVLNDILSRLDPPEAEVQIDRLITGRLQSLQTYVTQQLIRAAEIRASANLAATKMSECVLGQSKRVDFCGKGYHLMSFPQSAPHGVVFLHVTYVPAQEKNFTTAPAICHDGKAHFPREGVFVSNGTHWFVTQRNFYEPQIITTDNTFVSGNCDVVIGIVNNTVYDPLQPELDSFKEELDKYFKNHTSPDVDLGDISGINASVVNIQKEIDRLNEVAKNLNESLIDLQELGKYEQYIKWPWYIWLGFIAGLIAIVMVTIMLCCMTSCCSCLKGCCSCGSCCKFDEDDSEPVLKGVKLHYT

SEQ ID NO: 17 - protein, 1273 aa, Artificial Sequence
  SARS-CoV-2/Australia/VIC01/2020__EPI_ISL_406844 spike protein (1-1273)(K986P_V987P)
MFVFLVLLPLVSSQCVNLTTRTQLPPAYTNSFTRGVYYPDKVFRSSVLHSTQDLFLPFFSNVTWFHAIHVSGTNGTKRFDNPVLPFNDGVYFASTEKSNIIRGWIFGTTLDSKTQSLLIVNNATNVVIKVCEFQFCNDPFLGVYYHKNNKSWMESEFRVYSSANNCTFEYVSQPFLMDLEGKQGNFKNLREFVFKNIDGYFKIYSKHTPINLVRDLPQGFSALEPLVDLPIGINITRFQTLLALHRRYLTPGDSSSGWTAGAAAYYVGYLQPRTFLLKYNENGTITDAVDCALDPLSETKCTLKSFTVEKGIYQTSNFRVQPTESIVRFPNITNLCPFGEVFNATRFASVYAWNRKRISNCVADYSVLYNSASFSTFKCYGVSPTKLNDLCFTNVYADSFVIRGDEVRQIAPGQTGKIADYNYKLPDDFTGCVIAWNSNNLDSKVGGNYNYLYRLFRKSNLKPFERDISTEIYQAGSTPCNGVEGFNCYFPLQSYGFQPTNGVGYQPYRVVVLSFELLHAPATVCGPKKSTNLVKNKCVNFNFNGLTGTGVLTESNKKFLPFQQFGRDIADTTDAVRDPQTLEILDITPCSFGGVSVITPGTNTSNQVAVLYQDVNCTEVPVAIHADQLTPTWRVYSTGSNVFQTRAGCLIGAEHVNNSYECDIPIGAGICASYQTQTNSPRRARSVASQSIIAYTMSLGAENSVAYSNNSIAIPTNFTISVTTEILPVSMTKTSVDCTMYICGDSTECSNLLLQYGSFCTQLNRALTGIAVEQDKNTQEVFAQVKQIYKTPPIKDFGGFNFSQILPDPSKPSKRSFIEDLLFNKVTLADAGFIKQYGDCLGDIAARDLICAQKFNGLTVLPPLLTDEMIAQYTSALLAGTITSGWTFGAGAALQIPFAMQMAYRFNGIGVTQNVLYENQKLIANQFNSAIGKIQDSLSSTASALGKLQDVVNQNAQALNTLVKQLSSNFGAISSVLNDILSRLDPPEAEVQIDRLITGRLQSLQTYVTQQLIRAAEIRASANLAATKMSECVLGQSKRVDFCGKGYHLMSFPQSAPHGVVFLHVTYVPAQEKNFTTAPAICHDGKAHFPREGVFVSNGTHWFVTQRNFYEPQIITTDNTFVSGNCDVVIGIVNNTVYDPLQPELDSFKEELDKYFKNHTSPDVDLGDISGINASVVNIQKEIDRLNEVAKNLNESLIDLQELGKYEQYIKWPWYIWLGFIAGLIAIVMVTIMLCCMTSCCSCLKGCCSCGSCCKFDEDDSEPVLKGVKLHYT

SEQ ID NO: 18 - protein, 1273 aa, Artificial Sequence
  SARS-CoV-2/Germany/BavPat1/2020__EPI_ISL_406862 spike protein (1-1273)(K986P_V987P)
MFVFLVLLPLVSSQCVNLTTRTQLPPAYTNSFTRGVYYPDKVFRSSVLHSTQDLFLPFFSNVTWFHAIHVSGTNGTKRFDNPVLPFNDGVYFASTEKSNIIRGWIFGTTLDSKTQSLLIVNNATNVVIKVCEFQFCNDPFLGVYYHKNNKSWMESEFRVYSSANNCTFEYVSQPFLMDLEGKQGNFKNLREFVFKNIDGYFKIYSKHTPINLVRDLPQGFSALEPLVDLPIGINITRFQTLLALHRSYLTPGDSSSGWTAGAAAYYVGYLQPRTFLLKYNENGTITDAVDCALDPLSETKCTLKSFTVEKGIYQTSNFRVQPTESIVRFPNITNLCPFGEVFNATRFASVYAWNRKRISNCVADYSVLYNSASFSTFKCYGVSPTKLNDLCFTNVYADSFVIRGDEVRQIAPGQTGKIADYNYKLPDDFTGCVIAWNSNNLDSKVGGNYNYLYRLFRKSNLKPFERDISTEIYQAGSTPCNGVEGFNCYFPLQSYGFQPTNGVGYQPYRVVVLSFELLHAPATVCGPKKSTNLVKNKCVNFNFNGLTGTGVLTESNKKFLPFQQFGRDIADTTDAVRDPQTLEILDITPCSFGGVSVITPGTNTSNQVAVLYQGVNCTEVPVAIHADQLTPTWRVYSTGSNVFQTRAGCLIGAEHVNNSYECDIPIGAGICASYQTQTNSPRRARSVASQSIIAYTMSLGAENSVAYSNNSIAIPTNFTISVTTEILPVSMTKTSVDCTMYICGDSTECSNLLLQYGSFCTQLNRALTGIAVEQDKNTQEVFAQVKQIYKTPPIKDFGGFNFSQILPDPSKPSKRSFIEDLLFNKVTLADAGFIKQYGDCLGDIAARDLICAQKFNGLTVLPPLLTDEMIAQYTSALLAGTITSGWTFGAGAALQIPFAMQMAYRFNGIGVTQNVLYENQKLIANQFNSAIGKIQDSLSSTASALGKLQDVVNQNAQALNTLVKQLSSNFGAISSVLNDILSRLDPPEAEVQIDRLITGRLQSLQTYVTQQLIRAAEIRASANLAATKMSECVLGQSKRVDFCGKGYHLMSFPQSAPHGVVFLHVTYVPAQEKNFTTAPAICHDGKAHFPREGVFVSNGTHWFVTQRNFYEPQIITTDNTFVSGNCDVVIGIVNNTVYDPLQPELDSFKEELDKYFKNHTSPDVDLGDISGINASVVNIQKEIDRLNEVAKNLNESLIDLQELGKYEQYIKWPWYIWLGFIAGLIAIVMVTIMLCCMTSCCSCLKGCCSCGSCCKFDEDDSEPVLKGVKLHYT

SEQ ID NO: 19 - protein, 1273 aa, Artificial Sequence
  SARS-CoV-2/Wuhan/WIV05/2019__EPI_ISL_402128 spike protein (1-1273)(I712C_T1077C)
MFVFLVLLPLVSSQCVNLTTRTQLPPAYTNSFTRGVYYPDKVFRSSVLHSTQDLFLPFFSNVTWFHAIHVSGTNGTKRFDNPVLPFNDGVYFASTEKSNIIRGWIFGTTLDSKTQSLLIVNNATNVVIKVCEFQFCNDPFLGVYYHKNNKSWMESEFRVYSSANNCTFEYVSQPFLMDLEGKQGNFKNLREFVFKNIDGYFKIYSKHTPINLVRDLPQGFSALEPLVDLPIGINITRFQTLLALHRSYLTPGDSSSGWTAGAAAYYVGYLQPRTFLLKYNENGTITDAVDCALDPLSETKCTLKSFTVEKGIYQTSNFRVQPTESIVRFPNITNLCPFGEVFNATRFASVYAWNRKRISNCVADYSVLYNSASFSTFKCYGVSPTKLNDLCFTNVYADSFVIRGDEVRQIAPGQTGKIADYNYKLPDDFTGCVIAWNSNNLDSKVGGNYNYLYRLFRKSNLKPFERDISTEIYQAGSTPCNGVEGFNCYFPLQSYGFQPTNGVGYQPYRVVVLSFELLHAPATVCGPKKSTNLVKNKCVNFNFNGLTGTGVLTESNKKFLPFQQFGRDIADTTDAVRDPQTLEILDITPCSFGGVSVITPGTNTSNQVAVLYQDVNCTEVPVAIHADQLTPTWRVYSTGSNVFQTRAGCLIGAEHVNNSYECDIPIGAGICASYQTQTNSPRRARSVASQSIIAYTMSLGAENSVAYSNNSCAIPTNFTISVTTEILPVSMTKTSVDCTMYICGDSTECSNLLLQYGSFCTQLNRALTGIAVEQDKNTQEVFAQVKQIYKTPPIKDFGGFNFSQILPDPSKPSKRSFIEDLLFNKVTLADAGFIKQYGDCLGDIAARDLICAQKFNGLTVLPPLLTDEMIAQYTSALLAGTITSGWTFGAGAALQIPFAMQMAYRFNGIGVTQNVLYENQKLIANQFNSAIGKIQDSLSSTASALGKLQDVVNQNAQALNTLVKQLSSNFGAISSVLNDILSRLDKVEAEVQIDRLITGRLQSLQTYVTQQLIRAAEIRASANLAATKMSECVLGQSKRVDFCGKGYHLMSFPQSAPHGVVFLHVTYVPAQEKNFTCAPAICHDGKAHFPREGVFVSNGTHWFVTQRNFYEPQIITTDNTFVSGNCDVVIGIVNNTVYDPLQPELDSFKEELDKYFKNHTSPDVDLGDISGINASVVNIQKEIDRLNEVAKNLNESLIDLQELGKYEQYIKWPWYIWLGFIAGLIAIVMVTIMLCCMTSCCSCLKGCCSCGSCCKFDEDDSEPVLKGVKLHYT

SEQ ID NO: 20 - protein, 1273 aa, Artificial Sequence
  SARS-CoV-2/Wuhan/WIV05/2019__EPI_ISL_402128 spike protein (1-1273)(I714C_Y1110C)
MFVFLVLLPLVSSQCVNLTTRTQLPPAYTNSFTRGVYYPDKVFRSSVLHSTQDLFLPFFSNVTWFHAIHVSGTNGTKRFDNPVLPFNDGVYFASTEKSNIIRGWIFGTTLDSKTQSLLIVNNATNVVIKVCEFQFCNDPFLGVYYHKNNKSWMESEFRVYSSANNCTFEYVSQPFLMDLEGKQGNFKNLREFVFKNIDGYFKIYSKHTPINLVRDLPQGFSALEPLVDLPIGINITRFQTLLALHRSYLTPGDSSSGWTAGAAAYYVGYLQPRTFLLKYNENGTITDAVDCALDPLSETKCTLKSFTVEKGIYQTSNFRVQPTESIVRFPNITNLCPFGEVFNATRFASVYAWNRKRISNCVADYSVLYNSASFSTFKCYGVSPTKLNDLCFTNVYADSFVIRGDEVRQIAPGQTGKIADYNYKLPDDFTGCVIAWNSNNLDSKVGGNYNYLYRLFRKSNLKPFERDISTEIYQAGSTPCNGVEGFNCYFPLQSYGFQPTNGVGYQPYRVVVLSFELLHAPATVCGPKKSTNLVKNKCVNFNFNGLTGTGVLTESNKKFLPFQQFGRDIADTTDAVRDPQTLEILDITPCSFGGVSVITPGTNTSNQVAVLYQDVNCTEVPVAIHADQLTPTWRVYSTGSNVFQTRAGCLIGAEHVNNSYECDIPIGAGICASYQTQTNSPRRARSVASQSIIAYTMSLGAENSVAYSNNSIACPTNFTISVTTEILPVSMTKTSVDCTMYICGDSTECSNLLLQYGSFCTQLNRALTGIAVEQDKNTQEVFAQVKQIYKTPPIKDFGGFNFSQILPDPSKPSKRSFIEDLLFNKVTLADAGFIKQYGDCLGDIAARDLICAQKFNGLTVLPPLLTDEMIAQYTSALLAGTITSGWTFGAGAALQIPFAMQMAYRFNGIGVTQNVLYENQKLIANQFNSAIGKIQDSLSSTASALGKLQDVVNQNAQALNTLVKQLSSNFGAISSVLNDILSRLDKVEAEVQIDRLITGRLQSLQTYVTQQLIRAAEIRASANLAATKMSECVLGQSKRVDFCGKGYHLMSFPQSAPHGVVFLHVTYVPAQEKNFTTAPAICHDGKAHFPREGVFVSNGTHWFVTQRNFCEPQIITTDNTFVSGNCDVVIGIVNNTVYDPLQPELDSFKEELDKYFKNHTSPDVDLGDISGINASVVNIQKEIDRLNEVAKNLNESLIDLQELGKYEQYIKWPWYIWLGFIAGLIAIVMVTIMLCCMTSCCSCLKGCCSCGSCCKFDEDDSEPVLKGVKLHYT

SEQ ID NO: 21 - protein, 1273 aa, Artificial Sequence
  SARS-CoV-2/Wuhan/WIV05/2019__EPI_ISL_402128 spike protein (1-1273)(P715C_P1069C)
MFVFLVLLPLVSSQCVNLTTRTQLPPAYTNSFTRGVYYPDKVFRSSVLHSTQDLFLPFFSNVTWFHAIHVSGTNGTKRFDNPVLPFNDGVYFASTEKSNIIRGWIFGTTLDSKTQSLLIVNNATNVVIKVCEFQFCNDPFLGVYYHKNNKSWMESEFRVYSSANNCTFEYVSQPFLMDLEGKQGNFKNLREFVFKNIDGYFKIYSKHTPINLVRDLPQGFSALEPLVDLPIGINITRFQTLLALHRSYLTPGDSSSGWTAGAAAYYVGYLQPRTFLLKYNENGTITDAVDCALDPLSETKCTLKSFTVEKGIYQTSNFRVQPTESIVRFPNITNLCPFGEVFNATRFASVYAWNRKRISNCVADYSVLYNSASFSTFKCYGVSPTKLNDLCFTNVYADSFVIRGDEVRQIAPGQTGKIADYNYKLPDDFTGCVIAWNSNNLDSKVGGNYNYLYRLFRKSNLKPFERDISTEIYQAGSTPCNGVEGFNCYFPLQSYGFQPTNGVGYQPYRVVVLSFELLHAPATVCGPKKSTNLVKNKCVNFNFNGLTGTGVLTESNKKFLPFQQFGRDIADTTDAVRDPQTLEILDITPCSFGGVSVITPGTNTSNQVAVLYQDVNCTEVPVAIHADQLTPTWRVYSTGSNVFQTRAGCLIGAEHVNNSYECDIPIGAGICASYQTQTNSPRRARSVASQSIIAYTMSLGAENSVAYSNNSIAICTNFTISVTTEILPVSMTKTSVDCTMYICGDSTECSNLLLQYGSFCTQLNRALTGIAVEQDKNTQEVFAQVKQIYKTPPIKDFGGFNFSQILPDPSKPSKRSFIEDLLFNKVTLADAGFIKQYGDCLGDIAARDLICAQKFNGLTVLPPLLTDEMIAQYTSALLAGTITSGWTFGAGAALQIPFAMQMAYRFNGIGVTQNVLYENQKLIANQFNSAIGKIQDSLSSTASALGKLQDVVNQNAQALNTLVKQLSSNFGAISSVLNDILSRLDKVEAEVQIDRLITGRLQSLQTYVTQQLIRAAEIRASANLAATKMSECVLGQSKRVDFCGKGYHLMSFPQSAPHGVVFLHVTYVCAQEKNFTTAPAICHDGKAHFPREGVFVSNGTHWFVTQRNFYEPQIITTDNTFVSGNCDVVIGIVNNTVYDPLQPELDSFKEELDKYFKNHTSPDVDLGDISGINASVVNIQKEIDRLNEVAKNLNESLIDLQELGKYEQYIKWPWYIWLGFIAGLIAIVMVTIMLCCMTSCCSCLKGCCSCGSCCKFDEDDSEPVLKGVKLHYT

SEQ ID NO: 22 - protein, 1273 aa, Artificial Sequence
  SARS-CoV-2/Wuhan/WIV05/2019__EPI_ISL_402128 spike protein (1-1273)(G889C_L1034C)
MFVFLVLLPLVSSQCVNLTTRTQLPPAYTNSFTRGVYYPDKVFRSSVLHSTQDLFLPFFSNVTWFHAIHVSGTNGTKRFDNPVLPFNDGVYFASTEKSNIIRGWIFGTTLDSKTQSLLIVNNATNVVIKVCEFQFCNDPFLGVYYHKNNKSWMESEFRVYSSANNCTFEYVSQPFLMDLEGKQGNFKNLREFVFKNIDGYFKIYSKHTPINLVRDLPQGFSALEPLVDLPIGINITRFQTLLALHRSYLTPGDSSSGWTAGAAAYYVGYLQPRTFLLKYNENGTITDAVDCALDPLSETKCTLKSFTVEKGIYQTSNFRVQPTESIVRFPNITNLCPFGEVFNATRFASVYAWNRKRISNCVADYSVLYNSASFSTFKCYGVSPTKLNDLCFTNVYADSFVIRGDEVRQIAPGQTGKIADYNYKLPDDFTGCVIAWNSNNLDSKVGGNYNYLYRLFRKSNLKPFERDISTEIYQAGSTPCNGVEGFNCYFPLQSYGFQPTNGVGYQPYRVVVLSFELLHAPATVCGPKKSTNLVKNKCVNFNFNGLTGTGVLTESNKKFLPFQQFGRDIADTTDAVRDPQTLEILDITPCSFGGVSVITPGTNTSNQVAVLYQDVNCTEVPVAIHADQLTPTWRVYSTGSNVFQTRAGCLIGAEHVNNSYECDIPIGAGICASYQTQTNSPRRARSVASQSIIAYTMSLGAENSVAYSNNSIAIPTNFTISVTTEILPVSMTKTSVDCTMYICGDSTECSNLLLQYGSFCTQLNRALTGIAVEQDKNTQEVFAQVKQIYKTPPIKDFGGFNFSQILPDPSKPSKRSFIEDLLFNKVTLADAGFIKQYGDCLGDIAARDLICAQKFNGLTVLPPLLTDEMIAQYTSALLAGTITSGWTFCAGAALQIPFAMQMAYRFNGIGVTQNVLYENQKLIANQFNSAIGKIQDSLSSTASALGKLQDVVNQNAQALNTLVKQLSSNFGAISSVLNDILSRLDKVEAEVQIDRLITGRLQSLQTYVTQQLIRAAEIRASANLAATKMSECVCGQSKRVDFCGKGYHLMSFPQSAPHGVVFLHVTYVPAQEKNFTTAPAICHDGKAHFPREGVFVSNGTHWFVTQRNFYEPQIITTDNTFVSGNCDVVIGIVNNTVYDPLQPELDSFKEELDKYFKNHTSPDVDLGDISGINASVVNIQKEIDRLNEVAKNLNESLIDLQELGKYEQYIKWPWYIWLGFIAGLIAIVMVTIMLCCMTSCCSCLKGCCSCGSCCKFDEDDSEPVLKGVKLHYT

SEQ ID NO: 23 - protein, 1273 aa, Artificial Sequence
  SARS-CoV-2/Wuhan/WIV05/2019__EPI_ISL_402128 spike protein (1-1273)(I909C_Y1047C)
MFVFLVLLPLVSSQCVNLTTRTQLPPAYTNSFTRGVYYPDKVFRSSVLHSTQDLFLPFFSNVTWFHAIHVSGTNGTKRFDNPVLPFNDGVYFASTEKSNIIRGWIFGTTLDSKTQSLLIVNNATNVVIKVCEFQFCNDPFLGVYYHKNNKSWMESEFRVYSSANNCTFEYVSQPFLMDLEGKQGNFKNLREFVFKNIDGYFKIYSKHTPINLVRDLPQGFSALEPLVDLPIGINITRFQTLLALHRSYLTPGDSSSGWTAGAAAYYVGYLQPRTFLLKYNENGTITDAVDCALDPLSETKCTLKSFTVEKGIYQTSNFRVQPTESIVRFPNITNLCPFGEVFNATRFASVYAWNRKRISNCVADYSVLYNSASFSTFKCYGVSPTKLNDLCFTNVYADSFVIRGDEVRQIAPGQTGKIADYNYKLPDDFTGCVIAWNSNNLDSKVGGNYNYLYRLFRKSNLKPFERDISTEIYQAGSTPCNGVEGFNCYFPLQSYGFQPTNGVGYQPYRVVVLSFELLHAPATVCGPKKSTNLVKNKCVNFNFNGLTGTGVLTESNKKFLPFQQFGRDIADTTDAVRDPQTLEILDITPCSFGGVSVITPGTNTSNQVAVLYQDVNCTEVPVAIHADQLTPTWRVYSTGSNVFQTRAGCLIGAEHVNNSYECDIPIGAGICASYQTQTNSPRRARSVASQSIIAYTMSLGAENSVAYSNNSIAIPTNFTISVTTEILPVSMTKTSVDCTMYICGDSTECSNLLLQYGSFCTQLNRALTGIAVEQDKNTQEVFAQVKQIYKTPPIKDFGGFNFSQILPDPSKPSKRSFIEDLLFNKVTLADAGFIKQYGDCLGDIAARDLICAQKFNGLTVLPPLLTDEMIAQYTSALLAGTITSGWTFGAGAALQIPFAMQMAYRFNGCGVTQNVLYENQKLIANQFNSAIGKIQDSLSSTASALGKLQDVVNQNAQALNTLVKQLSSNFGAISSVLNDILSRLDKVEAEVQIDRLITGRLQSLQTYVTQQLIRAAEIRASANLAATKMSECVLGQSKRVDFCGKGCHLMSFPQSAPHGVVFLHVTYVPAQEKNFTTAPAICHDGKAHFPREGVFVSNGTHWFVTQRNFYEPQIITTDNTFVSGNCDVVIGIVNNTVYDPLQPELDSFKEELDKYFKNHTSPDVDLGDISGINASVVNIQKEIDRLNEVAKNLNESLIDLQELGKYEQYIKWPWYIWLGFIAGLIAIVMVTIMLCCMTSCCSCLKGCCSCGSCCKFDEDDSEPVLKGVKLHYT

SEQ ID NO: 24 - protein, 1273 aa, Artificial Sequence
  SARS-CoV-2/Wuhan/WIV05/2019__EPI_ISL_402128 spike protein (1-1273)(Q965C_S1003C)
MFVFLVLLPLVSSQCVNLTTRTQLPPAYTNSFTRGVYYPDKVFRSSVLHSTQDLFLPFFSNVTWFHAIHVSGTNGTKRFDNPVLPFNDGVYFASTEKSNIIRGWIFGTTLDSKTQSLLIVNNATNVVIKVCEFQFCNDPFLGVYYHKNNKSWMESEFRVYSSANNCTFEYVSQPFLMDLEGKQGNFKNLREFVFKNIDGYFKIYSKHTPINLVRDLPQGFSALEPLVDLPIGINITRFQTLLALHRSYLTPGDSSSGWTAGAAAYYVGYLQPRTFLLKYNENGTITDAVDCALDPLSETKCTLKSFTVEKGIYQTSNFRVQPTESIVRFPNITNLCPFGEVFNATRFASVYAWNRKRISNCVADYSVLYNSASFSTFKCYGVSPTKLNDLCFTNVYADSFVIRGDEVRQIAPGQTGKIADYNYKLPDDFTGCVIAWNSNNLDSKVGGNYNYLYRLFRKSNLKPFERDISTEIYQAGSTPCNGVEGFNCYFPLQSYGFQPTNGVGYQPYRVVVLSFELLHAPATVCGPKKSTNLVKNKCVNFNFNGLTGTGVLTESNKKFLPFQQFGRDIADTTDAVRDPQTLEILDITPCSFGGVSVITPGTNTSNQVAVLYQDVNCTEVPVAIHADQLTPTWRVYSTGSNVFQTRAGCLIGAEHVNNSYECDIPIGAGICASYQTQTNSPRRARSVASQSIIAYTMSLGAENSVAYSNNSIAIPTNFTISVTTEILPVSMTKTSVDCTMYICGDSTECSNLLLQYGSFCTQLNRALTGIAVEQDKNTQEVFAQVKQIYKTPPIKDFGGFNFSQILPDPSKPSKRSFIEDLLFNKVTLADAGFIKQYGDCLGDIAARDLICAQKFNGLTVLPPLLTDEMIAQYTSALLAGTITSGWTFGAGAALQIPFAMQMAYRFNGIGVTQNVLYENQKLIANQFNSAIGKIQDSLSSTASALGKLQDVVNQNAQALNTLVKCLSSNFGAISSVLNDILSRLDKVEAEVQIDRLITGRLQCLQTYVTQQLIRAAEIRASANLAATKMSECVLGQSKRVDFCGKGYHLMSFPQSAPHGVVFLHVTYVPAQEKNFTTAPAICHDGKAHFPREGVFVSNGTHWFVTQRNFYEPQIITTDNTFVSGNCDVVIGIVNNTVYDPLQPELDSFKEELDKYFKNHTSPDVDLGDISGINASVVNIQKEIDRLNEVAKNLNESLIDLQELGKYEQYIKWPWYIWLGFIAGLIAIVMVTIMLCCMTSCCSCLKGCCSCGSCCKFDEDDSEPVLKGVKLHYT

SEQ ID NO: 25 - protein, 1273 aa, Artificial Sequence
  SARS-CoV-2/Wuhan/WIV05/2019__EPI_ISL_402128 spike protein (1-1273)(F970C_G999C)
MFVFLVLLPLVSSQCVNLTTRTQLPPAYTNSFTRGVYYPDKVFRSSVLHSTQDLFLPFFSNVTWFHAIHVSGTNGTKRFDNPVLPFNDGVYFASTEKSNIIRGWIFGTTLDSKTQSLLIVNNATNVVIKVCEFQFCNDPFLGVYYHKNNKSWMESEFRVYSSANNCTFEYVSQPFLMDLEGKQGNFKNLREFVFKNIDGYFKIYSKHTPINLVRDLPQGFSALEPLVDLPIGINITRFQTLLALHRSYLTPGDSSSGWTAGAAAYYVGYLQPRTFLLKYNENGTITDAVDCALDPLSETKCTLKSFTVEKGIYQTSNFRVQPTESIVRFPNITNLCPFGEVFNATRFASVYAWNRKRISNCVADYSVLYNSASFSTFKCYGVSPTKLNDLCFTNVYADSFVIRGDEVRQIAPGQTGKIADYNYKLPDDFTGCVIAWNSNNLDSKVGGNYNYLYRLFRKSNLKPFERDISTEIYQAGSTPCNGVEGFNCYFPLQSYGFQPTNGVGYQPYRVVVLSFELLHAPATVCGPKKSTNLVKNKCVNFNFNGLTGTGVLTESNKKFLPFQQFGRDIADTTDAVRDPQTLEILDITPCSFGGVSVITPGTNTSNQVAVLYQDVNCTEVPVAIHADQLTPTWRVYSTGSNVFQTRAGCLIGAEHVNNSYECDIPIGAGICASYQTQTNSPRRARSVASQSIIAYTMSLGAENSVAYSNNSIAIPTNFTISVTTEILPVSMTKTSVDCTMYICGDSTECSNLLLQYGSFCTQLNRALTGIAVEQDKNTQEVFAQVKQIYKTPPIKDFGGFNFSQILPDPSKPSKRSFIEDLLFNKVTLADAGFIKQYGDCLGDIAARDLICAQKFNGLTVLPPLLTDEMIAQYTSALLAGTITSGWTFGAGAALQIPFAMQMAYRFNGIGVTQNVLYENQKLIANQFNSAIGKIQDSLSSTASALGKLQDVVNQNAQALNTLVKQLSSNCGAISSVLNDILSRLDKVEAEVQIDRLITCRLQSLQTYVTQQLIRAAEIRASANLAATKMSECVLGQSKRVDFCGKGYHLMSFPQSAPHGVVFLHVTYVPAQEKNFTTAPAICHDGKAHFPREGVFVSNGTHWFVTQRNFYEPQIITTDNTFVSGNCDVVIGIVNNTVYDPLQPELDSFKEELDKYFKNHTSPDVDLGDISGINASVVNIQKEIDRLNEVAKNLNESLIDLQELGKYEQYIKWPWYIWLGFIAGLIAIVMVTIMLCCMTSCCSCLKGCCSCGSCCKFDEDDSEPVLKGVKLHYT

SEQ ID NO: 26 - protein, 1273 aa, Artificial Sequence
  SARS-CoV-2/Wuhan/WIV05/2019__EPI_ISL_402128 spike protein (1-1273)(A972C_R995C)
MFVFLVLLPLVSSQCVNLTTRTQLPPAYTNSFTRGVYYPDKVFRSSVLHSTQDLFLPFFSNVTWFHAIHVSGTNGTKRFDNPVLPFNDGVYFASTEKSNIIRGWIFGTTLDSKTQSLLIVNNATNVVIKVCEFQFCNDPFLGVYYHKNNKSWMESEFRVYSSANNCTFEYVSQPFLMDLEGKQGNFKNLREFVFKNIDGYFKIYSKHTPINLVRDLPQGFSALEPLVDLPIGINITRFQTLLALHRSYLTPGDSSSGWTAGAAAYYVGYLQPRTFLLKYNENGTITDAVDCALDPLSETKCTLKSFTVEKGIYQTSNFRVQPTESIVRFPNITNLCPFGEVFNATRFASVYAWNRKRISNCVADYSVLYNSASFSTFKCYGVSPTKLNDLCFTNVYADSFVIRGDEVRQIAPGQTGKIADYNYKLPDDFTGCVIAWNSNNLDSKVGGNYNYLYRLFRKSNLKPFERDISTEIYQAGSTPCNGVEGFNCYFPLQSYGFQPTNGVGYQPYRVVVLSFELLHAPATVCGPKKSTNLVKNKCVNFNFNGLTGTGVLTESNKKFLPFQQFGRDIADTTDAVRDPQTLEILDITPCSFGGVSVITPGTNTSNQVAVLYQDVNCTEVPVAIHADQLTPTWRVYSTGSNVFQTRAGCLIGAEHVNNSYECDIPIGAGICASYQTQTNSPRRARSVASQSIIAYTMSLGAENSVAYSNNSIAIPTNFTISVTTEILPVSMTKTSVDCTMYICGDSTECSNLLLQYGSFCTQLNRALTGIAVEQDKNTQEVFAQVKQIYKTPPIKDFGGFNFSQILPDPSKPSKRSFIEDLLFNKVTLADAGFIKQYGDCLGDIAARDLICAQKFNGLTVLPPLLTDEMIAQYTSALLAGTITSGWTFGAGAALQIPFAMQMAYRFNGIGVTQNVLYENQKLIANQFNSAIGKIQDSLSSTASALGKLQDVVNQNAQALNTLVKQLSSNFGCISSVLNDILSRLDKVEAEVQIDCLITGRLQSLQTYVTQQLIRAAEIRASANLAATKMSECVLGQSKRVDFCGKGYHLMSFPQSAPHGVVFLHVTYVPAQEKNFTTAPAICHDGKAHFPREGVFVSNGTHWFVTQRNFYEPQIITTDNTFVSGNCDVVIGIVNNTVYDPLQPELDSFKEELDKYFKNHTSPDVDLGDISGINASVVNIQKEIDRLNEVAKNLNESLIDLQELGKYEQYIKWPWYIWLGFIAGLIAIVMVTIMLCCMTSCCSCLKGCCSCGSCCKFDEDDSEPVLKGVKLHYT

SEQ ID NO: 27 - protein, 681 aa, Artificial Sequence
  SARS-CoV-2/Wuhan/WIV05/2019__EPI_ISL_402128 spike protein (1-681)
MFVFLVLLPLVSSQCVNLTTRTQLPPAYTNSFTRGVYYPDKVFRSSVLHSTQDLFLPFFSNVTWFHAIHVSGTNGTKRFDNPVLPFNDGVYFASTEKSNIIRGWIFGTTLDSKTQSLLIVNNATNVVIKVCEFQFCNDPFLGVYYHKNNKSWMESEFRVYSSANNCTFEYVSQPFLMDLEGKQGNFKNLREFVFKNIDGYFKIYSKHTPINLVRDLPQGFSALEPLVDLPIGINITRFQTLLALHRSYLTPGDSSSGWTAGAAAYYVGYLQPRTFLLKYNENGTITDAVDCALDPLSETKCTLKSFTVEKGIYQTSNFRVQPTESIVRFPNITNLCPFGEVFNATRFASVYAWNRKRISNCVADYSVLYNSASFSTFKCYGVSPTKLNDLCFTNVYADSFVIRGDEVRQIAPGQTGKIADYNYKLPDDFTGCVIAWNSNNLDSKVGGNYNYLYRLFRKSNLKPFERDISTEIYQAGSTPCNGVEGFNCYFPLQSYGFQPTNGVGYQPYRVVVLSFELLHAPATVCGPKKSTNLVKNKCVNFNFNGLTGTGVLTESNKKFLPFQQFGRDIADTTDAVRDPQTLEILDITPCSFGGVSVITPGTNTSNQVAVLYQDVNCTEVPVAIHADQLTPTWRVYSTGSNVFQTRAGCLIGAEHVNNSYECDIPIGAGICASYQTQTNSP

SEQ ID NO: 28 - protein, 15 aa, Artificial Sequence
  SARS-CoV-2/Wuhan/WIV05/2019__EPI_ISL_402128 spike protein (1-15)
MFVFLVLLPLVSSQC

SEQ ID NO: 29 - protein, 666 aa, Artificial Sequence
  SARS-CoV-2/Wuhan/WIV05/2019__EPI_ISL_402128 spike protein (16-681)
VNLTTRTQLPPAYTNSFTRGVYYPDKVFRSSVLHSTQDLFLPFFSNVTWFHAIHVSGTNGTKRFDNPVLPFNDGVYFASTEKSNIIRGWIFGTTLDSKTQSLLIVNNATNVVIKVCEFQFCNDPFLGVYYHKNNKSWMESEFRVYSSANNCTFEYVSQPFLMDLEGKQGNFKNLREFVFKNIDGYFKIYSKHTPINLVRDLPQGFSALEPLVDLPIGINITRFQTLLALHRSYLTPGDSSSGWTAGAAAYYVGYLQPRTFLLKYNENGTITDAVDCALDPLSETKCTLKSFTVEKGIYQTSNFRVQPTESIVRFPNITNLCPFGEVFNATRFASVYAWNRKRISNCVADYSVLYNSASFSTFKCYGVSPTKLNDLCFTNVYADSFVIRGDEVRQIAPGQTGKIADYNYKLPDDFTGCVIAWNSNNLDSKVGGNYNYLYRLFRKSNLKPFERDISTEIYQAGSTPCNGVEGFNCYFPLQSYGFQPTNGVGYQPYRVVVLSFELLHAPATVCGPKKSTNLVKNKCVNFNFNGLTGTGVLTESNKKFLPFQQFGRDIADTTDAVRDPQTLEILDITPCSFGGVSVITPGTNTSNQVAVLYQDVNCTEVPVAIHADQLTPTWRVYSTGSNVFQTRAGCLIGAEHVNNSYECDIPIGAGICASYQTQTNSP

SEQ ID NO: 30 - protein, 592 aa, Artificial Sequence
  SARS-CoV-2/Wuhan/WIV05/2019__EPI_ISL_402128 spike protein (682-1273)
RRARSVASQSIIAYTMSLGAENSVAYSNNSIAIPTNFTISVTTEILPVSMTKTSVDCTMYICGDSTECSNLLLQYGSFCTQLNRALTGIAVEQDKNTQEVFAQVKQIYKTPPIKDFGGFNFSQILPDPSKPSKRSFIEDLLFNKVTLADAGFIKQYGDCLGDIAARDLICAQKFNGLTVLPPLLTDEMIAQYTSALLAGTITSGWTFGAGAALQIPFAMQMAYRFNGIGVTQNVLYENQKLIANQFNSAIGKIQDSLSSTASALGKLQDVVNQNAQALNTLVKQLSSNFGAISSVLNDILSRLDKVEAEVQIDRLITGRLQSLQTYVTQQLIRAAEIRASANLAATKMSECVLGQSKRVDFCGKGYHLMSFPQSAPHGVVFLHVTYVPAQEKNFTTAPAICHDGKAHFPREGVFVSNGTHWFVTQRNFYEPQIITTDNTFVSGNCDVVIGIVNNTVYDPLQPELDSFKEELDKYFKNHTSPDVDLGDISGINASVVNIQKEIDRLNEVAKNLNESLIDLQELGKYEQYIKWPWYIWLGFIAGLIAIVMVTIMLCCMTSCCSCLKGCCSCGSCCKFDEDDSEPVLKGVKLHYT

SEQ ID NO: 31 - protein, 1211 aa, Artificial Sequence
  SARS-CoV-2/Wuhan/WIV05/2019__EPI_ISL_402128 spike protein (1-1211)
MFVFLVLLPLVSSQCVNLTTRTQLPPAYTNSFTRGVYYPDKVFRSSVLHSTQDLFLPFFSNVTWFHAIHVSGTNGTKRFDNPVLPFNDGVYFASTEKSNIIRGWIFGTTLDSKTQSLLIVNNATNVVIKVCEFQFCNDPFLGVYYHKNNKSWMESEFRVYSSANNCTFEYVSQPFLMDLEGKQGNFKNLREFVFKNIDGYFKIYSKHTPINLVRDLPQGFSALEPLVDLPIGINITRFQTLLALHRSYLTPGDSSSGWTAGAAAYYVGYLQPRTFLLKYNENGTITDAVDCALDPLSETKCTLKSFTVEKGIYQTSNFRVQPTESIVRFPNITNLCPFGEVFNATRFASVYAWNRKRISNCVADYSVLYNSASFSTFKCYGVSPTKLNDLCFTNVYADSFVIRGDEVRQIAPGQTGKIADYNYKLPDDFTGCVIAWNSNNLDSKVGGNYNYLYRLFRKSNLKPFERDISTEIYQAGSTPCNGVEGFNCYFPLQSYGFQPTNGVGYQPYRVVVLSFELLHAPATVCGPKKSTNLVKNKCVNFNFNGLTGTGVLTESNKKFLPFQQFGRDIADTTDAVRDPQTLEILDITPCSFGGVSVITPGTNTSNQVAVLYQDVNCTEVPVAIHADQLTPTWRVYSTGSNVFQTRAGCLIGAEHVNNSYECDIPIGAGICASYQTQTNSPRRARSVASQSIIAYTMSLGAENSVAYSNNSIAIPTNFTISVTTEILPVSMTKTSVDCTMYICGDSTECSNLLLQYGSFCTQLNRALTGIAVEQDKNTQEVFAQVKQIYKTPPIKDFGGFNFSQILPDPSKPSKRSFIEDLLFNKVTLADAGFIKQYGDCLGDIAARDLICAQKFNGLTVLPPLLTDEMIAQYTSALLAGTITSGWTFGAGAALQIPFAMQMAYRFNGIGVTQNVLYENQKLIANQFNSAIGKIQDSLSSTASALGKLQDVVNQNAQALNTLVKQLSSNFGAISSVLNDILSRLDKVEAEVQIDRLITGRLQSLQTYVTQQLIRAAEIRASANLAATKMSECVLGQSKRVDFCGKGYHLMSFPQSAPHGVVFLHVTYVPAQEKNFTTAPAICHDGKAHFPREGVFVSNGTHWFVTQRNFYEPQIITTDNTFVSGNCDVVIGIVNNTVYDPLQPELDSFKEELDKYFKNHTSPDVDLGDISGINASVVNIQKEIDRLNEVAKNLNESLIDLQELGKYEQYIK

SEQ ID NO: 32 - protein, 1207 aa, Artificial Sequence
  SARS-CoV-2/bat/Yunnan/RaTG13/2013__EPI_ISL_402131 spike protein (1-1207)
MFVFLVLLPLVSSQCVNLTTRTQLPPAYTNSSTRGVYYPDKVFRSSVLHLTQDLFLPFFSNVTWFHAIHVSGTNGIKRFDNPVLPFNDGVYFASTEKSNIIRGWIFGTTLDSKTQSLLIVNNATNVVIKVCEFQFCNDPFLGVYYHKNNKSWMESEFRVYSSANNCTFEYVSQPFLMDLEGKQGNFKNLREFVFKNIDGYFKIYSKHTPINLVRDLPPGFSALEPLVDLPIGINITRFQTLLALHRSYLTPGDSSSGWTAGAAAYYVGYLQPRTFLLKYNENGTITDAVDCALDPLSETKCTLKSFTVEKGIYQTSNFRVQPTDSIVRFPNITNLCPFGEVFNATTFASVYAWNRKRISNCVADYSVLYNSTSFSTFKCYGVSPTKLNDLCFTNVYADSFVITGDEVRQIAPGQTGKIADYNYKLPDDFTGCVIAWNSKHIDAKEGGNFNYLYRLFRKANLKPFERDISTEIYQAGSKPCNGQTGLNCYYPLYRYGFYPTDGVGHQPYRVVVLSFELLNAPATVCGPKKSTNLVKNKCVNFNFNGLTGTGVLTESNKKFLPFQQFGRDIADTTDAVRDPQTLEILDITPCSFGGVSVITPGTNASNQVAVLYQDVNCTEVPVAIHADQLTPTWRVYSTGSNVFQTRAGCLIGAEHVNNSYECDIPIGAGICASYQTQTNSRSVASQSIIAYTMSLGAENSVAYSNNSIAIPTNFTISVTTEILPVSMTKTSVDCTMYICGDSTECSNLLLQYGSFCTQLNRALTGIAVEQDKNTQEVFAQVKQIYKTPPIKDFGGFNFSQILPDPSKPSKRSFIEDLLFNKVTLADAGFIKQYGDCLGDIAARDLICAQKFNGLTVLPPLLTDEMIAQYTSALLAGTITSGWTFGAGAALQIPFAMQMAYRFNGIGVTQNVLYENQKLIANQFNSAIGKIQDSLSSTASALGKLQDVVNQNAQALNTLVKQLSSNFGAISSVLNDILSRLDKVEAEVQIDRLITGRLQSLQTYVTQQLIRAAEIRASANLAATKMSECVLGQSKRVDFCGKGYHLMSFPQSAPHGVVFLHVTYVPAQEKNFTTAPAICHDGKAHFPREGVFVSNGTHWFVTQRNFYEPQIITTDNTFVSGSCDVVIGIVNNTVYDPLQPELDSFKEELDKYFKNHTSPDVDLGDISGINASVVNIQKEIDRLNEVAKNLNESLIDLQELGKYEQYIK

SEQ ID NO: 33 - protein, 1211 aa, Artificial Sequence
  SARS-CoV-2/Wuhan/HBCDC-HB-01/2019__EPI_ISL_402132 spike protein (1-1211)
MFVFLVLLPLVSSQCVNLTTRTQLPPAYTNSITRGVYYPDKVFRSSVLHSTQDLFLPFFSNVTWFHAIHVSGTNGTKRFDNPVLPFNDGVYFASTEKSNIIRGWIFGTTLDSKTQSLLIVNNATNVVIKVCEFQFCNDPFLGVYYHKNNKSWMESEFRVYSSANNCTFEYVSQPFLMDLEGKQGNFKNLREFVFKNIDGYFKIYSKHTPINLVRDLPQGFSALEPLVDLPIGINITRFQTLLALHRSYLTPGDSSSGWTAGAAAYYVGYLQPRTFLLKYNENGTITDAVDCALDPLSETKCTLKSFTVEKGIYQTSNFRVQPTESIVRFPNITNLCPFGEVFNATRFASVYAWNRKRISNCVADYSVLYNSASFSTFKCYGVSPTKLNDLCFTNVYADSFVIRGDEVRQIAPGQTGKIADYNYKLPDDFTGCVIAWNSNNLDSKVGGNYNYLYRLFRKSNLKPFERDISTEIYQAGSTPCNGVEGFNCYFPLQSYGFQPTNGVGYQPYRVVVLSFELLHAPATVCGPKKSTNLVKNKCVNFNFNGLTGTGVLTESNKKFLPFQQFGRDIADTTDAVRDPQTLEILDITPCSFGGVSVITPGTNTSNQVAVLYQDVNCTEVPVAIHADQLTPTWRVYSTGSNVFQTRAGCLIGAEHVNNSYECDIPIGAGICASYQTQTNSPRRARSVASQSIIAYTMSLGAENSVAYSNNSIAIPTNFTISVTTEILPVSMTKTSVDCTMYICGDSTECSNLLLQYGSFCTQLNRALTGIAVEQDKNTQEVFAQVKQIYKTPPIKDFGGFNFSQILPDPSKPSKRSFIEDLLFNKVTLADAGFIKQYGDCLGDIAARDLICAQKFNGLTVLPPLLTDEMIAQYTSALLAGTITSGWTFGAGAALQIPFAMQMAYRFNGIGVTQNVLYENQKLIANQFNSAIGKIQDSLSSTASALGKLQDVVNQNAQALNTLVKQLSSNFGAISSVLNDILSRLDKVEAEVQIDRLITGRLQSLQTYVTQQLIRAAEIRASANLAATKMSECVLGQSKRVDFCGKGYHLMSFPQSAPHGVVFLHVTYVPAQEKNFTTAPAICHDGKAHFPREGVFVSNGTHWFVTQRNFYEPQIITTDNTFVSGNCDVVIGIVNNTVYDPLQPELDSFKEELDKYFKNHTSPDVDLGDISGINASVVNIQKEIDRLNEVAKNLNESLIDLQELGKYEQYIK

SEQ ID NO: 34 - protein, 1211 aa, Artificial Sequence
  SARS-CoV-2/Guangdong/20SF028/2020__EPI_ISL_403936 spike protein (1-1211)
MFVFLVLLPLVSSQCVNLTTRTQLPPAYTNSFTRGVYYPDKVFRSSVLYSTQDLFLPFFSNVTWFHAIHVSGTNGTKRFDNPVLPFNDGVYFASTEKSNIIRGWIFGTTLDSKTQSLLIVNNATNVVIKVCEFQFCNDPFLGVYYHKNNKSWMESEFRVYSSANNCTFEYVSQPFLMDLEGKQGNFKNLREFVFKNIDGYFKIYSKHTPINLVRDLPQGFSALEPLVDLPIGINITRFQTLLALHRSYLTPGDSSSGWTAGAAAYYVGYLQPRTFLLKYNENGTITDAVDCALDPLSETKCTLKSFTVEKGIYQTSNFRVQPTESIVRFPNITNLCPFGEVFNATRFASVYAWNRKRISNCVADYSVLYNSASFSTFKCYGVSPTKLNDLCFTNVYADSFVIRGDEVRQIAPGQTGKIADYNYKLPDDFTGCVIAWNSNNLDSKVGGNYNYLYRLFRKSNLKPFERDISTEIYQAGSTPCNGVEGFNCYFPLQSYGFQPTNGVGYQPYRVVVLSFELLHAPATVCGPKKSTNLVKNKCVNFNFNGLTGTGVLTESNKKFLPFQQFGRDIADTTDAVRDPQTLEILDITPCSFGGVSVITPGTNTSNQVAVLYQDVNCTEVPVAIHADQLTPTWRVYSTGSNVFQTRAGCLIGAEHVNNSYECDIPIGAGICASYQTQTNSPRRARSVASQSIIAYTMSLGAENSVAYSNNSIAIPTNFTISVTTEILPVSMTKTSVDCTMYICGDSTECSNLLLQYGSFCTQLNRALTGIAVEQDKNTQEVFAQVKQIYKTPPIKDFGGFNFSQILPDPSKPSKRSFIEDLLFNKVTLADAGFIKQYGDCLGDIAARDLICAQKFNGLTVLPPLLTDEMIAQYTSALLAGTITSGWTFGAGAALQIPFAMQMAYRFNGIGVTQNVLYENQKLIANQFNSAIGKIQDSLSSTASALGKLQDVVNQNAQALNTLVKQLSSNFGAISSVLNDILSRLDKVEAEVQIDRLITGRLQSLQTYVTQQLIRAAEIRASANLAATKMSECVLGQSKRVDFCGKGYHLMSFPQSAPHGVVFLHVTYVPAQEKNFTTAPAICHDGKAHFPREGVFVSNGTHWFVTQRNFYEPQIITTDNTFVSGNCDVVIGIVNNTVYDPLQPELDSFKEELDKYFKNHTSPDVDLGDISGINASVVNIQKEIDRLNEVAKNLNESLIDLQELGKYEQYIK

SEQ ID NO: 35 - protein, 1211 aa, Artificial Sequence
  SARS-CoV-2/Shenzhen/SZTH-001/2020__EPI_ISL_406592 spike protein (1-1211)
MFVFLVLLPLVSSQCVNLTTRTQLPPAYTNSFTRGVYYPDKVFRSSVLHSTQDLFLPFFSNVTWFHAIHVSGTNGTKRFDNPVLPFNDGVYFASTEKSNIIRGWIFGTTLDSKTQSLLIVNNATNVVIKVCEFQFCNDPFLGVYYHKNNKSWMESEFRVYSSANNCTFEYVSQPFLMDLEGKQGNFKNLREFVFKNIDGYFKIYSKHTPINLVRDLPQGFSALEPLVDLPIGINITRFQTLLALHRSYLTPGDSSSGWTAGAAAYYVGYLQPRTFLLKYNENGTITDAVDCALDPLSETKCTLKSFTVEKGIYQTSNFRVQPTESIVRFPNITNLCPFGEVFNATRFASVYAWNRKRISNCVADYSVLYNSASFSTFKCYGVSPTKLNDLCFTNVYADSFVIRGDEVRQIAPGQTGKIADYNYKLPDDFTGCVIAWNSNNLDSKVGGNYNYLYRLFRKSNLKPFERDISTEIYQAGSTPCNGVEGFNCYFPLQSYGFQPTNGVGYQPYRVVVLSFELLHAPATVCGPKKSTNLVKNKCVNFNFNGLTGTGVLTESNKKFLPFQQFGRDIADTTDAVRDPQTLEILDITPCSFGGVSVITPGTNTSNQVAVLYQDVNCTEVPVAIHADQLTPTWRVYSTGSNVFQTRAGCLIGAEHVNNSYECDIPIGAGICASYQTQTNSPRRARSVASQSIIAYTMSLGAENSVAYSNNSIAIPTNFTISVTTEILPVSMTKTSVDCTMYICGDSTECSNLLLQYGSFCTQLNRALTGIAVEQDKNTQEVFAQVKQIYKTPPIKDFGGFNFSQILPDPSKPSKRSFIEDLLFNKVTLADAGFIKQYGDCLGDIAARDLICAQKFNGLTVLPPLLTDEMIAQYTSALLAGTITSGWTFGAGAALQIPFAMQMAYRFNGIGVTQNVLYENQKLIANQFNSAIGKIQDSLSSTASALGKLQDVVNQNAQALNTLVKQLSSNFGAISSVLNDILSRLDKVEAEVQIDRLITGRLQSLQTYVTQQLIRAAEIRASANLAATKMSECVLGQSKRVDFCGKGYHLMSFPQSAPHGVVFLHVTYVPAQEKNFTTAPAICHDGKAHFPREGVFVSNGTHWFVTQRNFYEPQIITTDNTFVSGNCDVLIGIVNNTVYDPLQPELDSFKEELDKYFKNHTSPDVDLGDISGINASVVNIQKEIDRLNEVAKNLNESLIDLQELGKYEQYIK

SEQ ID NO: 36 - protein, 1211 aa, Artificial Sequence
  SARS-CoV-2/Shenzhen/SZTH-004/2020__EPI_ISL_406595 spike protein (1-1211)
MFVFLVLLPLVSSQCVNLTTRTQLPPAYTNSFTRGVYYPDKVFRSSVLHSTQDLFLPFFSNVTWFHAIHVSGTNGTKRFDNPVLPFNDGVYFASTEKSNIIRGWIFGTTLDSKTQSLLIVNNATNVVIKVCEFQFCNDPFLGVYYHKNNKSWMESEFRVYSSANNCTFEYVSQPFLMDLEGKQGNFKNLREFVFKNIDGYFKIYSKHTPINLVRDLPQGFSALEPLVDLPIGINITRFQTLLALHRSYLTPGDSSSGWTAGAAAYYVGYLQPRTFLLKYNENGTITDAVDCALDPLSETKCTLKSFTVEKGIYQTSNFRVQPTESIVRFPNITNLCPFGEVFNATRFASVYAWDRKRISNCVAYYSVLYNSASFSTFKCYGVSPTKLNDLCFTNVYADSFVIRGDEVRQIAPGQTGKIADYNYKLPDDFTGCVIAWNSNNLDSKVGGNYNYLYRLFRKSNLKPFERDISTEIYQAGSTPCNGVEGFNCYFPLQSYGFQPTNGVGYQPYRVVVLSFELLHAPATVCGPKKSTNLVKNKCVNFNFNGLTGTGVLTESNKKFLPFQQFGRDIADTTDAVRDPQTLEILDITPCSFGGVSVITPGTNTSNQVAVLYQDVNCTEVPVAIHADQLTPTWRVYSTGSNVFQTRAGCLIGAEHVNNSYECDIPIGAGICASYQTQTNSPRRARSVASQSIIAYTMSLGAENSVAYSNNSIAIPTNFTISVTTEILPVSMTKTSVDCTMYICGDSTECSNLLLQYGSFCTQLNRALTGIAVEQDKNTQEVFAQVKQIYKTPPIKDFGGFNFSQILPDPSKPSKRSFIEDLLFNKVTLADAGFIKQYGDCLGDIAARDLICAQKFNGLTVLPPLLTDEMIAQYTSALLAGTITSGWTFGAGAALQIPFAMQMAYRFNGIGVTQNVLYENQKLIANQFNSAIGKIQDSLSSTASALGKLQDVVNQNAQALNTLVKQLSSNFGAISSVLNDILSRLDKVEAEVQIDRLITGRLQSLQTYVTQQLIRAAEIRASANLAATKMSECVLGQSKRVDFCGKGYHLMSFPQSAPHGVVFLHVTYVPAQEKNFTTAPAICHDGKAHFPREGVFVSNGTHWFVTQRNFYEPQIITTDNTFVSGNCDVVIGIVNNTVYDPLQPELDSFKEELDKYFKNHTSPDVDLGDISGINASVVNIQKEIDRLNEVAKNLNESLIDLQELGKYEQYIK

SEQ ID NO: 37 - protein, 1211 aa, Artificial Sequence
  SARS-CoV-2/France/IDF0372/2020__EPI_ISL_406596 spike protein (1-1211)
MFVFLVLLPLVSSQCVNLTTRTQLPPAYTNSFTRGVYYPDKVFRSSVLHSTQDLFLPFFSNVTWFHAIHVSGTNGTKRFDNPVLPFNDGVYFASTEKSNIIRGWIFGTTLDSKTQSLLIVNNATNVVIKVCEFQFCNDPFLGVYYHKNNKSWMESEFRVYSSANNCTFEYVSQPFLMDLEGKQGNFKNLREFVFKNIDGYFKIYSKHTPINLVRDLPQGFSALEPLVDLPIGINITRFQTLLALHRSYLTPGDSSSGWTAGAAAYYVGYLQPRTFLLKYNENGTITDAVDCALDPLSETKCTLKSFTVEKGIYQTSNFRVQPTESIVRFPNITNLCPFGEVFNATRFASVYAWNRKRISNCVADYSFLYNSASFSTFKCYGVSPTKLNDLCFTNVYADSFVIRGDEVRQIAPGQTGKIADYNYKLPDDFTGCVIAWNSNNLDSKVGGNYNYLYRLFRKSNLKPFERDISTEIYQAGSTPCNGVEGFNCYFPLQSYGFQPTNGVGYQPYRVVVLSFELLHAPATVCGPKKSTNLVKNKCVNFNFNGLTGTGVLTESNKKFLPFQQFGRDIADTTDAVRDPQTLEILDITPCSFGGVSVITPGTNTSNQVAVLYQDVNCTEVPVAIHADQLTPTWRVYSTGSNVFQTRAGCLIGAEHVNNSYECDIPIGAGICASYQTQTNSPRRARSVASQSIIAYTMSLGAENSVAYSNNSIAIPTNFTISVTTEILPVSMTKTSVDCTMYICGDSTECSNLLLQYGSFCTQLNRALTGIAVEQDKNTQEVFAQVKQIYKTPPIKDFGGFNFSQILPDPSKPSKRSFIEDLLFNKVTLADAGFIKQYGDCLGDIAARDLICAQKFNGLTVLPPLLTDEMIAQYTSALLAGTITSGWTFGAGAALQIPFAMQMAYRFNGIGVTQNVLYENQKLIANQFNSAIGKIQDSLSSTASALGKLQDVVNQNAQALNTLVKQLSSNFGAISSVLNDILSRLDKVEAEVQIDRLITGRLQSLQTYVTQQLIRAAEIRASANLAATKMSECVLGQSKRVDFCGKGYHLMSFPQSAPHGVVFLHVTYVPAQEKNFTTAPAICHDGKAHFPREGVFVSNGTHWFVTQRNFYEPQIITTDNTFVSGNCDVVIGIVNNTVYDPLQPELDSFKEELDKYFKNHTSPDVDLGDISGINASVVNIQKEIDRLNEVAKNLNESLIDLQELGKYEQYIK

SEQ ID NO: 38 - protein, 1211 aa, Artificial Sequence
  SARS-CoV-2/Australia/VIC01/2020__EPI_ISL_406844 spike protein (1-1211)
MFVFLVLLPLVSSQCVNLTTRTQLPPAYTNSFTRGVYYPDKVFRSSVLHSTQDLFLPFFSNVTWFHAIHVSGTNGTKRFDNPVLPFNDGVYFASTEKSNIIRGWIFGTTLDSKTQSLLIVNNATNVVIKVCEFQFCNDPFLGVYYHKNNKSWMESEFRVYSSANNCTFEYVSQPFLMDLEGKQGNFKNLREFVFKNIDGYFKIYSKHTPINLVRDLPQGFSALEPLVDLPIGINITRFQTLLALHRRYLTPGDSSSGWTAGAAAYYVGYLQPRTFLLKYNENGTITDAVDCALDPLSETKCTLKSFTVEKGIYQTSNFRVQPTESIVRFPNITNLCPFGEVFNATRFASVYAWNRKRISNCVADYSVLYNSASFSTFKCYGVSPTKLNDLCFTNVYADSFVIRGDEVRQIAPGQTGKIADYNYKLPDDFTGCVIAWNSNNLDSKVGGNYNYLYRLFRKSNLKPFERDISTEIYQAGSTPCNGVEGFNCYFPLQSYGFQPTNGVGYQPYRVVVLSFELLHAPATVCGPKKSTNLVKNKCVNFNFNGLTGTGVLTESNKKFLPFQQFGRDIADTTDAVRDPQTLEILDITPCSFGGVSVITPGTNTSNQVAVLYQDVNCTEVPVAIHADQLTPTWRVYSTGSNVFQTRAGCLIGAEHVNNSYECDIPIGAGICASYQTQTNSPRRARSVASQSIIAYTMSLGAENSVAYSNNSIAIPTNFTISVTTEILPVSMTKTSVDCTMYICGDSTECSNLLLQYGSFCTQLNRALTGIAVEQDKNTQEVFAQVKQIYKTPPIKDFGGFNFSQILPDPSKPSKRSFIEDLLFNKVTLADAGFIKQYGDCLGDIAARDLICAQKFNGLTVLPPLLTDEMIAQYTSALLAGTITSGWTFGAGAALQIPFAMQMAYRFNGIGVTQNVLYENQKLIANQFNSAIGKIQDSLSSTASALGKLQDVVNQNAQALNTLVKQLSSNFGAISSVLNDILSRLDKVEAEVQIDRLITGRLQSLQTYVTQQLIRAAEIRASANLAATKMSECVLGQSKRVDFCGKGYHLMSFPQSAPHGVVFLHVTYVPAQEKNFTTAPAICHDGKAHFPREGVFVSNGTHWFVTQRNFYEPQIITTDNTFVSGNCDVVIGIVNNTVYDPLQPELDSFKEELDKYFKNHTSPDVDLGDISGINASVVNIQKEIDRLNEVAKNLNESLIDLQELGKYEQYIK

SEQ ID NO: 39 - protein, 1211 aa, Artificial Sequence
  SARS-CoV-2/Germany/BavPat1/2020__EPI_ISL_406862 spike protein (1-1211)
MFVFLVLLPLVSSQCVNLTTRTQLPPAYTNSFTRGVYYPDKVFRSSVLHSTQDLFLPFFSNVTWFHAIHVSGTNGTKRFDNPVLPFNDGVYFASTEKSNIIRGWIFGTTLDSKTQSLLIVNNATNVVIKVCEFQFCNDPFLGVYYHKNNKSWMESEFRVYSSANNCTFEYVSQPFLMDLEGKQGNFKNLREFVFKNIDGYFKIYSKHTPINLVRDLPQGFSALEPLVDLPIGINITRFQTLLALHRSYLTPGDSSSGWTAGAAAYYVGYLQPRTFLLKYNENGTITDAVDCALDPLSETKCTLKSFTVEKGIYQTSNFRVQPTESIVRFPNITNLCPFGEVFNATRFASVYAWNRKRISNCVADYSVLYNSASFSTFKCYGVSPTKLNDLCFTNVYADSFVIRGDEVRQIAPGQTGKIADYNYKLPDDFTGCVIAWNSNNLDSKVGGNYNYLYRLFRKSNLKPFERDISTEIYQAGSTPCNGVEGFNCYFPLQSYGFQPTNGVGYQPYRVVVLSFELLHAPATVCGPKKSTNLVKNKCVNFNFNGLTGTGVLTESNKKFLPFQQFGRDIADTTDAVRDPQTLEILDITPCSFGGVSVITPGTNTSNQVAVLYQGVNCTEVPVAIHADQLTPTWRVYSTGSNVFQTRAGCLIGAEHVNNSYECDIPIGAGICASYQTQTNSPRRARSVASQSIIAYTMSLGAENSVAYSNNSIAIPTNFTISVTTEILPVSMTKTSVDCTMYICGDSTECSNLLLQYGSFCTQLNRALTGIAVEQDKNTQEVFAQVKQIYKTPPIKDFGGFNFSQILPDPSKPSKRSFIEDLLFNKVTLADAGFIKQYGDCLGDIAARDLICAQKFNGLTVLPPLLTDEMIAQYTSALLAGTITSGWTFGAGAALQIPFAMQMAYRFNGIGVTQNVLYENQKLIANQFNSAIGKIQDSLSSTASALGKLQDVVNQNAQALNTLVKQLSSNFGAISSVLNDILSRLDKVEAEVQIDRLITGRLQSLQTYVTQQLIRAAEIRASANLAATKMSECVLGQSKRVDFCGKGYHLMSFPQSAPHGVVFLHVTYVPAQEKNFTTAPAICHDGKAHFPREGVFVSNGTHWFVTQRNFYEPQIITTDNTFVSGNCDVVIGIVNNTVYDPLQPELDSFKEELDKYFKNHTSPDVDLGDISGINASVVNIQKEIDRLNEVAKNLNESLIDLQELGKYEQYIK

SEQ ID NO: 40 - protein, 1211 aa, Artificial Sequence
  SARS-CoV-2/Wuhan/WIV05/2019__EPI_ISL_402128 spike protein (1-1211)(K986P_V987P)
MFVFLVLLPLVSSQCVNLTTRTQLPPAYTNSFTRGVYYPDKVFRSSVLHSTQDLFLPFFSNVTWFHAIHVSGTNGTKRFDNPVLPFNDGVYFASTEKSNIIRGWIFGTTLDSKTQSLLIVNNATNVVIKVCEFQFCNDPFLGVYYHKNNKSWMESEFRVYSSANNCTFEYVSQPFLMDLEGKQGNFKNLREFVFKNIDGYFKIYSKHTPINLVRDLPQGFSALEPLVDLPIGINITRFQTLLALHRSYLTPGDSSSGWTAGAAAYYVGYLQPRTFLLKYNENGTITDAVDCALDPLSETKCTLKSFTVEKGIYQTSNFRVQPTESIVRFPNITNLCPFGEVFNATRFASVYAWNRKRISNCVADYSVLYNSASFSTFKCYGVSPTKLNDLCFTNVYADSFVIRGDEVRQIAPGQTGKIADYNYKLPDDFTGCVIAWNSNNLDSKVGGNYNYLYRLFRKSNLKPFERDISTEIYQAGSTPCNGVEGFNCYFPLQSYGFQPTNGVGYQPYRVVVLSFELLHAPATVCGPKKSTNLVKNKCVNFNFNGLTGTGVLTESNKKFLPFQQFGRDIADTTDAVRDPQTLEILDITPCSFGGVSVITPGTNTSNQVAVLYQDVNCTEVPVAIHADQLTPTWRVYSTGSNVFQTRAGCLIGAEHVNNSYECDIPIGAGICASYQTQTNSPRRARSVASQSIIAYTMSLGAENSVAYSNNSIAIPTNFTISVTTEILPVSMTKTSVDCTMYICGDSTECSNLLLQYGSFCTQLNRALTGIAVEQDKNTQEVFAQVKQIYKTPPIKDFGGFNFSQILPDPSKPSKRSFIEDLLFNKVTLADAGFIKQYGDCLGDIAARDLICAQKFNGLTVLPPLLTDEMIAQYTSALLAGTITSGWTFGAGAALQIPFAMQMAYRFNGIGVTQNVLYENQKLIANQFNSAIGKIQDSLSSTASALGKLQDVVNQNAQALNTLVKQLSSNFGAISSVLNDILSRLDPPEAEVQIDRLITGRLQSLQTYVTQQLIRAAEIRASANLAATKMSECVLGQSKRVDFCGKGYHLMSFPQSAPHGVVFLHVTYVPAQEKNFTTAPAICHDGKAHFPREGVFVSNGTHWFVTQRNFYEPQIITTDNTFVSGNCDVVIGIVNNTVYDPLQPELDSFKEELDKYFKNHTSPDVDLGDISGINASVVNIQKEIDRLNEVAKNLNESLIDLQELGKYEQYIK

SEQ ID NO: 41 - protein, 1207 aa, Artificial Sequence
  SARS-CoV-2/bat/Yunnan/RaTG13/2013__EPI_ISL_402131 spike protein (1-1207)(K982P_V983P)
MFVFLVLLPLVSSQCVNLTTRTQLPPAYTNSSTRGVYYPDKVFRSSVLHLTQDLFLPFFSNVTWFHAIHVSGTNGIKRFDNPVLPFNDGVYFASTEKSNIIRGWIFGTTLDSKTQSLLIVNNATNVVIKVCEFQFCNDPFLGVYYHKNNKSWMESEFRVYSSANNCTFEYVSQPFLMDLEGKQGNFKNLREFVFKNIDGYFKIYSKHTPINLVRDLPPGFSALEPLVDLPIGINITRFQTLLALHRSYLTPGDSSSGWTAGAAAYYVGYLQPRTFLLKYNENGTITDAVDCALDPLSETKCTLKSFTVEKGIYQTSNFRVQPTDSIVRFPNITNLCPFGEVFNATTFASVYAWNRKRISNCVADYSVLYNSTSFSTFKCYGVSPTKLNDLCFTNVYADSFVITGDEVRQIAPGQTGKIADYNYKLPDDFTGCVIAWNSKHIDAKEGGNFNYLYRLFRKANLKPFERDISTEIYQAGSKPCNGQTGLNCYYPLYRYGFYPTDGVGHQPYRVVVLSFELLNAPATVCGPKKSTNLVKNKCVNFNFNGLTGTGVLTESNKKFLPFQQFGRDIADTTDAVRDPQTLEILDITPCSFGGVSVITPGTNASNQVAVLYQDVNCTEVPVAIHADQLTPTWRVYSTGSNVFQTRAGCLIGAEHVNNSYECDIPIGAGICASYQTQTNSRSVASQSIIAYTMSLGAENSVAYSNNSIAIPTNFTISVTTEILPVSMTKTSVDCTMYICGDSTECSNLLLQYGSFCTQLNRALTGIAVEQDKNTQEVFAQVKQIYKTPPIKDFGGFNFSQILPDPSKPSKRSFIEDLLFNKVTLADAGFIKQYGDCLGDIAARDLICAQKFNGLTVLPPLLTDEMIAQYTSALLAGTITSGWTFGAGAALQIPFAMQMAYRFNGIGVTQNVLYENQKLIANQFNSAIGKIQDSLSSTASALGKLQDVVNQNAQALNTLVKQLSSNFGAISSVLNDILSRLDPPEAEVQIDRLITGRLQSLQTYVTQQLIRAAEIRASANLAATKMSECVLGQSKRVDFCGKGYHLMSFPQSAPHGVVFLHVTYVPAQEKNFTTAPAICHDGKAHFPREGVFVSNGTHWFVTQRNFYEPQIITTDNTFVSGSCDVVIGIVNNTVYDPLQPELDSFKEELDKYFKNHTSPDVDLGDISGINASVVNIQKEIDRLNEVAKNLNESLIDLQELGKYEQYIK

SEQ ID NO: 42 - protein, 1211 aa, Artificial Sequence
  SARS-CoV-2/Wuhan/HBCDC-HB-01/2019__EPI_ISL_402132 spike protein (1-1211)(K986P_V987P)
MFVFLVLLPLVSSQCVNLTTRTQLPPAYTNSITRGVYYPDKVFRSSVLHSTQDLFLPFFSNVTWFHAIHVSGTNGTKRFDNPVLPFNDGVYFASTEKSNIIRGWIFGTTLDSKTQSLLIVNNATNVVIKVCEFQFCNDPFLGVYYHKNNKSWMESEFRVYSSANNCTFEYVSQPFLMDLEGKQGNFKNLREFVFKNIDGYFKIYSKHTPINLVRDLPQGFSALEPLVDLPIGINITRFQTLLALHRSYLTPGDSSSGWTAGAAAYYVGYLQPRTFLLKYNENGTITDAVDCALDPLSETKCTLKSFTVEKGIYQTSNFRVQPTESIVRFPNITNLCPFGEVFNATRFASVYAWNRKRISNCVADYSVLYNSASFSTFKCYGVSPTKLNDLCFTNVYADSFVIRGDEVRQIAPGQTGKIADYNYKLPDDFTGCVIAWNSNNLDSKVGGNYNYLYRLFRKSNLKPFERDISTEIYQAGSTPCNGVEGFNCYFPLQSYGFQPTNGVGYQPYRVVVLSFELLHAPATVCGPKKSTNLVKNKCVNFNFNGLTGTGVLTESNKKFLPFQQFGRDIADTTDAVRDPQTLEILDITPCSFGGVSVITPGTNTSNQVAVLYQDVNCTEVPVAIHADQLTPTWRVYSTGSNVFQTRAGCLIGAEHVNNSYECDIPIGAGICASYQTQTNSPRRARSVASQSIIAYTMSLGAENSVAYSNNSIAIPTNFTISVTTEILPVSMTKTSVDCTMYICGDSTECSNLLLQYGSFCTQLNRALTGIAVEQDKNTQEVFAQVKQIYKTPPIKDFGGFNFSQILPDPSKPSKRSFIEDLLFNKVTLADAGFIKQYGDCLGDIAARDLICAQKFNGLTVLPPLLTDEMIAQYTSALLAGTITSGWTFGAGAALQIPFAMQMAYRFNGIGVTQNVLYENQKLIANQFNSAIGKIQDSLSSTASALGKLQDVVNQNAQALNTLVKQLSSNFGAISSVLNDILSRLDPPEAEVQIDRLITGRLQSLQTYVTQQLIRAAEIRASANLAATKMSECVLGQSKRVDFCGKGYHLMSFPQSAPHGVVFLHVTYVPAQEKNFTTAPAICHDGKAHFPREGVFVSNGTHWFVTQRNFYEPQIITTDNTFVSGNCDVVIGIVNNTVYDPLQPELDSFKEELDKYFKNHTSPDVDLGDISGINASVVNIQKEIDRLNEVAKNLNESLIDLQELGKYEQYIK

SEQ ID NO: 43 - protein, 1211 aa, Artificial Sequence
  SARS-CoV-2/Guangdong/20SF028/2020__EPI_ISL_403936 spike protein (1-1211)(K986P_V987P)
MFVFLVLLPLVSSQCVNLTTRTQLPPAYTNSFTRGVYYPDKVFRSSVLYSTQDLFLPFFSNVTWFHAIHVSGTNGTKRFDNPVLPFNDGVYFASTEKSNIIRGWIFGTTLDSKTQSLLIVNNATNVVIKVCEFQFCNDPFLGVYYHKNNKSWMESEFRVYSSANNCTFEYVSQPFLMDLEGKQGNFKNLREFVFKNIDGYFKIYSKHTPINLVRDLPQGFSALEPLVDLPIGINITRFQTLLALHRSYLTPGDSSSGWTAGAAAYYVGYLQPRTFLLKYNENGTITDAVDCALDPLSETKCTLKSFTVEKGIYQTSNFRVQPTESIVRFPNITNLCPFGEVFNATRFASVYAWNRKRISNCVADYSVLYNSASFSTFKCYGVSPTKLNDLCFTNVYADSFVIRGDEVRQIAPGQTGKIADYNYKLPDDFTGCVIAWNSNNLDSKVGGNYNYLYRLFRKSNLKPFERDISTEIYQAGSTPCNGVEGFNCYFPLQSYGFQPTNGVGYQPYRVVVLSFELLHAPATVCGPKKSTNLVKNKCVNFNFNGLTGTGVLTESNKKFLPFQQFGRDIADTTDAVRDPQTLEILDITPCSFGGVSVITPGTNTSNQVAVLYQDVNCTEVPVAIHADQLTPTWRVYSTGSNVFQTRAGCLIGAEHVNNSYECDIPIGAGICASYQTQTNSPRRARSVASQSIIAYTMSLGAENSVAYSNNSIAIPTNFTISVTTEILPVSMTKTSVDCTMYICGDSTECSNLLLQYGSFCTQLNRALTGIAVEQDKNTQEVFAQVKQIYKTPPIKDFGGFNFSQILPDPSKPSKRSFIEDLLFNKVTLADAGFIKQYGDCLGDIAARDLICAQKFNGLTVLPPLLTDEMIAQYTSALLAGTITSGWTFGAGAALQIPFAMQMAYRFNGIGVTQNVLYENQKLIANQFNSAIGKIQDSLSSTASALGKLQDVVNQNAQALNTLVKQLSSNFGAISSVLNDILSRLDPPEAEVQIDRLITGRLQSLQTYVTQQLIRAAEIRASANLAATKMSECVLGQSKRVDFCGKGYHLMSFPQSAPHGVVFLHVTYVPAQEKNFTTAPAICHDGKAHFPREGVFVSNGTHWFVTQRNFYEPQIITTDNTFVSGNCDVVIGIVNNTVYDPLQPELDSFKEELDKYFKNHTSPDVDLGDISGINASVVNIQKEIDRLNEVAKNLNESLIDLQELGKYEQYIK

SEQ ID NO: 44 - protein, 1211 aa, Artificial Sequence
  SARS-CoV-2/Shenzhen/SZTH-001/2020__EPI_ISL_406592 spike protein (1-1211)(K986P_V987P)
MFVFLVLLPLVSSQCVNLTTRTQLPPAYTNSFTRGVYYPDKVFRSSVLHSTQDLFLPFFSNVTWFHAIHVSGTNGTKRFDNPVLPFNDGVYFASTEKSNIIRGWIFGTTLDSKTQSLLIVNNATNVVIKVCEFQFCNDPFLGVYYHKNNKSWMESEFRVYSSANNCTFEYVSQPFLMDLEGKQGNFKNLREFVFKNIDGYFKIYSKHTPINLVRDLPQGFSALEPLVDLPIGINITRFQTLLALHRSYLTPGDSSSGWTAGAAAYYVGYLQPRTFLLKYNENGTITDAVDCALDPLSETKCTLKSFTVEKGIYQTSNFRVQPTESIVRFPNITNLCPFGEVFNATRFASVYAWNRKRISNCVADYSVLYNSASFSTFKCYGVSPTKLNDLCFTNVYADSFVIRGDEVRQIAPGQTGKIADYNYKLPDDFTGCVIAWNSNNLDSKVGGNYNYLYRLFRKSNLKPFERDISTEIYQAGSTPCNGVEGFNCYFPLQSYGFQPTNGVGYQPYRVVVLSFELLHAPATVCGPKKSTNLVKNKCVNFNFNGLTGTGVLTESNKKFLPFQQFGRDIADTTDAVRDPQTLEILDITPCSFGGVSVITPGTNTSNQVAVLYQDVNCTEVPVAIHADQLTPTWRVYSTGSNVFQTRAGCLIGAEHVNNSYECDIPIGAGICASYQTQTNSPRRARSVASQSIIAYTMSLGAENSVAYSNNSIAIPTNFTISVTTEILPVSMTKTSVDCTMYICGDSTECSNLLLQYGSFCTQLNRALTGIAVEQDKNTQEVFAQVKQIYKTPPIKDFGGFNFSQILPDPSKPSKRSFIEDLLFNKVTLADAGFIKQYGDCLGDIAARDLICAQKFNGLTVLPPLLTDEMIAQYTSALLAGTITSGWTFGAGAALQIPFAMQMAYRFNGIGVTQNVLYENQKLIANQFNSAIGKIQDSLSSTASALGKLQDVVNQNAQALNTLVKQLSSNFGAISSVLNDILSRLDPPEAEVQIDRLITGRLQSLQTYVTQQLIRAAEIRASANLAATKMSECVLGQSKRVDFCGKGYHLMSFPQSAPHGVVFLHVTYVPAQEKNFTTAPAICHDGKAHFPREGVFVSNGTHWFVTQRNFYEPQIITTDNTFVSGNCDVLIGIVNNTVYDPLQPELDSFKEELDKYFKNHTSPDVDLGDISGINASVVNIQKEIDRLNEVAKNLNESLIDLQELGKYEQYIK

SEQ ID NO: 45 - protein, 1211 aa, Artificial Sequence
  SARS-CoV-2/Shenzhen/SZTH-004/2020__EPI_ISL_406595 spike protein (1-1211)(K986P_V987P)
MFVFLVLLPLVSSQCVNLTTRTQLPPAYTNSFTRGVYYPDKVFRSSVLHSTQDLFLPFFSNVTWFHAIHVSGTNGTKRFDNPVLPFNDGVYFASTEKSNIIRGWIFGTTLDSKTQSLLIVNNATNVVIKVCEFQFCNDPFLGVYYHKNNKSWMESEFRVYSSANNCTFEYVSQPFLMDLEGKQGNFKNLREFVFKNIDGYFKIYSKHTPINLVRDLPQGFSALEPLVDLPIGINITRFQTLLALHRSYLTPGDSSSGWTAGAAAYYVGYLQPRTFLLKYNENGTITDAVDCALDPLSETKCTLKSFTVEKGIYQTSNFRVQPTESIVRFPNITNLCPFGEVFNATRFASVYAWDRKRISNCVAYYSVLYNSASFSTFKCYGVSPTKLNDLCFTNVYADSFVIRGDEVRQIAPGQTGKIADYNYKLPDDFTGCVIAWNSNNLDSKVGGNYNYLYRLFRKSNLKPFERDISTEIYQAGSTPCNGVEGFNCYFPLQSYGFQPTNGVGYQPYRVVVLSFELLHAPATVCGPKKSTNLVKNKCVNFNFNGLTGTGVLTESNKKFLPFQQFGRDIADTTDAVRDPQTLEILDITPCSFGGVSVITPGTNTSNQVAVLYQDVNCTEVPVAIHADQLTPTWRVYSTGSNVFQTRAGCLIGAEHVNNSYECDIPIGAGICASYQTQTNSPRRARSVASQSIIAYTMSLGAENSVAYSNNSIAIPTNFTISVTTEILPVSMTKTSVDCTMYICGDSTECSNLLLQYGSFCTQLNRALTGIAVEQDKNTQEVFAQVKQIYKTPPIKDFGGFNFSQILPDPSKPSKRSFIEDLLFNKVTLADAGFIKQYGDCLGDIAARDLICAQKFNGLTVLPPLLTDEMIAQYTSALLAGTITSGWTFGAGAALQIPFAMQMAYRFNGIGVTQNVLYENQKLIANQFNSAIGKIQDSLSSTASALGKLQDVVNQNAQALNTLVKQLSSNFGAISSVLNDILSRLDPPEAEVQIDRLITGRLQSLQTYVTQQLIRAAEIRASANLAATKMSECVLGQSKRVDFCGKGYHLMSFPQSAPHGVVFLHVTYVPAQEKNFTTAPAICHDGKAHFPREGVFVSNGTHWFVTQRNFYEPQIITTDNTFVSGNCDVVIGIVNNTVYDPLQPELDSFKEELDKYFKNHTSPDVDLGDISGINASVVNIQKEIDRLNEVAKNLNESLIDLQELGKYEQYIK

SEQ ID NO: 46 - protein, 1211 aa, Artificial Sequence
  SARS-CoV-2/France/IDF0372/2020__EPI_ISL_406596 spike protein (1-1211)(K986P_V987P)
MFVFLVLLPLVSSQCVNLTTRTQLPPAYTNSFTRGVYYPDKVFRSSVLHSTQDLFLPFFSNVTWFHAIHVSGTNGTKRFDNPVLPFNDGVYFASTEKSNIIRGWIFGTTLDSKTQSLLIVNNATNVVIKVCEFQFCNDPFLGVYYHKNNKSWMESEFRVYSSANNCTFEYVSQPFLMDLEGKQGNFKNLREFVFKNIDGYFKIYSKHTPINLVRDLPQGFSALEPLVDLPIGINITRFQTLLALHRSYLTPGDSSSGWTAGAAAYYVGYLQPRTFLLKYNENGTITDAVDCALDPLSETKCTLKSFTVEKGIYQTSNFRVQPTESIVRFPNITNLCPFGEVFNATRFASVYAWNRKRISNCVADYSFLYNSASFSTFKCYGVSPTKLNDLCFTNVYADSFVIRGDEVRQIAPGQTGKIADYNYKLPDDFTGCVIAWNSNNLDSKVGGNYNYLYRLFRKSNLKPFERDISTEIYQAGSTPCNGVEGFNCYFPLQSYGFQPTNGVGYQPYRVVVLSFELLHAPATVCGPKKSTNLVKNKCVNFNFNGLTGTGVLTESNKKFLPFQQFGRDIADTTDAVRDPQTLEILDITPCSFGGVSVITPGTNTSNQVAVLYQDVNCTEVPVAIHADQLTPTWRVYSTGSNVFQTRAGCLIGAEHVNNSYECDIPIGAGICASYQTQTNSPRRARSVASQSIIAYTMSLGAENSVAYSNNSIAIPTNFTISVTTEILPVSMTKTSVDCTMYICGDSTECSNLLLQYGSFCTQLNRALTGIAVEQDKNTQEVFAQVKQIYKTPPIKDFGGFNFSQILPDPSKPSKRSFIEDLLFNKVTLADAGFIKQYGDCLGDIAARDLICAQKFNGLTVLPPLLTDEMIAQYTSALLAGTITSGWTFGAGAALQIPFAMQMAYRFNGIGVTQNVLYENQKLIANQFNSAIGKIQDSLSSTASALGKLQDVVNQNAQALNTLVKQLSSNFGAISSVLNDILSRLDPPEAEVQIDRLITGRLQSLQTYVTQQLIRAAEIRASANLAATKMSECVLGQSKRVDFCGKGYHLMSFPQSAPHGVVFLHVTYVPAQEKNFTTAPAICHDGKAHFPREGVFVSNGTHWFVTQRNFYEPQIITTDNTFVSGNCDVVIGIVNNTVYDPLQPELDSFKEELDKYFKNHTSPDVDLGDISGINASVVNIQKEIDRLNEVAKNLNESLIDLQELGKYEQYIK

SEQ ID NO: 47 - protein, 1211 aa, Artificial Sequence
  SARS-CoV-2/Australia/VIC01/2020__EPI_ISL_406844 spike protein (1-1211)(K986P_V987P)
MFVFLVLLPLVSSQCVNLTTRTQLPPAYTNSFTRGVYYPDKVFRSSVLHSTQDLFLPFFSNVTWFHAIHVSGTNGTKRFDNPVLPFNDGVYFASTEKSNIIRGWIFGTTLDSKTQSLLIVNNATNVVIKVCEFQFCNDPFLGVYYHKNNKSWMESEFRVYSSANNCTFEYVSQPFLMDLEGKQGNFKNLREFVFKNIDGYFKIYSKHTPINLVRDLPQGFSALEPLVDLPIGINITRFQTLLALHRRYLTPGDSSSGWTAGAAAYYVGYLQPRTFLLKYNENGTITDAVDCALDPLSETKCTLKSFTVEKGIYQTSNFRVQPTESIVRFPNITNLCPFGEVFNATRFASVYAWNRKRISNCVADYSVLYNSASFSTFKCYGVSPTKLNDLCFTNVYADSFVIRGDEVRQIAPGQTGKIADYNYKLPDDFTGCVIAWNSNNLDSKVGGNYNYLYRLFRKSNLKPFERDISTEIYQAGSTPCNGVEGFNCYFPLQSYGFQPTNGVGYQPYRVVVLSFELLHAPATVCGPKKSTNLVKNKCVNFNFNGLTGTGVLTESNKKFLPFQQFGRDIADTTDAVRDPQTLEILDITPCSFGGVSVITPGTNTSNQVAVLYQDVNCTEVPVAIHADQLTPTWRVYSTGSNVFQTRAGCLIGAEHVNNSYECDIPIGAGICASYQTQTNSPRRARSVASQSIIAYTMSLGAENSVAYSNNSIAIPTNFTISVTTEILPVSMTKTSVDCTMYICGDSTECSNLLLQYGSFCTQLNRALTGIAVEQDKNTQEVFAQVKQIYKTPPIKDFGGFNFSQILPDPSKPSKRSFIEDLLFNKVTLADAGFIKQYGDCLGDIAARDLICAQKFNGLTVLPPLLTDEMIAQYTSALLAGTITSGWTFGAGAALQIPFAMQMAYRFNGIGVTQNVLYENQKLIANQFNSAIGKIQDSLSSTASALGKLQDVVNQNAQALNTLVKQLSSNFGAISSVLNDILSRLDPPEAEVQIDRLITGRLQSLQTYVTQQLIRAAEIRASANLAATKMSECVLGQSKRVDFCGKGYHLMSFPQSAPHGVVFLHVTYVPAQEKNFTTAPAICHDGKAHFPREGVFVSNGTHWFVTQRNFYEPQIITTDNTFVSGNCDVVIGIVNNTVYDPLQPELDSFKEELDKYFKNHTSPDVDLGDISGINASVVNIQKEIDRLNEVAKNLNESLIDLQELGKYEQYIK

SEQ ID NO: 48 - protein, 1211 aa, Artificial Sequence
  SARS-CoV-2/Germany/BavPat1/2020__EPI_ISL_406862 spike protein (1-1211)(K986P_V987P)
MFVFLVLLPLVSSQCVNLTTRTQLPPAYTNSFTRGVYYPDKVFRSSVLHSTQDLFLPFFSNVTWFHAIHVSGTNGTKRFDNPVLPFNDGVYFASTEKSNIIRGWIFGTTLDSKTQSLLIVNNATNVVIKVCEFQFCNDPFLGVYYHKNNKSWMESEFRVYSSANNCTFEYVSQPFLMDLEGKQGNFKNLREFVFKNIDGYFKIYSKHTPINLVRDLPQGFSALEPLVDLPIGINITRFQTLLALHRSYLTPGDSSSGWTAGAAAYYVGYLQPRTFLLKYNENGTITDAVDCALDPLSETKCTLKSFTVEKGIYQTSNFRVQPTESIVRFPNITNLCPFGEVFNATRFASVYAWNRKRISNCVADYSVLYNSASFSTFKCYGVSPTKLNDLCFTNVYADSFVIRGDEVRQIAPGQTGKIADYNYKLPDDFTGCVIAWNSNNLDSKVGGNYNYLYRLFRKSNLKPFERDISTEIYQAGSTPCNGVEGFNCYFPLQSYGFQPTNGVGYQPYRVVVLSFELLHAPATVCGPKKSTNLVKNKCVNFNFNGLTGTGVLTESNKKFLPFQQFGRDIADTTDAVRDPQTLEILDITPCSFGGVSVITPGTNTSNQVAVLYQGVNCTEVPVAIHADQLTPTWRVYSTGSNVFQTRAGCLIGAEHVNNSYECDIPIGAGICASYQTQTNSPRRARSVASQSIIAYTMSLGAENSVAYSNNSIAIPTNFTISVTTEILPVSMTKTSVDCTMYICGDSTECSNLLLQYGSFCTQLNRALTGIAVEQDKNTQEVFAQVKQIYKTPPIKDFGGFNFSQILPDPSKPSKRSFIEDLLFNKVTLADAGFIKQYGDCLGDIAARDLICAQKFNGLTVLPPLLTDEMIAQYTSALLAGTITSGWTFGAGAALQIPFAMQMAYRFNGIGVTQNVLYENQKLIANQFNSAIGKIQDSLSSTASALGKLQDVVNQNAQALNTLVKQLSSNFGAISSVLNDILSRLDPPEAEVQIDRLITGRLQSLQTYVTQQLIRAAEIRASANLAATKMSECVLGQSKRVDFCGKGYHLMSFPQSAPHGVVFLHVTYVPAQEKNFTTAPAICHDGKAHFPREGVFVSNGTHWFVTQRNFYEPQIITTDNTFVSGNCDVVIGIVNNTVYDPLQPELDSFKEELDKYFKNHTSPDVDLGDISGINASVVNIQKEIDRLNEVAKNLNESLIDLQELGKYEQYIK

SEQ ID NO: 49 - protein, 62 aa, Artificial Sequence
  SARS-CoV-2/Wuhan/WIV05/2019__EPI_ISL_402128 spike protein (1212-1273)
WPWYIWLGFIAGLIAIVMVTIMLCCMTSCCSCLKGCCSCGSCCKFDEDDSEPVLKGVKLHYT

SEQ ID NO: 50 - protein, 62 aa, Artificial Sequence
  SARS-CoV-2/bat/Yunnan/RaTG13/2013__EPI_ISL_402131 spike protein (1208-1269)
WPWYIWLGFIAGLIAIIMVTIMLCCMTSCCSCLKGCCSCGSCCKFDEDDSEPVLKGVKLHYT

SEQ ID NO: 51 - protein, 62 aa, Artificial Sequence; identical to SEQ ID NO: 49
  SARS-CoV-2/Wuhan/HBCDC-HB-01/2019__EPI_ISL_402132 spike protein (1212-1273)

SEQ ID NO: 52 - protein, 62 aa, Artificial Sequence; identical to SEQ ID NO: 49
  SARS-CoV-2/Guangdong/20SF028/2020__EPI_ISL_403936 spike protein (1212-1273)

SEQ ID NO: 53 - protein, 62 aa, Artificial Sequence
  SARS-CoV-2/Shenzhen/SZTH-001/2020__EPI_ISL_406592 spike protein (1212-1273)
WPWYIWLGFIAGLIAIVMVTIMLCCMTSCCSCLKGCCSCGSCCKFDEDDSGPVLKGVKLHYT

SEQ ID NO: 54 - protein, 62 aa, Artificial Sequence; identical to SEQ ID NO: 49
  SARS-CoV-2/Shenzhen/SZTH-004/2020__EPI_ISL_406595 spike protein (1212-1273)

SEQ ID NO: 55 - protein, 62 aa, Artificial Sequence; identical to SEQ ID NO: 49
  SARS-CoV-2/France/IDF0372/2020__EPI_ISL_406596 spike protein (1212-1273)

SEQ ID NO: 56 - protein, 62 aa, Artificial Sequence; identical to SEQ ID NO: 49
  SARS-CoV-2/Australia/VIC01/2020__EPI_ISL_406844 spike protein (1212-1273)

SEQ ID NO: 57 - protein, 62 aa, Artificial Sequence; identical to SEQ ID NO: 49
  SARS-CoV-2/Germany/BavPat1/2020__EPI_ISL_406862 spike protein (1212-1273)

SEQ ID NO: 58 - protein, 1371 aa, Artificial Sequence
  SARS-CoV-2/Wuhan/WIV05/2019__EPI_ISL_402128 spike protein (1-1211) LumSynth construct
MFVFLVLLPLVSSQCVNLTTRTQLPPAYTNSFTRGVYYPDKVFRSSVLHSTQDLFLPFFSNVTWFHAIHVSGTNGTKRFDNPVLPFNDGVYFASTEKSNIIRGWIFGTTLDSKTQSLLIVNNATNVVIKVCEFQFCNDPFLGVYYHKNNKSWMESEFRVYSSANNCTFEYVSQPFLMDLEGKQGNFKNLREFVFKNIDGYFKIYSKHTPINLVRDLPQGFSALEPLVDLPIGINITRFQTLLALHRSYLTPGDSSSGWTAGAAAYYVGYLQPRTFLLKYNENGTITDAVDCALDPLSETKCTLKSFTVEKGIYQTSNFRVQPTESIVRFPNITNLCPFGEVFNATRFASVYAWNRKRISNCVADYSVLYNSASFSTFKCYGVSPTKLNDLCFTNVYADSFVIRGDEVRQIAPGQTGKIADYNYKLPDDFTGCVIAWNSNNLDSKVGGNYNYLYRLFRKSNLKPFERDISTEIYQAGSTPCNGVEGFNCYFPLQSYGFQPTNGVGYQPYRVVVLSFELLHAPATVCGPKKSTNLVKNKCVNFNFNGLTGTGVLTESNKKFLPFQQFGRDIADTTDAVRDPQTLEILDITPCSFGGVSVITPGTNTSNQVAVLYQDVNCTEVPVAIHADQLTPTWRVYSTGSNVFQTRAGCLIGAEHVNNSYECDIPIGAGICASYQTQTNSPRRARSVASQSIIAYTMSLGAENSVAYSNNSIAIPTNFTISVTTEILPVSMTKTSVDCTMYICGDSTECSNLLLQYGSFCTQLNRALTGIAVEQDKNTQEVFAQVKQIYKTPPIKDFGGFNFSQILPDPSKPSKRSFIEDLLFNKVTLADAGFIKQYGDCLGDIAARDLICAQKFNGLTVLPPLLTDEMIAQYTSALLAGTITSGWTFGAGAALQIPFAMQMAYRFNGIGVTQNVLYENQKLIANQFNSAIGKIQDSLSSTASALGKLQDVVNQNAQALNTLVKQLSSNFGAISSVLNDILSRLDKVEAEVQIDRLITGRLQSLQTYVTQQLIRAAEIRASANLAATKMSECVLGQSKRVDFCGKGYHLMSFPQSAPHGVVFLHVTYVPAQEKNFTTAPAICHDGKAHFPREGVFVSNGTHWFVTQRNFYEPQIITTDNTFVSGNCDVVIGIVNNTVYDPLQPELDSFKEELDKYFKNHTSPDVDLGDISGINASVVNIQKEIDRLNEVAKNLNESLIDLQELGKYEQYIKGGGSGGGQIYEGKLTAEGLRFGIVASRFNHALVDRLVEGAIDAIVRHGGREEDITLVRVPGSWEIPVAAGELARKEDIDAVIAIGVLIRGATPHFDYIASEVSKGLADLSLELRKPITFGVITADTLEQAIERAGTKHGNKGWEAALSAIEMANLFKSLR

SEQ ID NO: 59 - protein, 1367 aa, Artificial Sequence
  SARS-CoV-2/bat/Yunnan/RaTG13/2013__EPI_ISL_402131 spike protein (1-1207) LumSynth construct
MFVFLVLLPLVSSQCVNLTTRTQLPPAYTNSSTRGVYYPDKVFRSSVLHLTQDLFLPFFSNVTWFHAIHVSGTNGIKRFDNPVLPFNDGVYFASTEKSNIIRGWIFGTTLDSKTQSLLIVNNATNVVIKVCEFQFCNDPFLGVYYHKNNKSWMESEFRVYSSANNCTFEYVSQPFLMDLEGKQGNFKNLREFVFKNIDGYFKIYSKHTPINLVRDLPPGFSALEPLVDLPIGINITRFQTLLALHRSYLTPGDSSSGWTAGAAAYYVGYLQPRTFLLKYNENGTITDAVDCALDPLSETKCTLKSFTVEKGIYQTSNFRVQPTDSIVRFPNITNLCPFGEVFNATTFASVYAWNRKRISNCVADYSVLYNSTSFSTFKCYGVSPTKLNDLCFTNVYADSFVITGDEVRQIAPGQTGKIADYNYKLPDDFTGCVIAWNSKHIDAKEGGNFNYLYRLFRKANLKPFERDISTEIYQAGSKPCNGQTGLNCYYPLYRYGFYPTDGVGHQPYRVVVLSFELLNAPATVCGPKKSTNLVKNKCVNFNFNGLTGTGVLTESNKKFLPFQQFGRDIADTTDAVRDPQTLEILDITPCSFGGVSVITPGTNASNQVAVLYQDVNCTEVPVAIHADQLTPTWRVYSTGSNVFQTRAGCLIGAEHVNNSYECDIPIGAGICASYQTQTNSRSVASQSIIAYTMSLGAENSVAYSNNSIAIPTNFTISVTTEILPVSMTKTSVDCTMYICGDSTECSNLLLQYGSFCTQLNRALTGIAVEQDKNTQEVFAQVKQIYKTPPIKDFGGFNFSQILPDPSKPSKRSFIEDLLFNKVTLADAGFIKQYGDCLGDIAARDLICAQKFNGLTVLPPLLTDEMIAQYTSALLAGTITSGWTFGAGAALQIPFAMQMAYRFNGIGVTQNVLYENQKLIANQFNSAIGKIQDSLSSTASALGKLQDVVNQNAQALNTLVKQLSSNFGAISSVLNDILSRLDKVEAEVQIDRLITGRLQSLQTYVTQQLIRAAEIRASANLAATKMSECVLGQSKRVDFCGKGYHLMSFPQSAPHGVVFLHVTYVPAQEKNFTTAPAICHDGKAHFPREGVFVSNGTHWFVTQRNFYEPQIITTDNTFVSGSCDVVIGIVNNTVYDPLQPELDSFKEELDKYFKNHTSPDVDLGDISGINASVVNIQKEIDRLNEVAKNLNESLIDLQELGKYEQYIKGGGSGGGQIYEGKLTAEGLRFGIVASRFNHALVDRLVEGAIDAIVRHGGREEDITLVRVPGSWEIPVAAGELARKEDIDAVIAIGVLIRGATPHFDYIASEVSKGLADLSLELRKPITFGVITADTLEQAIERAGTKHGNKGWEAALSAIEMANLFKSLR

SEQ ID NO: 60 - protein, 1371 aa, Artificial Sequence
  SARS-CoV-2/Wuhan/HBCDC-HB-01/2019__EPI_ISL_402132 spike protein (1-1211) LumSynth construct
MFVFLVLLPLVSSQCVNLTTRTQLPPAYTNSITRGVYYPDKVFRSSVLHSTQDLFLPFFSNVTWFHAIHVSGTNGTKRFDNPVLPFNDGVYFASTEKSNIIRGWIFGTTLDSKTQSLLIVNNATNVVIKVCEFQFCNDPFLGVYYHKNNKSWMESEFRVYSSANNCTFEYVSQPFLMDLEGKQGNFKNLREFVFKNIDGYFKIYSKHTPINLVRDLPQGFSALEPLVDLPIGINITRFQTLLALHRSYLTPGDSSSGWTAGAAAYYVGYLQPRTFLLKYNENGTITDAVDCALDPLSETKCTLKSFTVEKGIYQTSNFRVQPTESIVRFPNITNLCPFGEVFNATRFASVYAWNRKRISNCVADYSVLYNSASFSTFKCYGVSPTKLNDLCFTNVYADSFVIRGDEVRQIAPGQTGKIADYNYKLPDDFTGCVIAWNSNNLDSKVGGNYNYLYRLFRKSNLKPFERDISTEIYQAGSTPCNGVEGFNCYFPLQSYGFQPTNGVGYQPYRVVVLSFELLHAPATVCGPKKSTNLVKNKCVNFNFNGLTGTGVLTESNKKFLPFQQFGRDIADTTDAVRDPQTLEILDITPCSFGGVSVITPGTNTSNQVAVLYQDVNCTEVPVAIHADQLTPTWRVYSTGSNVFQTRAGCLIGAEHVNNSYECDIPIGAGICASYQTQTNSPRRARSVASQSIIAYTMSLGAENSVAYSNNSIAIPTNFTISVTTEILPVSMTKTSVDCTMYICGDSTECSNLLLQYGSFCTQLNRALTGIAVEQDKNTQEVFAQVKQIYKTPPIKDFGGFNFSQILPDPSKPSKRSFIEDLLFNKVTLADAGFIKQYGDCLGDIAARDLICAQKFNGLTVLPPLLTDEMIAQYTSALLAGTITSGWTFGAGAALQIPFAMQMAYRFNGIGVTQNVLYENQKLIANQFNSAIGKIQDSLSSTASALGKLQDVVNQNAQALNTLVKQLSSNFGAISSVLNDILSRLDKVEAEVQIDRLITGRLQSLQTYVTQQLIRAAEIRASANLAATKMSECVLGQSKRVDFCGKGYHLMSFPQSAPHGVVFLHVTYVPAQEKNFTTAPAICHDGKAHFPREGVFVSNGTHWFVTQRNFYEPQIITTDNTFVSGNCDVVIGIVNNTVYDPLQPELDSFKEELDKYFKNHTSPDVDLGDISGINASVVNIQKEIDRLNEVAKNLNESLIDLQELGKYEQYIKGGGSGGGQIYEGKLTAEGLRFGIVASRFNHALVDRLVEGAIDAIVRHGGREEDITLVRVPGSWEIPVAAGELARKEDIDAVIAIGVLIRGATPHFDYIASEVSKGLADLSLELRKPITFGVITADTLEQAIERAGTKHGNKGWEAALSAIEMANLFKSLR

SEQ ID NO: 61 - protein, 1371 aa, Artificial Sequence
  SARS-CoV-2/Guangdong/20SF028/2020__EPI_ISL_403936 spike protein (1-1211) LumSynth construct
MFVFLVLLPLVSSQCVNLTTRTQLPPAYTNSFTRGVYYPDKVFRSSVLYSTQDLFLPFFSNVTWFHAIHVSGTNGTKRFDNPVLPFNDGVYFASTEKSNIIRGWIFGTTLDSKTQSLLIVNNATNVVIKVCEFQFCNDPFLGVYYHKNNKSWMESEFRVYSSANNCTFEYVSQPFLMDLEGKQGNFKNLREFVFKNIDGYFKIYSKHTPINLVRDLPQGFSALEPLVDLPIGINITRFQTLLALHRSYLTPGDSSSGWTAGAAAYYVGYLQPRTFLLKYNENGTITDAVDCALDPLSETKCTLKSFTVEKGIYQTSNFRVQPTESIVRFPNITNLCPFGEVFNATRFASVYAWNRKRISNCVADYSVLYNSASFSTFKCYGVSPTKLNDLCFTNVYADSFVIRGDEVRQIAPGQTGKIADYNYKLPDDFTGCVIAWNSNNLDSKVGGNYNYLYRLFRKSNLKPFERDISTEIYQAGSTPCNGVEGFNCYFPLQSYGFQPTNGVGYQPYRVVVLSFELLHAPATVCGPKKSTNLVKNKCVNFNFNGLTGTGVLTESNKKFLPFQQFGRDIADTTDAVRDPQTLEILDITPCSFGGVSVITPGTNTSNQVAVLYQDVNCTEVPVAIHADQLTPTWRVYSTGSNVFQTRAGCLIGAEHVNNSYECDIPIGAGICASYQTQTNSPRRARSVASQSIIAYTMSLGAENSVAYSNNSIAIPTNFTISVTTEILPVSMTKTSVDCTMYICGDSTECSNLLLQYGSFCTQLNRALTGIAVEQDKNTQEVFAQVKQIYKTPPIKDFGGFNFSQILPDPSKPSKRSFIEDLLFNKVTLADAGFIKQYGDCLGDIAARDLICAQKFNGLTVLPPLLTDEMIAQYTSALLAGTITSGWTFGAGAALQIPFAMQMAYRFNGIGVTQNVLYENQKLIANQFNSAIGKIQDSLSSTASALGKLQDVVNQNAQALNTLVKQLSSNFGAISSVLNDILSRLDKVEAEVQIDRLITGRLQSLQTYVTQQLIRAAEIRASANLAATKMSECVLGQSKRVDFCGKGYHLMSFPQSAPHGVVFLHVTYVPAQEKNFTTAPAICHDGKAHFPREGVFVSNGTHWFVTQRNFYEPQIITTDNTFVSGNCDVVIGIVNNTVYDPLQPELDSFKEELDKYFKNHTSPDVDLGDISGINASVVNIQKEIDRLNEVAKNLNESLIDLQELGKYEQYIKGGGSGGGQIYEGKLTAEGLRFGIVASRFNHALVDRLVEGAIDAIVRHGGREEDITLVRVPGSWEIPVAAGELARKEDIDAVIAIGVLIRGATPHFDYIASEVSKGLADLSLELRKPITFGVITADTLEQAIERAGTKHGNKGWEAALSAIEMANLFKSLR

SEQ ID NO: 62 - protein, 1371 aa, Artificial Sequence
  SARS-CoV-2/Shenzhen/SZTH-001/2020__EPI_ISL_406592 spike protein (1-1211) LumSynth construct
MFVFLVLLPLVSSQCVNLTTRTQLPPAYTNSFTRGVYYPDKVFRSSVLHSTQDLFLPFFSNVTWFHAIHVSGTNGTKRFDNPVLPFNDGVYFASTEKSNIIRGWIFGTTLDSKTQSLLIVNNATNVVIKVCEFQFCNDPFLGVYYHKNNKSWMESEFRVYSSANNCTFEYVSQPFLMDLEGKQGNFKNLREFVFKNIDGYFKIYSKHTPINLVRDLPQGFSALEPLVDLPIGINITRFQTLLALHRSYLTPGDSSSGWTAGAAAYYVGYLQPRTFLLKYNENGTITDAVDCALDPLSETKCTLKSFTVEKGIYQTSNFRVQPTESIVRFPNITNLCPFGEVFNATRFASVYAWNRKRISNCVADYSVLYNSASFSTFKCYGVSPTKLNDLCFTNVYADSFVIRGDEVRQIAPGQTGKIADYNYKLPDDFTGCVIAWNSNNLDSKVGGNYNYLYRLFRKSNLKPFERDISTEIYQAGSTPCNGVEGFNCYFPLQSYGFQPTNGVGYQPYRVVVLSFELLHAPATVCGPKKSTNLVKNKCVNFNFNGLTGTGVLTESNKKFLPFQQFGRDIADTTDAVRDPQTLEILDITPCSFGGVSVITPGTNTSNQVAVLYQDVNCTEVPVAIHADQLTPTWRVYSTGSNVFQTRAGCLIGAEHVNNSYECDIPIGAGICASYQTQTNSPRRARSVASQSIIAYTMSLGAENSVAYSNNSIAIPTNFTISVTTEILPVSMTKTSVDCTMYICGDSTECSNLLLQYGSFCTQLNRALTGIAVEQDKNTQEVFAQVKQIYKTPPIKDFGGFNFSQILPDPSKPSKRSFIEDLLFNKVTLADAGFIKQYGDCLGDIAARDLICAQKFNGLTVLPPLLTDEMIAQYTSALLAGTITSGWTFGAGAALQIPFAMQMAYRFNGIGVTQNVLYENQKLIANQFNSAIGKIQDSLSSTASALGKLQDVVNQNAQALNTLVKQLSSNFGAISSVLNDILSRLDKVEAEVQIDRLITGRLQSLQTYVTQQLIRAAEIRASANLAATKMSECVLGQSKRVDFCGKGYHLMSFPQSAPHGVVFLHVTYVPAQEKNFTTAPAICHDGKAHFPREGVFVSNGTHWFVTQRNFYEPQIITTDNTFVSGNCDVLIGIVNNTVYDPLQPELDSFKEELDKYFKNHTSPDVDLGDISGINASVVNIQKEIDRLNEVAKNLNESLIDLQELGKYEQYIKGGGSGGGQIYEGKLTAEGLRFGIVASRFNHALVDRLVEGAIDAIVRHGGREEDITLVRVPGSWEIPVAAGELARKEDIDAVIAIGVLIRGATPHFDYIASEVSKGLADLSLELRKPITFGVITADTLEQAIERAGTKHGNKGWEAALSAIEMANLFKSLR

SEQ ID NO: 63 - protein, 1371 aa, Artificial Sequence
  SARS-CoV-2/Shenzhen/SZTH-004/2020__EPI_ISL_406595 spike protein (1-1211) LumSynth construct
MFVFLVLLPLVSSQCVNLTTRTQLPPAYTNSFTRGVYYPDKVFRSSVLHSTQDLFLPFFSNVTWFHAIHVSGTNGTKRFDNPVLPFNDGVYFASTEKSNIIRGWIFGTTLDSKTQSLLIVNNATNVVIKVCEFQFCNDPFLGVYYHKNNKSWMESEFRVYSSANNCTFEYVSQPFLMDLEGKQGNFKNLREFVFKNIDGYFKIYSKHTPINLVRDLPQGFSALEPLVDLPIGINITRFQTLLALHRSYLTPGDSSSGWTAGAAAYYVGYLQPRTFLLKYNENGTITDAVDCALDPLSETKCTLKSFTVEKGIYQTSNFRVQPTESIVRFPNITNLCPFGEVFNATRFASVYAWDRKRISNCVAYYSVLYNSASFSTFKCYGVSPTKLNDLCFTNVYADSFVIRGDEVRQIAPGQTGKIADYNYKLPDDFTGCVIAWNSNNLDSKVGGNYNYLYRLFRKSNLKPFERDISTEIYQAGSTPCNGVEGFNCYFPLQSYGFQPTNGVGYQPYRVVVLSFELLHAPATVCGPKKSTNLVKNKCVNFNFNGLTGTGVLTESNKKFLPFQQFGRDIADTTDAVRDPQTLEILDITPCSFGGVSVITPGTNTSNQVAVLYQDVNCTEVPVAIHADQLTPTWRVYSTGSNVFQTRAGCLIGAEHVNNSYECDIPIGAGICASYQTQTNSPRRARSVASQSIIAYTMSLGAENSVAYSNNSIAIPTNFTISVTTEILPVSMTKTSVDCTMYICGDSTECSNLLLQYGSFCTQLNRALTGIAVEQDKNTQEVFAQVKQIYKTPPIKDFGGFNFSQILPDPSKPSKRSFIEDLLFNKVTLADAGFIKQYGDCLGDIAARDLICAQKFNGLTVLPPLLTDEMIAQYTSALLAGTITSGWTFGAGAALQIPFAMQMAYRFNGIGVTQNVLYENQKLIANQFNSAIGKIQDSLSSTASALGKLQDVVNQNAQALNTLVKQLSSNFGAISSVLNDILSRLDKVEAEVQIDRLITGRLQSLQTYVTQQLIRAAEIRASANLAATKMSECVLGQSKRVDFCGKGYHLMSFPQSAPHGVVFLHVTYVPAQEKNFTTAPAICHDGKAHFPREGVFVSNGTHWFVTQRNFYEPQIITTDNTFVSGNCDVVIGIVNNTVYDPLQPELDSFKEELDKYFKNHTSPDVDLGDISGINASVVNIQKEIDRLNEVAKNLNESLIDLQELGKYEQYIKGGGSGGGQIYEGKLTAEGLRFGIVASRFNHALVDRLVEGAIDAIVRHGGREEDITLVRVPGSWEIPVAAGELARKEDIDAVIAIGVLIRGATPHFDYIASEVSKGLADLSLELRKPITFGVITADTLEQAIERAGTKHGNKGWEAALSAIEMANLFKSLR

SEQ ID NO: 64 - protein, 1371 aa, Artificial Sequence
  SARS-CoV-2/France/IDF0372/2020__EPI_ISL_406596 spike protein (1-1211) LumSynth construct
MFVFLVLLPLVSSQCVNLTTRTQLPPAYTNSFTRGVYYPDKVFRSSVLHSTQDLFLPFFSNVTWFHAIHVSGTNGTKRFDNPVLPFNDGVYFASTEKSNIIRGWIFGTTLDSKTQSLLIVNNATNVVIKVCEFQFCNDPFLGVYYHKNNKSWMESEFRVYSSANNCTFEYVSQPFLMDLEGKQGNFKNLREFVFKNIDGYFKIYSKHTPINLVRDLPQGFSALEPLVDLPIGINITRFQTLLALHRSYLTPGDSSSGWTAGAAAYYVGYLQPRTFLLKYNENGTITDAVDCALDPLSETKCTLKSFTVEKGIYQTSNFRVQPTESIVRFPNITNLCPFGEVFNATRFASVYAWNRKRISNCVADYSFLYNSASFSTFKCYGVSPTKLNDLCFTNVYADSFVIRGDEVRQIAPGQTGKIADYNYKLPDDFTGCVIAWNSNNLDSKVGGNYNYLYRLFRKSNLKPFERDISTEIYQAGSTPCNGVEGFNCYFPLQSYGFQPTNGVGYQPYRVVVLSFELLHAPATVCGPKKSTNLVKNKCVNFNFNGLTGTGVLTESNKKFLPFQQFGRDIADTTDAVRDPQTLEILDITPCSFGGVSVITPGTNTSNQVAVLYQDVNCTEVPVAIHADQLTPTWRVYSTGSNVFQTRAGCLIGAEHVNNSYECDIPIGAGICASYQTQTNSPRRARSVASQSIIAYTMSLGAENSVAYSNNSIAIPTNFTISVTTEILPVSMTKTSVDCTMYICGDSTECSNLLLQYGSFCTQLNRALTGIAVEQDKNTQEVFAQVKQIYKTPPIKDFGGFNFSQILPDPSKPSKRSFIEDLLFNKVTLADAGFIKQYGDCLGDIAARDLICAQKFNGLTVLPPLLTDEMIAQYTSALLAGTITSGWTFGAGAALQIPFAMQMAYRFNGIGVTQNVLYENQKLIANQFNSAIGKIQDSLSSTASALGKLQDVVNQNAQALNTLVKQLSSNFGAISSVLNDILSRLDKVEAEVQIDRLITGRLQSLQTYVTQQLIRAAEIRASANLAATKMSECVLGQSKRVDFCGKGYHLMSFPQSAPHGVVFLHVTYVPAQEKNFTTAPAICHDGKAHFPREGVFVSNGTHWFVTQRNFYEPQIITTDNTFVSGNCDVVIGIVNNTVYDPLQPELDSFKEELDKYFKNHTSPDVDLGDISGINASVVNIQKEIDRLNEVAKNLNESLIDLQELGKYEQYIKGGGSGGGQIYEGKLTAEGLRFGIVASRFNHALVDRLVEGAIDAIVRHGGREEDITLVRVPGSWEIPVAAGELARKEDIDAVIAIGVLIRGATPHFDYIASEVSKGLADLSLELRKPITFGVITADTLEQAIERAGTKHGNKGWEAALSAIEMANLFKSLR

SEQ ID NO: 65 - protein, 1371 aa, Artificial Sequence
  SARS-CoV-2/Australia/VIC01/2020__EPI_ISL_406844 spike protein (1-1211) LumSynth construct
MFVFLVLLPLVSSQCVNLTTRTQLPPAYTNSFTRGVYYPDKVFRSSVLHSTQDLFLPFFSNVTWFHAIHVSGTNGTKRFDNPVLPFNDGVYFASTEKSNIIRGWIFGTTLDSKTQSLLIVNNATNVVIKVCEFQFCNDPFLGVYYHKNNKSWMESEFRVYSSANNCTFEYVSQPFLMDLEGKQGNFKNLREFVFKNIDGYFKIYSKHTPINLVRDLPQGFSALEPLVDLPIGINITRFQTLLALHRRYLTPGDSSSGWTAGAAAYYVGYLQPRTFLLKYNENGTITDAVDCALDPLSETKCTLKSFTVEKGIYQTSNFRVQPTESIVRFPNITNLCPFGEVFNATRFASVYAWNRKRISNCVADYSVLYNSASFSTFKCYGVSPTKLNDLCFTNVYADSFVIRGDEVRQIAPGQTGKIADYNYKLPDDFTGCVIAWNSNNLDSKVGGNYNYLYRLFRKSNLKPFERDISTEIYQAGSTPCNGVEGFNCYFPLQSYGFQPTNGVGYQPYRVVVLSFELLHAPATVCGPKKSTNLVKNKCVNFNFNGLTGTGVLTESNKKFLPFQQFGRDIADTTDAVRDPQTLEILDITPCSFGGVSVITPGTNTSNQVAVLYQDVNCTEVPVAIHADQLTPTWRVYSTGSNVFQTRAGCLIGAEHVNNSYECDIPIGAGICASYQTQTNSPRRARSVASQSIIAYTMSLGAENSVAYSNNSIAIPTNFTISVTTEILPVSMTKTSVDCTMYICGDSTECSNLLLQYGSFCTQLNRALTGIAVEQDKNTQEVFAQVKQIYKTPPIKDFGGFNFSQILPDPSKPSKRSFIEDLLFNKVTLADAGFIKQYGDCLGDIAARDLICAQKFNGLTVLPPLLTDEMIAQYTSALLAGTITSGWTFGAGAALQIPFAMQMAYRFNGIGVTQNVLYENQKLIANQFNSAIGKIQDSLSSTASALGKLQDVVNQNAQALNTLVKQLSSNFGAISSVLNDILSRLDKVEAEVQIDRLITGRLQSLQTYVTQQLIRAAEIRASANLAATKMSECVLGQSKRVDFCGKGYHLMSFPQSAPHGVVFLHVTYVPAQEKNFTTAPAICHDGKAHFPREGVFVSNGTHWFVTQRNFYEPQIITTDNTFVSGNCDVVIGIVNNTVYDPLQPELDSFKEELDKYFKNHTSPDVDLGDISGINASVVNIQKEIDRLNEVAKNLNESLIDLQELGKYEQYIKGGGSGGGQIYEGKLTAEGLRFGIVASRFNHALVDRLVEGAIDAIVRHGGREEDITLVRVPGSWEIPVAAGELARKEDIDAVIAIGVLIRGATPHFDYIASEVSKGLADLSLELRKPITFGVITADTLEQAIERAGTKHGNKGWEAALSAIEMANLFKSLR

SEQ ID NO: 66 - protein, 1371 aa, Artificial Sequence
  SARS-CoV-2/Germany/BavPat1/2020__EPI_ISL_406862 spike protein (1-1211) LumSynth construct
MFVFLVLLPLVSSQCVNLTTRTQLPPAYTNSFTRGVYYPDKVFRSSVLHSTQDLFLPFFSNVTWFHAIHVSGTNGTKRFDNPVLPFNDGVYFASTEKSNIIRGWIFGTTLDSKTQSLLIVNNATNVVIKVCEFQFCNDPFLGVYYHKNNKSWMESEFRVYSSANNCTFEYVSQPFLMDLEGKQGNFKNLREFVFKNIDGYFKIYSKHTPINLVRDLPQGFSALEPLVDLPIGINITRFQTLLALHRSYLTPGDSSSGWTAGAAAYYVGYLQPRTFLLKYNENGTITDAVDCALDPLSETKCTLKSFTVEKGIYQTSNFRVQPTESIVRFPNITNLCPFGEVFNATRFASVYAWNRKRISNCVADYSVLYNSASFSTFKCYGVSPTKLNDLCFTNVYADSFVIRGDEVRQIAPGQTGKIADYNYKLPDDFTGCVIAWNSNNLDSKVGGNYNYLYRLFRKSNLKPFERDISTEIYQAGSTPCNGVEGFNCYFPLQSYGFQPTNGVGYQPYRVVVLSFELLHAPATVCGPKKSTNLVKNKCVNFNFNGLTGTGVLTESNKKFLPFQQFGRDIADTTDAVRDPQTLEILDITPCSFGGVSVITPGTNTSNQVAVLYQGVNCTEVPVAIHADQLTPTWRVYSTGSNVFQTRAGCLIGAEHVNNSYECDIPIGAGICASYQTQTNSPRRARSVASQSIIAYTMSLGAENSVAYSNNSIAIPTNFTISVTTEILPVSMTKTSVDCTMYICGDSTECSNLLLQYGSFCTQLNRALTGIAVEQDKNTQEVFAQVKQIYKTPPIKDFGGFNFSQILPDPSKPSKRSFIEDLLFNKVTLADAGFIKQYGDCLGDIAARDLICAQKFNGLTVLPPLLTDEMIAQYTSALLAGTITSGWTFGAGAALQIPFAMQMAYRFNGIGVTQNVLYENQKLIANQFNSAIGKIQDSLSSTASALGKLQDVVNQNAQALNTLVKQLSSNFGAISSVLNDILSRLDKVEAEVQIDRLITGRLQSLQTYVTQQLIRAAEIRASANLAATKMSECVLGQSKRVDFCGKGYHLMSFPQSAPHGVVFLHVTYVPAQEKNFTTAPAICHDGKAHFPREGVFVSNGTHWFVTQRNFYEPQIITTDNTFVSGNCDVVIGIVNNTVYDPLQPELDSFKEELDKYFKNHTSPDVDLGDISGINASVVNIQKEIDRLNEVAKNLNESLIDLQELGKYEQYIKGGGSGGGQIYEGKLTAEGLRFGIVASRFNHALVDRLVEGAIDAIVRHGGREEDITLVRVPGSWEIPVAAGELARKEDIDAVIAIGVLIRGATPHFDYIASEVSKGLADLSLELRKPITFGVITADTLEQAIERAGTKHGNKGWEAALSAIEMANLFKSLR

SEQ ID NO: 67 - protein, 1377 aa, Artificial Sequence
  SARS-CoV-2/Wuhan/WIV05/2019__EPI_ISL_402128 spike protein (1-1211) Ferritin construct
MFVFLVLLPLVSSQCVNLTTRTQLPPAYTNSFTRGVYYPDKVFRSSVLHSTQDLFLPFFSNVTWFHAIHVSGTNGTKRFDNPVLPFNDGVYFASTEKSNIIRGWIFGTTLDSKTQSLLIVNNATNVVIKVCEFQFCNDPFLGVYYHKNNKSWMESEFRVYSSANNCTFEYVSQPFLMDLEGKQGNFKNLREFVFKNIDGYFKIYSKHTPINLVRDLPQGFSALEPLVDLPIGINITRFQTLLALHRSYLTPGDSSSGWTAGAAAYYVGYLQPRTFLLKYNENGTITDAVDCALDPLSETKCTLKSFTVEKGIYQTSNFRVQPTESIVRFPNITNLCPFGEVFNATRFASVYAWNRKRISNCVADYSVLYNSASFSTFKCYGVSPTKLNDLCFTNVYADSFVIRGDEVRQIAPGQTGKIADYNYKLPDDFTGCVIAWNSNNLDSKVGGNYNYLYRLFRKSNLKPFERDISTEIYQAGSTPCNGVEGFNCYFPLQSYGFQPTNGVGYQPYRVVVLSFELLHAPATVCGPKKSTNLVKNKCVNFNFNGLTGTGVLTESNKKFLPFQQFGRDIADTTDAVRDPQTLEILDITPCSFGGVSVITPGTNTSNQVAVLYQDVNCTEVPVAIHADQLTPTWRVYSTGSNVFQTRAGCLIGAEHVNNSYECDIPIGAGICASYQTQTNSPRRARSVASQSIIAYTMSLGAENSVAYSNNSIAIPTNFTISVTTEILPVSMTKTSVDCTMYICGDSTECSNLLLQYGSFCTQLNRALTGIAVEQDKNTQEVFAQVKQIYKTPPIKDFGGFNFSQILPDPSKPSKRSFIEDLLFNKVTLADAGFIKQYGDCLGDIAARDLICAQKFNGLTVLPPLLTDEMIAQYTSALLAGTITSGWTFGAGAALQIPFAMQMAYRFNGIGVTQNVLYENQKLIANQFNSAIGKIQDSLSSTASALGKLQDVVNQNAQALNTLVKQLSSNFGAISSVLNDILSRLDKVEAEVQIDRLITGRLQSLQTYVTQQLIRAAEIRASANLAATKMSECVLGQSKRVDFCGKGYHLMSFPQSAPHGVVFLHVTYVPAQEKNFTTAPAICHDGKAHFPREGVFVSNGTHWFVTQRNFYEPQIITTDNTFVSGNCDVVIGIVNNTVYDPLQPELDSFKEELDKYFKNHTSPDVDLGDISGINASVVNIQKEIDRLNEVAKNLNESLIDLQELGKYEQYIKGGSDIIKLLNEQVNKEMQSSNLYMSMSSWCYTHSLDGAGLFLFDHAAEEYEHAKKLIIFLNENNVPVQLTSISAPEHKFEGLTQIFQKAYEHEQHISESINNIVDHAIKSKDHATFNFLQWYVAEQHEEEVLFKDILDKIELIGNENHGLYLADQYVKGIAKSRKS

SEQ ID NO: 68 - protein, 1373 aa, Artificial Sequence
  SARS-CoV-2/bat/Yunnan/RaTG13/2013__EPI_ISL_402131 spike protein (1-1207) Ferritin construct
MFVFLVLLPLVSSQCVNLTTRTQLPPAYTNSSTRGVYYPDKVFRSSVLHLTQDLFLPFFSNVTWFHAIHVSGTNGIKRFDNPVLPFNDGVYFASTEKSNIIRGWIFGTTLDSKTQSLLIVNNATNVVIKVCEFQFCNDPFLGVYYHKNNKSWMESEFRVYSSANNCTFEYVSQPFLMDLEGKQGNFKNLREFVFKNIDGYFKIYSKHTPINLVRDLPPGFSALEPLVDLPIGINITRFQTLLALHRSYLTPGDSSSGWTAGAAAYYVGYLQPRTFLLKYNENGTITDAVDCALDPLSETKCTLKSFTVEKGIYQTSNFRVQPTDSIVRFPNITNLCPFGEVFNATTFASVYAWNRKRISNCVADYSVLYNSTSFSTFKCYGVSPTKLNDLCFTNVYADSFVITGDEVRQIAPGQTGKIADYNYKLPDDFTGCVIAWNSKHIDAKEGGNFNYLYRLFRKANLKPFERDISTEIYQAGSKPCNGQTGLNCYYPLYRYGFYPTDGVGHQPYRVVVLSFELLNAPATVCGPKKSTNLVKNKCVNFNFNGLTGTGVLTESNKKFLPFQQFGRDIADTTDAVRDPQTLEILDITPCSFGGVSVITPGTNASNQVAVLYQDVNCTEVPVAIHADQLTPTWRVYSTGSNVFQTRAGCLIGAEHVNNSYECDIPIGAGICASYQTQTNSRSVASQSIIAYTMSLGAENSVAYSNNSIAIPTNFTISVTTEILPVSMTKTSVDCTMYICGDSTECSNLLLQYGSFCTQLNRALTGIAVEQDKNTQEVFAQVKQIYKTPPIKDFGGFNFSQILPDPSKPSKRSFIEDLLFNKVTLADAGFIKQYGDCLGDIAARDLICAQKFNGLTVLPPLLTDEMIAQYTSALLAGTITSGWTFGAGAALQIPFAMQMAYRFNGIGVTQNVLYENQKLIANQFNSAIGKIQDSLSSTASALGKLQDVVNQNAQALNTLVKQLSSNFGAISSVLNDILSRLDKVEAEVQIDRLITGRLQSLQTYVTQQLIRAAEIRASANLAATKMSECVLGQSKRVDFCGKGYHLMSFPQSAPHGVVFLHVTYVPAQEKNFTTAPAICHDGKAHFPREGVFVSNGTHWFVTQRNFYEPQIITTDNTFVSGSCDVVIGIVNNTVYDPLQPELDSFKEELDKYFKNHTSPDVDLGDISGINASVVNIQKEIDRLNEVAKNLNESLIDLQELGKYEQYIKGGSDIIKLLNEQVNKEMQSSNLYMSMSSWCYTHSLDGAGLFLFDHAAEEYEHAKKLIIFLNENNVPVQLTSISAPEHKFEGLTQIFQKAYEHEQHISESINNIVDHAIKSKDHATFNFLQWYVAEQHEEEVLFKDILDKIELIGNENHGLYLADQYVKGIAKSRKS

SEQ ID NO: 69 - protein, 1377 aa, Artificial Sequence
  SARS-CoV-2/Wuhan/HBCDC-HB-01/2019__EPI_ISL_402132 spike protein (1-1211) Ferritin construct
MFVFLVLLPLVSSQCVNLTTRTQLPPAYTNSITRGVYYPDKVFRSSVLHSTQDLFLPFFSNVTWFHAIHVSGTNGTKRFDNPVLPFNDGVYFASTEKSNIIRGWIFGTTLDSKTQSLLIVNNATNVVIKVCEFQFCNDPFLGVYYHKNNKSWMESEFRVYSSANNCTFEYVSQPFLMDLEGKQGNFKNLREFVFKNIDGYFKIYSKHTPINLVRDLPQGFSALEPLVDLPIGINITRFQTLLALHRSYLTPGDSSSGWTAGAAAYYVGYLQPRTFLLKYNENGTITDAVDCALDPLSETKCTLKSFTVEKGIYQTSNFRVQPTESIVRFPNITNLCPFGEVFNATRFASVYAWNRKRISNCVADYSVLYNSASFSTFKCYGVSPTKLNDLCFTNVYADSFVIRGDEVRQIAPGQTGKIADYNYKLPDDFTGCVIAWNSNNLDSKVGGNYNYLYRLFRKSNLKPFERDISTEIYQAGSTPCNGVEGFNCYFPLQSYGFQPTNGVGYQPYRVVVLSFELLHAPATVCGPKKSTNLVKNKCVNFNFNGLTGTGVLTESNKKFLPFQQFGRDIADTTDAVRDPQTLEILDITPCSFGGVSVITPGTNTSNQVAVLYQDVNCTEVPVAIHADQLTPTWRVYSTGSNVFQTRAGCLIGAEHVNNSYECDIPIGAGICASYQTQTNSPRRARSVASQSIIAYTMSLGAENSVAYSNNSIAIPTNFTISVTTEILPVSMTKTSVDCTMYICGDSTECSNLLLQYGSFCTQLNRALTGIAVEQDKNTQEVFAQVKQIYKTPPIKDFGGFNFSQILPDPSKPSKRSFIEDLLFNKVTLADAGFIKQYGDCLGDIAARDLICAQKFNGLTVLPPLLTDEMIAQYTSALLAGTITSGWTFGAGAALQIPFAMQMAYRFNGIGVTQNVLYENQKLIANQFNSAIGKIQDSLSSTASALGKLQDVVNQNAQALNTLVKQLSSNFGAISSVLNDILSRLDKVEAEVQIDRLITGRLQSLQTYVTQQLIRAAEIRASANLAATKMSECVLGQSKRVDFCGKGYHLMSFPQSAPHGVVFLHVTYVPAQEKNFTTAPAICHDGKAHFPREGVFVSNGTHWFVTQRNFYEPQIITTDNTFVSGNCDVVIGIVNNTVYDPLQPELDSFKEELDKYFKNHTSPDVDLGDISGINASVVNIQKEIDRLNEVAKNLNESLIDLQELGKYEQYIKGGSDIIKLLNEQVNKEMQSSNLYMSMSSWCYTHSLDGAGLFLFDHAAEEYEHAKKLIIFLNENNVPVQLTSISAPEHKFEGLTQIFQKAYEHEQHISESINNIVDHAIKSKDHATFNFLQWYVAEQHEEEVLFKDILDKIELIGNENHGLYLADQYVKGIAKSRKS

SEQ ID NO: 70 - protein, 1377 aa, Artificial Sequence
  SARS-CoV-2/Guangdong/20SF028/2020__EPI_ISL_403936 spike protein (1-1211) Ferritin construct
MFVFLVLLPLVSSQCVNLTTRTQLPPAYTNSFTRGVYYPDKVFRSSVLYSTQDLFLPFFSNVTWFHAIHVSGTNGTKRFDNPVLPFNDGVYFASTEKSNIIRGWIFGTTLDSKTQSLLIVNNATNVVIKVCEFQFCNDPFLGVYYHKNNKSWMESEFRVYSSANNCTFEYVSQPFLMDLEGKQGNFKNLREFVFKNIDGYFKIYSKHTPINLVRDLPQGFSALEPLVDLPIGINITRFQTLLALHRSYLTPGDSSSGWTAGAAAYYVGYLQPRTFLLKYNENGTITDAVDCALDPLSETKCTLKSFTVEKGIYQTSNFRVQPTESIVRFPNITNLCPFGEVFNATRFASVYAWNRKRISNCVADYSVLYNSASFSTFKCYGVSPTKLNDLCFTNVYADSFVIRGDEVRQIAPGQTGKIADYNYKLPDDFTGCVIAWNSNNLDSKVGGNYNYLYRLFRKSNLKPFERDISTEIYQAGSTPCNGVEGFNCYFPLQSYGFQPTNGVGYQPYRVVVLSFELLHAPATVCGPKKSTNLVKNKCVNFNFNGLTGTGVLTESNKKFLPFQQFGRDIADTTDAVRDPQTLEILDITPCSFGGVSVITPGTNTSNQVAVLYQDVNCTEVPVAIHADQLTPTWRVYSTGSNVFQTRAGCLIGAEHVNNSYECDIPIGAGICASYQTQTNSPRRARSVASQSIIAYTMSLGAENSVAYSNNSIAIPTNFTISVTTEILPVSMTKTSVDCTMYICGDSTECSNLLLQYGSFCTQLNRALTGIAVEQDKNTQEVFAQVKQIYKTPPIKDFGGFNFSQILPDPSKPSKRSFIEDLLFNKVTLADAGFIKQYGDCLGDIAARDLICAQKFNGLTVLPPLLTDEMIAQYTSALLAGTITSGWTFGAGAALQIPFAMQMAYRFNGIGVTQNVLYENQKLIANQFNSAIGKIQDSLSSTASALGKLQDVVNQNAQALNTLVKQLSSNFGAISSVLNDILSRLDKVEAEVQIDRLITGRLQSLQTYVTQQLIRAAEIRASANLAATKMSECVLGQSKRVDFCGKGYHLMSFPQSAPHGVVFLHVTYVPAQEKNFTTAPAICHDGKAHFPREGVFVSNGTHWFVTQRNFYEPQIITTDNTFVSGNCDVVIGIVNNTVYDPLQPELDSFKEELDKYFKNHTSPDVDLGDISGINASVVNIQKEIDRLNEVAKNLNESLIDLQELGKYEQYIKGGSDIIKLLNEQVNKEMQSSNLYMSMSSWCYTHSLDGAGLFLFDHAAEEYEHAKKLIIFLNENNVPVQLTSISAPEHKFEGLTQIFQKAYEHEQHISESINNIVDHAIKSKDHATFNFLQWYVAEQHEEEVLFKDILDKIELIGNENHGLYLADQYVKGIAKSRKS

SEQ ID NO: 71 - protein, 1377 aa, Artificial Sequence
  SARS-CoV-2/Shenzhen/SZTH-001/2020__EPI_ISL_406592 spike protein (1-1211) Ferritin construct
MFVFLVLLPLVSSQCVNLTTRTQLPPAYTNSFTRGVYYPDKVFRSSVLHSTQDLFLPFFSNVTWFHAIHVSGTNGTKRFDNPVLPFNDGVYFASTEKSNIIRGWIFGTTLDSKTQSLLIVNNATNVVIKVCEFQFCNDPFLGVYYHKNNKSWMESEFRVYSSANNCTFEYVSQPFLMDLEGKQGNFKNLREFVFKNIDGYFKIYSKHTPINLVRDLPQGFSALEPLVDLPIGINITRFQTLLALHRSYLTPGDSSSGWTAGAAAYYVGYLQPRTFLLKYNENGTITDAVDCALDPLSETKCTLKSFTVEKGIYQTSNFRVQPTESIVRFPNITNLCPFGEVFNATRFASVYAWNRKRISNCVADYSVLYNSASFSTFKCYGVSPTKLNDLCFTNVYADSFVIRGDEVRQIAPGQTGKIADYNYKLPDDFTGCVIAWNSNNLDSKVGGNYNYLYRLFRKSNLKPFERDISTEIYQAGSTPCNGVEGFNCYFPLQSYGFQPTNGVGYQPYRVVVLSFELLHAPATVCGPKKSTNLVKNKCVNFNFNGLTGTGVLTESNKKFLPFQQFGRDIADTTDAVRDPQTLEILDITPCSFGGVSVITPGTNTSNQVAVLYQDVNCTEVPVAIHADQLTPTWRVYSTGSNVFQTRAGCLIGAEHVNNSYECDIPIGAGICASYQTQTNSPRRARSVASQSIIAYTMSLGAENSVAYSNNSIAIPTNFTISVTTEILPVSMTKTSVDCTMYICGDSTECSNLLLQYGSFCTQLNRALTGIAVEQDKNTQEVFAQVKQIYKTPPIKDFGGFNFSQILPDPSKPSKRSFIEDLLFNKVTLADAGFIKQYGDCLGDIAARDLICAQKFNGLTVLPPLLTDEMIAQYTSALLAGTITSGWTFGAGAALQIPFAMQMAYRFNGIGVTQNVLYENQKLIANQFNSAIGKIQDSLSSTASALGKLQDVVNQNAQALNTLVKQLSSNFGAISSVLNDILSRLDKVEAEVQIDRLITGRLQSLQTYVTQQLIRAAEIRASANLAATKMSECVLGQSKRVDFCGKGYHLMSFPQSAPHGVVFLHVTYVPAQEKNFTTAPAICHDGKAHFPREGVFVSNGTHWFVTQRNFYEPQIITTDNTFVSGNCDVLIGIVNNTVYDPLQPELDSFKEELDKYFKNHTSPDVDLGDISGINASVVNIQKEIDRLNEVAKNLNESLIDLQELGKYEQYIKGGSDIIKLLNEQVNKEMQSSNLYMSMSSWCYTHSLDGAGLFLFDHAAEEYEHAKKLIIFLNENNVPVQLTSISAPEHKFEGLTQIFQKAYEHEQHISESINNIVDHAIKSKDHATFNFLQWYVAEQHEEEVLFKDILDKIELIGNENHGLYLADQYVKGIAKSRKS

SEQ ID NO: 72 - protein, 1377 aa, Artificial Sequence
  SARS-CoV-2/Shenzhen/SZTH-004/2020__EPI_ISL_406595 spike protein (1-1211) Ferritin construct
MFVFLVLLPLVSSQCVNLTTRTQLPPAYTNSFTRGVYYPDKVFRSSVLHSTQDLFLPFFSNVTWFHAIHVSGTNGTKRFDNPVLPFNDGVYFASTEKSNIIRGWIFGTTLDSKTQSLLIVNNATNVVIKVCEFQFCNDPFLGVYYHKNNKSWMESEFRVYSSANNCTFEYVSQPFLMDLEGKQGNFKNLREFVFKNIDGYFKIYSKHTPINLVRDLPQGFSALEPLVDLPIGINITRFQTLLALHRSYLTPGDSSSGWTAGAAAYYVGYLQPRTFLLKYNENGTITDAVDCALDPLSETKCTLKSFTVEKGIYQTSNFRVQPTESIVRFPNITNLCPFGEVFNATRFASVYAWDRKRISNCVAYYSVLYNSASFSTFKCYGVSPTKLNDLCFTNVYADSFVIRGDEVRQIAPGQTGKIADYNYKLPDDFTGCVIAWNSNNLDSKVGGNYNYLYRLFRKSNLKPFERDISTEIYQAGSTPCNGVEGFNCYFPLQSYGFQPTNGVGYQPYRVVVLSFELLHAPATVCGPKKSTNLVKNKCVNFNFNGLTGTGVLTESNKKFLPFQQFGRDIADTTDAVRDPQTLEILDITPCSFGGVSVITPGTNTSNQVAVLYQDVNCTEVPVAIHADQLTPTWRVYSTGSNVFQTRAGCLIGAEHVNNSYECDIPIGAGICASYQTQTNSPRRARSVASQSIIAYTMSLGAENSVAYSNNSIAIPTNFTISVTTEILPVSMTKTSVDCTMYICGDSTECSNLLLQYGSFCTQLNRALTGIAVEQDKNTQEVFAQVKQIYKTPPIKDFGGFNFSQILPDPSKPSKRSFIEDLLFNKVTLADAGFIKQYGDCLGDIAARDLICAQKFNGLTVLPPLLTDEMIAQYTSALLAGTITSGWTFGAGAALQIPFAMQMAYRFNGIGVTQNVLYENQKLIANQFNSAIGKIQDSLSSTASALGKLQDVVNQNAQALNTLVKQLSSNFGAISSVLNDILSRLDKVEAEVQIDRLITGRLQSLQTYVTQQLIRAAEIRASANLAATKMSECVLGQSKRVDFCGKGYHLMSFPQSAPHGVVFLHVTYVPAQEKNFTTAPAICHDGKAHFPREGVFVSNGTHWFVTQRNFYEPQIITTDNTFVSGNCDVVIGIVNNTVYDPLQPELDSFKEELDKYFKNHTSPDVDLGDISGINASVVNIQKEIDRLNEVAKNLNESLIDLQELGKYEQYIKGGSDIIKLLNEQVNKEMQSSNLYMSMSSWCYTHSLDGAGLFLFDHAAEEYEHAKKLIIFLNENNVPVQLTSISAPEHKFEGLTQIFQKAYEHEQHISESINNIVDHAIKSKDHATFNFLQWYVAEQHEEEVLFKDILDKIELIGNENHGLYLADQYVKGIAKSRKS

SEQ ID NO: 73 - protein, 1377 aa, Artificial Sequence
  SARS-CoV-2/France/IDF0372/2020__EPI_ISL_406596 spike protein (1-1211) Ferritin construct
MFVFLVLLPLVSSQCVNLTTRTQLPPAYTNSFTRGVYYPDKVFRSSVLHSTQDLFLPFFSNVTWFHAIHVSGTNGTKRFDNPVLPFNDGVYFASTEKSNIIRGWIFGTTLDSKTQSLLIVNNATNVVIKVCEFQFCNDPFLGVYYHKNNKSWMESEFRVYSSANNCTFEYVSQPFLMDLEGKQGNFKNLREFVFKNIDGYFKIYSKHTPINLVRDLPQGFSALEPLVDLPIGINITRFQTLLALHRSYLTPGDSSSGWTAGAAAYYVGYLQPRTFLLKYNENGTITDAVDCALDPLSETKCTLKSFTVEKGIYQTSNFRVQPTESIVRFPNITNLCPFGEVFNATRFASVYAWNRKRISNCVADYSFLYNSASFSTFKCYGVSPTKLNDLCFTNVYADSFVIRGDEVRQIAPGQTGKIADYNYKLPDDFTGCVIAWNSNNLDSKVGGNYNYLYRLFRKSNLKPFERDISTEIYQAGSTPCNGVEGFNCYFPLQSYGFQPTNGVGYQPYRVVVLSFELLHAPATVCGPKKSTNLVKNKCVNFNFNGLTGTGVLTESNKKFLPFQQFGRDIADTTDAVRDPQTLEILDITPCSFGGVSVITPGTNTSNQVAVLYQDVNCTEVPVAIHADQLTPTWRVYSTGSNVFQTRAGCLIGAEHVNNSYECDIPIGAGICASYQTQTNSPRRARSVASQSIIAYTMSLGAENSVAYSNNSIAIPTNFTISVTTEILPVSMTKTSVDCTMYICGDSTECSNLLLQYGSFCTQLNRALTGIAVEQDKNTQEVFAQVKQIYKTPPIKDFGGFNFSQILPDPSKPSKRSFIEDLLFNKVTLADAGFIKQYGDCLGDIAARDLICAQKFNGLTVLPPLLTDEMIAQYTSALLAGTITSGWTFGAGAALQIPFAMQMAYRFNGIGVTQNVLYENQKLIANQFNSAIGKIQDSLSSTASALGKLQDVVNQNAQALNTLVKQLSSNFGAISSVLNDILSRLDKVEAEVQIDRLITGRLQSLQTYVTQQLIRAAEIRASANLAATKMSECVLGQSKRVDFCGKGYHLMSFPQSAPHGVVFLHVTYVPAQEKNFTTAPAICHDGKAHFPREGVFVSNGTHWFVTQRNFYEPQIITTDNTFVSGNCDVVIGIVNNTVYDPLQPELDSFKEELDKYFKNHTSPDVDLGDISGINASVVNIQKEIDRLNEVAKNLNESLIDLQELGKYEQYIKGGSDIIKLLNEQVNKEMQSSNLYMSMSSWCYTHSLDGAGLFLFDHAAEEYEHAKKLIIFLNENNVPVQLTSISAPEHKFEGLTQIFQKAYEHEQHISESINNIVDHAIKSKDHATFNFLQWYVAEQHEEEVLFKDILDKIELIGNENHGLYLADQYVKGIAKSRKS

SEQ ID NO: 74 - protein, 1377 aa, Artificial Sequence
  SARS-CoV-2/Australia/VIC01/2020__EPI_ISL_406844 spike protein (1-1211) Ferritin construct
MFVFLVLLPLVSSQCVNLTTRTQLPPAYTNSFTRGVYYPDKVFRSSVLHSTQDLFLPFFSNVTWFHAIHVSGTNGTKRFDNPVLPFNDGVYFASTEKSNIIRGWIFGTTLDSKTQSLLIVNNATNVVIKVCEFQFCNDPFLGVYYHKNNKSWMESEFRVYSSANNCTFEYVSQPFLMDLEGKQGNFKNLREFVFKNIDGYFKIYSKHTPINLVRDLPQGFSALEPLVDLPIGINITRFQTLLALHRRYLTPGDSSSGWTAGAAAYYVGYLQPRTFLLKYNENGTITDAVDCALDPLSETKCTLKSFTVEKGIYQTSNFRVQPTESIVRFPNITNLCPFGEVFNATRFASVYAWNRKRISNCVADYSVLYNSASFSTFKCYGVSPTKLNDLCFTNVYADSFVIRGDEVRQIAPGQTGKIADYNYKLPDDFTGCVIAWNSNNLDSKVGGNYNYLYRLFRKSNLKPFERDISTEIYQAGSTPCNGVEGFNCYFPLQSYGFQPTNGVGYQPYRVVVLSFELLHAPATVCGPKKSTNLVKNKCVNFNFNGLTGTGVLTESNKKFLPFQQFGRDIADTTDAVRDPQTLEILDITPCSFGGVSVITPGTNTSNQVAVLYQDVNCTEVPVAIHADQLTPTWRVYSTGSNVFQTRAGCLIGAEHVNNSYECDIPIGAGICASYQTQTNSPRRARSVASQSIIAYTMSLGAENSVAYSNNSIAIPTNFTISVTTEILPVSMTKTSVDCTMYICGDSTECSNLLLQYGSFCTQLNRALTGIAVEQDKNTQEVFAQVKQIYKTPPIKDFGGFNFSQILPDPSKPSKRSFIEDLLFNKVTLADAGFIKQYGDCLGDIAARDLICAQKFNGLTVLPPLLTDEMIAQYTSALLAGTITSGWTFGAGAALQIPFAMQMAYRFNGIGVTQNVLYENQKLIANQFNSAIGKIQDSLSSTASALGKLQDVVNQNAQALNTLVKQLSSNFGAISSVLNDILSRLDKVEAEVQIDRLITGRLQSLQTYVTQQLIRAAEIRASANLAATKMSECVLGQSKRVDFCGKGYHLMSFPQSAPHGVVFLHVTYVPAQEKNFTTAPAICHDGKAHFPREGVFVSNGTHWFVTQRNFYEPQIITTDNTFVSGNCDVVIGIVNNTVYDPLQPELDSFKEELDKYFKNHTSPDVDLGDISGINASVVNIQKEIDRLNEVAKNLNESLIDLQELGKYEQYIKGGSDIIKLLNEQVNKEMQSSNLYMSMSSWCYTHSLDGAGLFLFDHAAEEYEHAKKLIIFLNENNVPVQLTSISAPEHKFEGLTQIFQKAYEHEQHISESINNIVDHAIKSKDHATFNFLQWYVAEQHEEEVLFKDILDKIELIGNENHGLYLADQYVKGIAKSRKS

SEQ ID NO: 75 - protein, 1377 aa, Artificial Sequence
  SARS-CoV-2/Germany/BavPat1/2020__EPI_ISL_406862 spike protein (1-1211) Ferritin construct
MFVFLVLLPLVSSQCVNLTTRTQLPPAYTNSFTRGVYYPDKVFRSSVLHSTQDLFLPFFSNVTWFHAIHVSGTNGTKRFDNPVLPFNDGVYFASTEKSNIIRGWIFGTTLDSKTQSLLIVNNATNVVIKVCEFQFCNDPFLGVYYHKNNKSWMESEFRVYSSANNCTFEYVSQPFLMDLEGKQGNFKNLREFVFKNIDGYFKIYSKHTPINLVRDLPQGFSALEPLVDLPIGINITRFQTLLALHRSYLTPGDSSSGWTAGAAAYYVGYLQPRTFLLKYNENGTITDAVDCALDPLSETKCTLKSFTVEKGIYQTSNFRVQPTESIVRFPNITNLCPFGEVFNATRFASVYAWNRKRISNCVADYSVLYNSASFSTFKCYGVSPTKLNDLCFTNVYADSFVIRGDEVRQIAPGQTGKIADYNYKLPDDFTGCVIAWNSNNLDSKVGGNYNYLYRLFRKSNLKPFERDISTEIYQAGSTPCNGVEGFNCYFPLQSYGFQPTNGVGYQPYRVVVLSFELLHAPATVCGPKKSTNLVKNKCVNFNFNGLTGTGVLTESNKKFLPFQQFGRDIADTTDAVRDPQTLEILDITPCSFGGVSVITPGTNTSNQVAVLYQGVNCTEVPVAIHADQLTPTWRVYSTGSNVFQTRAGCLIGAEHVNNSYECDIPIGAGICASYQTQTNSPRRARSVASQSIIAYTMSLGAENSVAYSNNSIAIPTNFTISVTTEILPVSMTKTSVDCTMYICGDSTECSNLLLQYGSFCTQLNRALTGIAVEQDKNTQEVFAQVKQIYKTPPIKDFGGFNFSQILPDPSKPSKRSFIEDLLFNKVTLADAGFIKQYGDCLGDIAARDLICAQKFNGLTVLPPLLTDEMIAQYTSALLAGTITSGWTFGAGAALQIPFAMQMAYRFNGIGVTQNVLYENQKLIANQFNSAIGKIQDSLSSTASALGKLQDVVNQNAQALNTLVKQLSSNFGAISSVLNDILSRLDKVEAEVQIDRLITGRLQSLQTYVTQQLIRAAEIRASANLAATKMSECVLGQSKRVDFCGKGYHLMSFPQSAPHGVVFLHVTYVPAQEKNFTTAPAICHDGKAHFPREGVFVSNGTHWFVTQRNFYEPQIITTDNTFVSGNCDVVIGIVNNTVYDPLQPELDSFKEELDKYFKNHTSPDVDLGDISGINASVVNIQKEIDRLNEVAKNLNESLIDLQELGKYEQYIKGGSDIIKLLNEQVNKEMQSSNLYMSMSSWCYTHSLDGAGLFLFDHAAEEYEHAKKLIIFLNENNVPVQLTSISAPEHKFEGLTQIFQKAYEHEQHISESINNIVDHAIKSKDHATFNFLQWYVAEQHEEEVLFKDILDKIELIGNENHGLYLADQYVKGIAKSRKS

SEQ ID NO: 76 - protein, 1241 aa, Artificial Sequence
  SARS-CoV-2/Wuhan/WIV05/2019__EPI_ISL_402128 spike protein (1-1211) Foldon construct
MFVFLVLLPLVSSQCVNLTTRTQLPPAYTNSFTRGVYYPDKVFRSSVLHSTQDLFLPFFSNVTWFHAIHVSGTNGTKRFDNPVLPFNDGVYFASTEKSNIIRGWIFGTTLDSKTQSLLIVNNATNVVIKVCEFQFCNDPFLGVYYHKNNKSWMESEFRVYSSANNCTFEYVSQPFLMDLEGKQGNFKNLREFVFKNIDGYFKIYSKHTPINLVRDLPQGFSALEPLVDLPIGINITRFQTLLALHRSYLTPGDSSSGWTAGAAAYYVGYLQPRTFLLKYNENGTITDAVDCALDPLSETKCTLKSFTVEKGIYQTSNFRVQPTESIVRFPNITNLCPFGEVFNATRFASVYAWNRKRISNCVADYSVLYNSASFSTFKCYGVSPTKLNDLCFTNVYADSFVIRGDEVRQIAPGQTGKIADYNYKLPDDFTGCVIAWNSNNLDSKVGGNYNYLYRLFRKSNLKPFERDISTEIYQAGSTPCNGVEGFNCYFPLQSYGFQPTNGVGYQPYRVVVLSFELLHAPATVCGPKKSTNLVKNKCVNFNFNGLTGTGVLTESNKKFLPFQQFGRDIADTTDAVRDPQTLEILDITPCSFGGVSVITPGTNTSNQVAVLYQDVNCTEVPVAIHADQLTPTWRVYSTGSNVFQTRAGCLIGAEHVNNSYECDIPIGAGICASYQTQTNSPRRARSVASQSIIAYTMSLGAENSVAYSNNSIAIPTNFTISVTTEILPVSMTKTSVDCTMYICGDSTECSNLLLQYGSFCTQLNRALTGIAVEQDKNTQEVFAQVKQIYKTPPIKDFGGFNFSQILPDPSKPSKRSFIEDLLFNKVTLADAGFIKQYGDCLGDIAARDLICAQKFNGLTVLPPLLTDEMIAQYTSALLAGTITSGWTFGAGAALQIPFAMQMAYRFNGIGVTQNVLYENQKLIANQFNSAIGKIQDSLSSTASALGKLQDVVNQNAQALNTLVKQLSSNFGAISSVLNDILSRLDKVEAEVQIDRLITGRLQSLQTYVTQQLIRAAEIRASANLAATKMSECVLGQSKRVDFCGKGYHLMSFPQSAPHGVVFLHVTYVPAQEKNFTTAPAICHDGKAHFPREGVFVSNGTHWFVTQRNFYEPQIITTDNTFVSGNCDVVIGIVNNTVYDPLQPELDSFKEELDKYFKNHTSPDVDLGDISGINASVVNIQKEIDRLNEVAKNLNESLIDLQELGKYEQYIKGGSGYIPEAPRDGQAYVRKDGEWVLLSTFL

SEQ ID NO: 77 - protein, 1237 aa, Artificial Sequence
  SARS-CoV-2/bat/Yunnan/RaTG13/2013__EPI_ISL_402131 spike protein (1-1207) Foldon construct
MFVFLVLLPLVSSQCVNLTTRTQLPPAYTNSSTRGVYYPDKVFRSSVLHLTQDLFLPFFSNVTWFHAIHVSGTNGIKRFDNPVLPFNDGVYFASTEKSNIIRGWIFGTTLDSKTQSLLIVNNATNVVIKVCEFQFCNDPFLGVYYHKNNKSWMESEFRVYSSANNCTFEYVSQPFLMDLEGKQGNFKNLREFVFKNIDGYFKIYSKHTPINLVRDLPPGFSALEPLVDLPIGINITRFQTLLALHRSYLTPGDSSSGWTAGAAAYYVGYLQPRTFLLKYNENGTITDAVDCALDPLSETKCTLKSFTVEKGIYQTSNFRVQPTDSIVRFPNITNLCPFGEVFNATTFASVYAWNRKRISNCVADYSVLYNSTSFSTFKCYGVSPTKLNDLCFTNVYADSFVITGDEVRQIAPGQTGKIADYNYKLPDDFTGCVIAWNSKHIDAKEGGNFNYLYRLFRKANLKPFERDISTEIYQAGSKPCNGQTGLNCYYPLYRYGFYPTDGVGHQPYRVVVLSFELLNAPATVCGPKKSTNLVKNKCVNFNFNGLTGTGVLTESNKKFLPFQQFGRDIADTTDAVRDPQTLEILDITPCSFGGVSVITPGTNASNQVAVLYQDVNCTEVPVAIHADQLTPTWRVYSTGSNVFQTRAGCLIGAEHVNNSYECDIPIGAGICASYQTQTNSRSVASQSIIAYTMSLGAENSVAYSNNSIAIPTNFTISVTTEILPVSMTKTSVDCTMYICGDSTECSNLLLQYGSFCTQLNRALTGIAVEQDKNTQEVFAQVKQIYKTPPIKDFGGFNFSQILPDPSKPSKRSFIEDLLFNKVTLADAGFIKQYGDCLGDIAARDLICAQKFNGLTVLPPLLTDEMIAQYTSALLAGTITSGWTFGAGAALQIPFAMQMAYRFNGIGVTQNVLYENQKLIANQFNSAIGKIQDSLSSTASALGKLQDVVNQNAQALNTLVKQLSSNFGAISSVLNDILSRLDKVEAEVQIDRLITGRLQSLQTYVTQQLIRAAEIRASANLAATKMSECVLGQSKRVDFCGKGYHLMSFPQSAPHGVVFLHVTYVPAQEKNFTTAPAICHDGKAHFPREGVFVSNGTHWFVTQRNFYEPQIITTDNTFVSGSCDVVIGIVNNTVYDPLQPELDSFKEELDKYFKNHTSPDVDLGDISGINASVVNIQKEIDRLNEVAKNLNESLIDLQELGKYEQYIKGGSGYIPEAPRDGQAYVRKDGEWVLLSTFL

SEQ ID NO: 78 - protein, 1241 aa, Artificial Sequence
  SARS-CoV-2/Wuhan/HBCDC-HB-01/2019__EPI_ISL_402132 spike protein (1-1211) Foldon construct
MFVFLVLLPLVSSQCVNLTTRTQLPPAYTNSITRGVYYPDKVFRSSVLHSTQDLFLPFFSNVTWFHAIHVSGTNGTKRFDNPVLPFNDGVYFASTEKSNIIRGWIFGTTLDSKTQSLLIVNNATNVVIKVCEFQFCNDPFLGVYYHKNNKSWMESEFRVYSSANNCTFEYVSQPFLMDLEGKQGNFKNLREFVFKNIDGYFKIYSKHTPINLVRDLPQGFSALEPLVDLPIGINITRFQTLLALHRSYLTPGDSSSGWTAGAAAYYVGYLQPRTFLLKYNENGTITDAVDCALDPLSETKCTLKSFTVEKGIYQTSNFRVQPTESIVRFPNITNLCPFGEVFNATRFASVYAWNRKRISNCVADYSVLYNSASFSTFKCYGVSPTKLNDLCFTNVYADSFVIRGDEVRQIAPGQTGKIADYNYKLPDDFTGCVIAWNSNNLDSKVGGNYNYLYRLFRKSNLKPFERDISTEIYQAGSTPCNGVEGFNCYFPLQSYGFQPTNGVGYQPYRVVVLSFELLHAPATVCGPKKSTNLVKNKCVNFNFNGLTGTGVLTESNKKFLPFQQFGRDIADTTDAVRDPQTLEILDITPCSFGGVSVITPGTNTSNQVAVLYQDVNCTEVPVAIHADQLTPTWRVYSTGSNVFQTRAGCLIGAEHVNNSYECDIPIGAGICASYQTQTNSPRRARSVASQSIIAYTMSLGAENSVAYSNNSIAIPTNFTISVTTEILPVSMTKTSVDCTMYICGDSTECSNLLLQYGSFCTQLNRALTGIAVEQDKNTQEVFAQVKQIYKTPPIKDFGGFNFSQILPDPSKPSKRSFIEDLLFNKVTLADAGFIKQYGDCLGDIAARDLICAQKFNGLTVLPPLLTDEMIAQYTSALLAGTITSGWTFGAGAALQIPFAMQMAYRFNGIGVTQNVLYENQKLIANQFNSAIGKIQDSLSSTASALGKLQDVVNQNAQALNTLVKQLSSNFGAISSVLNDILSRLDKVEAEVQIDRLITGRLQSLQTYVTQQLIRAAEIRASANLAATKMSECVLGQSKRVDFCGKGYHLMSFPQSAPHGVVFLHVTYVPAQEKNFTTAPAICHDGKAHFPREGVFVSNGTHWFVTQRNFYEPQIITTDNTFVSGNCDVVIGIVNNTVYDPLQPELDSFKEELDKYFKNHTSPDVDLGDISGINASVVNIQKEIDRLNEVAKNLNESLIDLQELGKYEQYIKGGSGYIPEAPRDGQAYVRKDGEWVLLSTFL

SEQ ID NO: 79 - protein, 1241 aa, Artificial Sequence
  SARS-CoV-2/Guangdong/20SF028/2020__EPI_ISL_403936 spike protein (1-1211) Foldon construct
MFVFLVLLPLVSSQCVNLTTRTQLPPAYTNSFTRGVYYPDKVFRSSVLYSTQDLFLPFFSNVTWFHAIHVSGTNGTKRFDNPVLPFNDGVYFASTEKSNIIRGWIFGTTLDSKTQSLLIVNNATNVVIKVCEFQFCNDPFLGVYYHKNNKSWMESEFRVYSSANNCTFEYVSQPFLMDLEGKQGNFKNLREFVFKNIDGYFKIYSKHTPINLVRDLPQGFSALEPLVDLPIGINITRFQTLLALHRSYLTPGDSSSGWTAGAAAYYVGYLQPRTFLLKYNENGTITDAVDCALDPLSETKCTLKSFTVEKGIYQTSNFRVQPTESIVRFPNITNLCPFGEVFNATRFASVYAWNRKRISNCVADYSVLYNSASFSTFKCYGVSPTKLNDLCFTNVYADSFVIRGDEVRQIAPGQTGKIADYNYKLPDDFTGCVIAWNSNNLDSKVGGNYNYLYRLFRKSNLKPFERDISTEIYQAGSTPCNGVEGFNCYFPLQSYGFQPTNGVGYQPYRVVVLSFELLHAPATVCGPKKSTNLVKNKCVNFNFNGLTGTGVLTESNKKFLPFQQFGRDIADTTDAVRDPQTLEILDITPCSFGGVSVITPGTNTSNQVAVLYQDVNCTEVPVAIHADQLTPTWRVYSTGSNVFQTRAGCLIGAEHVNNSYECDIPIGAGICASYQTQTNSPRRARSVASQSIIAYTMSLGAENSVAYSNNSIAIPTNFTISVTTEILPVSMTKTSVDCTMYICGDSTECSNLLLQYGSFCTQLNRALTGIAVEQDKNTQEVFAQVKQIYKTPPIKDFGGFNFSQILPDPSKPSKRSFIEDLLFNKVTLADAGFIKQYGDCLGDIAARDLICAQKFNGLTVLPPLLTDEMIAQYTSALLAGTITSGWTFGAGAALQIPFAMQMAYRFNGIGVTQNVLYENQKLIANQFNSAIGKIQDSLSSTASALGKLQDVVNQNAQALNTLVKQLSSNFGAISSVLNDILSRLDKVEAEVQIDRLITGRLQSLQTYVTQQLIRAAEIRASANLAATKMSECVLGQSKRVDFCGKGYHLMSFPQSAPHGVVFLHVTYVPAQEKNFTTAPAICHDGKAHFPREGVFVSNGTHWFVTQRNFYEPQIITTDNTFVSGNCDVVIGIVNNTVYDPLQPELDSFKEELDKYFKNHTSPDVDLGDISGINASVVNIQKEIDRLNEVAKNLNESLIDLQELGKYEQYIKGGSGYIPEAPRDGQAYVRKDGEWVLLSTFL

SEQ ID NO: 80 - protein, 1241 aa, Artificial Sequence
  SARS-CoV-2/Shenzhen/SZTH-001/2020__EPI_ISL_406592 spike protein (1-1211) Foldon construct
MFVFLVLLPLVSSQCVNLTTRTQLPPAYTNSFTRGVYYPDKVFRSSVLHSTQDLFLPFFSNVTWFHAIHVSGTNGTKRFDNPVLPFNDGVYFASTEKSNIIRGWIFGTTLDSKTQSLLIVNNATNVVIKVCEFQFCNDPFLGVYYHKNNKSWMESEFRVYSSANNCTFEYVSQPFLMDLEGKQGNFKNLREFVFKNIDGYFKIYSKHTPINLVRDLPQGFSALEPLVDLPIGINITRFQTLLALHRSYLTPGDSSSGWTAGAAAYYVGYLQPRTFLLKYNENGTITDAVDCALDPLSETKCTLKSFTVEKGIYQTSNFRVQPTESIVRFPNITNLCPFGEVFNATRFASVYAWNRKRISNCVADYSVLYNSASFSTFKCYGVSPTKLNDLCFTNVYADSFVIRGDEVRQIAPGQTGKIADYNYKLPDDFTGCVIAWNSNNLDSKVGGNYNYLYRLFRKSNLKPFERDISTEIYQAGSTPCNGVEGFNCYFPLQSYGFQPTNGVGYQPYRVVVLSFELLHAPATVCGPKKSTNLVKNKCVNFNFNGLTGTGVLTESNKKFLPFQQFGRDIADTTDAVRDPQTLEILDITPCSFGGVSVITPGTNTSNQVAVLYQDVNCTEVPVAIHADQLTPTWRVYSTGSNVFQTRAGCLIGAEHVNNSYECDIPIGAGICASYQTQTNSPRRARSVASQSIIAYTMSLGAENSVAYSNNSIAIPTNFTISVTTEILPVSMTKTSVDCTMYICGDSTECSNLLLQYGSFCTQLNRALTGIAVEQDKNTQEVFAQVKQIYKTPPIKDFGGFNFSQILPDPSKPSKRSFIEDLLFNKVTLADAGFIKQYGDCLGDIAARDLICAQKFNGLTVLPPLLTDEMIAQYTSALLAGTITSGWTFGAGAALQIPFAMQMAYRFNGIGVTQNVLYENQKLIANQFNSAIGKIQDSLSSTASALGKLQDVVNQNAQALNTLVKQLSSNFGAISSVLNDILSRLDKVEAEVQIDRLITGRLQSLQTYVTQQLIRAAEIRASANLAATKMSECVLGQSKRVDFCGKGYHLMSFPQSAPHGVVFLHVTYVPAQEKNFTTAPAICHDGKAHFPREGVFVSNGTHWFVTQRNFYEPQIITTDNTFVSGNCDVLIGIVNNTVYDPLQPELDSFKEELDKYFKNHTSPDVDLGDISGINASVVNIQKEIDRLNEVAKNLNESLIDLQELGKYEQYIKGGSGYIPEAPRDGQAYVRKDGEWVLLSTFL

SEQ ID NO: 81 - protein, 1241 aa, Artificial Sequence
  SARS-CoV-2/Shenzhen/SZTH-004/2020__EPI_ISL_406595 spike protein (1-1211) Foldon construct
MFVFLVLLPLVSSQCVNLTTRTQLPPAYTNSFTRGVYYPDKVFRSSVLHSTQDLFLPFFSNVTWFHAIHVSGTNGTKRFDNPVLPFNDGVYFASTEKSNIIRGWIFGTTLDSKTQSLLIVNNATNVVIKVCEFQFCNDPFLGVYYHKNNKSWMESEFRVYSSANNCTFEYVSQPFLMDLEGKQGNFKNLREFVFKNIDGYFKIYSKHTPINLVRDLPQGFSALEPLVDLPIGINITRFQTLLALHRSYLTPGDSSSGWTAGAAAYYVGYLQPRTFLLKYNENGTITDAVDCALDPLSETKCTLKSFTVEKGIYQTSNFRVQPTESIVRFPNITNLCPFGEVFNATRFASVYAWDRKRISNCVAYYSVLYNSASFSTFKCYGVSPTKLNDLCFTNVYADSFVIRGDEVRQIAPGQTGKIADYNYKLPDDFTGCVIAWNSNNLDSKVGGNYNYLYRLFRKSNLKPFERDISTEIYQAGSTPCNGVEGFNCYFPLQSYGFQPTNGVGYQPYRVVVLSFELLHAPATVCGPKKSTNLVKNKCVNFNFNGLTGTGVLTESNKKFLPFQQFGRDIADTTDAVRDPQTLEILDITPCSFGGVSVITPGTNTSNQVAVLYQDVNCTEVPVAIHADQLTPTWRVYSTGSNVFQTRAGCLIGAEHVNNSYECDIPIGAGICASYQTQTNSPRRARSVASQSIIAYTMSLGAENSVAYSNNSIAIPTNFTISVTTEILPVSMTKTSVDCTMYICGDSTECSNLLLQYGSFCTQLNRALTGIAVEQDKNTQEVFAQVKQIYKTPPIKDFGGFNFSQILPDPSKPSKRSFIEDLLFNKVTLADAGFIKQYGDCLGDIAARDLICAQKFNGLTVLPPLLTDEMIAQYTSALLAGTITSGWTFGAGAALQIPFAMQMAYRFNGIGVTQNVLYENQKLIANQFNSAIGKIQDSLSSTASALGKLQDVVNQNAQALNTLVKQLSSNFGAISSVLNDILSRLDKVEAEVQIDRLITGRLQSLQTYVTQQLIRAAEIRASANLAATKMSECVLGQSKRVDFCGKGYHLMSFPQSAPHGVVFLHVTYVPAQEKNFTTAPAICHDGKAHFPREGVFVSNGTHWFVTQRNFYEPQIITTDNTFVSGNCDVVIGIVNNTVYDPLQPELDSFKEELDKYFKNHTSPDVDLGDISGINASVVNIQKEIDRLNEVAKNLNESLIDLQELGKYEQYIKGGSGYIPEAPRDGQAYVRKDGEWVLLSTFL

SEQ ID NO: 82 - protein, 1241 aa, Artificial Sequence
  SARS-CoV-2/France/IDF0372/2020__EPI_ISL_406596 spike protein (1-1211) Foldon construct
MFVFLVLLPLVSSQCVNLTTRTQLPPAYTNSFTRGVYYPDKVFRSSVLHSTQDLFLPFFSNVTWFHAIHVSGTNGTKRFDNPVLPFNDGVYFASTEKSNIIRGWIFGTTLDSKTQSLLIVNNATNVVIKVCEFQFCNDPFLGVYYHKNNKSWMESEFRVYSSANNCTFEYVSQPFLMDLEGKQGNFKNLREFVFKNIDGYFKIYSKHTPINLVRDLPQGFSALEPLVDLPIGINITRFQTLLALHRSYLTPGDSSSGWTAGAAAYYVGYLQPRTFLLKYNENGTITDAVDCALDPLSETKCTLKSFTVEKGIYQTSNFRVQPTESIVRFPNITNLCPFGEVFNATRFASVYAWNRKRISNCVADYSFLYNSASFSTFKCYGVSPTKLNDLCFTNVYADSFVIRGDEVRQIAPGQTGKIADYNYKLPDDFTGCVIAWNSNNLDSKVGGNYNYLYRLFRKSNLKPFERDISTEIYQAGSTPCNGVEGFNCYFPLQSYGFQPTNGVGYQPYRVVVLSFELLHAPATVCGPKKSTNLVKNKCVNFNFNGLTGTGVLTESNKKFLPFQQFGRDIADTTDAVRDPQTLEILDITPCSFGGVSVITPGTNTSNQVAVLYQDVNCTEVPVAIHADQLTPTWRVYSTGSNVFQTRAGCLIGAEHVNNSYECDIPIGAGICASYQTQTNSPRRARSVASQSIIAYTMSLGAENSVAYSNNSIAIPTNFTISVTTEILPVSMTKTSVDCTMYICGDSTECSNLLLQYGSFCTQLNRALTGIAVEQDKNTQEVFAQVKQIYKTPPIKDFGGFNFSQILPDPSKPSKRSFIEDLLFNKVTLADAGFIKQYGDCLGDIAARDLICAQKFNGLTVLPPLLTDEMIAQYTSALLAGTITSGWTFGAGAALQIPFAMQMAYRFNGIGVTQNVLYENQKLIANQFNSAIGKIQDSLSSTASALGKLQDVVNQNAQALNTLVKQLSSNFGAISSVLNDILSRLDKVEAEVQIDRLITGRLQSLQTYVTQQLIRAAEIRASANLAATKMSECVLGQSKRVDFCGKGYHLMSFPQSAPHGVVFLHVTYVPAQEKNFTTAPAICHDGKAHFPREGVFVSNGTHWFVTQRNFYEPQIITTDNTFVSGNCDVVIGIVNNTVYDPLQPELDSFKEELDKYFKNHTSPDVDLGDISGINASVVNIQKEIDRLNEVAKNLNESLIDLQELGKYEQYIKGGSGYIPEAPRDGQAYVRKDGEWVLLSTFL

SEQ ID NO: 83 - protein, 1241 aa, Artificial Sequence
  SARS-CoV-2/Australia/VIC01/2020__EPI_ISL_406844 spike protein (1-1211) Foldon construct
MFVFLVLLPLVSSQCVNLTTRTQLPPAYTNSFTRGVYYPDKVFRSSVLHSTQDLFLPFFSNVTWFHAIHVSGTNGTKRFDNPVLPFNDGVYFASTEKSNIIRGWIFGTTLDSKTQSLLIVNNATNVVIKVCEFQFCNDPFLGVYYHKNNKSWMESEFRVYSSANNCTFEYVSQPFLMDLEGKQGNFKNLREFVFKNIDGYFKIYSKHTPINLVRDLPQGFSALEPLVDLPIGINITRFQTLLALHRRYLTPGDSSSGWTAGAAAYYVGYLQPRTFLLKYNENGTITDAVDCALDPLSETKCTLKSFTVEKGIYQTSNFRVQPTESIVRFPNITNLCPFGEVFNATRFASVYAWNRKRISNCVADYSVLYNSASFSTFKCYGVSPTKLNDLCFTNVYADSFVIRGDEVRQIAPGQTGKIADYNYKLPDDFTGCVIAWNSNNLDSKVGGNYNYLYRLFRKSNLKPFERDISTEIYQAGSTPCNGVEGFNCYFPLQSYGFQPTNGVGYQPYRVVVLSFELLHAPATVCGPKKSTNLVKNKCVNFNFNGLTGTGVLTESNKKFLPFQQFGRDIADTTDAVRDPQTLEILDITPCSFGGVSVITPGTNTSNQVAVLYQDVNCTEVPVAIHADQLTPTWRVYSTGSNVFQTRAGCLIGAEHVNNSYECDIPIGAGICASYQTQTNSPRRARSVASQSIIAYTMSLGAENSVAYSNNSIAIPTNFTISVTTEILPVSMTKTSVDCTMYICGDSTECSNLLLQYGSFCTQLNRALTGIAVEQDKNTQEVFAQVKQIYKTPPIKDFGGFNFSQILPDPSKPSKRSFIEDLLFNKVTLADAGFIKQYGDCLGDIAARDLICAQKFNGLTVLPPLLTDEMIAQYTSALLAGTITSGWTFGAGAALQIPFAMQMAYRFNGIGVTQNVLYENQKLIANQFNSAIGKIQDSLSSTASALGKLQDVVNQNAQALNTLVKQLSSNFGAISSVLNDILSRLDKVEAEVQIDRLITGRLQSLQTYVTQQLIRAAEIRASANLAATKMSECVLGQSKRVDFCGKGYHLMSFPQSAPHGVVFLHVTYVPAQEKNFTTAPAICHDGKAHFPREGVFVSNGTHWFVTQRNFYEPQIITTDNTFVSGNCDVVIGIVNNTVYDPLQPELDSFKEELDKYFKNHTSPDVDLGDISGINASVVNIQKEIDRLNEVAKNLNESLIDLQELGKYEQYIKGGSGYIPEAPRDGQAYVRKDGEWVLLSTFL

SEQ ID NO: 84 - protein, 1241 aa, Artificial Sequence
  SARS-CoV-2/Germany/BavPat1/2020__EPI_ISL_406862 spike protein (1-1211) Foldon construct
MFVFLVLLPLVSSQCVNLTTRTQLPPAYTNSFTRGVYYPDKVFRSSVLHSTQDLFLPFFSNVTWFHAIHVSGTNGTKRFDNPVLPFNDGVYFASTEKSNIIRGWIFGTTLDSKTQSLLIVNNATNVVIKVCEFQFCNDPFLGVYYHKNNKSWMESEFRVYSSANNCTFEYVSQPFLMDLEGKQGNFKNLREFVFKNIDGYFKIYSKHTPINLVRDLPQGFSALEPLVDLPIGINITRFQTLLALHRSYLTPGDSSSGWTAGAAAYYVGYLQPRTFLLKYNENGTITDAVDCALDPLSETKCTLKSFTVEKGIYQTSNFRVQPTESIVRFPNITNLCPFGEVFNATRFASVYAWNRKRISNCVADYSVLYNSASFSTFKCYGVSPTKLNDLCFTNVYADSFVIRGDEVRQIAPGQTGKIADYNYKLPDDFTGCVIAWNSNNLDSKVGGNYNYLYRLFRKSNLKPFERDISTEIYQAGSTPCNGVEGFNCYFPLQSYGFQPTNGVGYQPYRVVVLSFELLHAPATVCGPKKSTNLVKNKCVNFNFNGLTGTGVLTESNKKFLPFQQFGRDIADTTDAVRDPQTLEILDITPCSFGGVSVITPGTNTSNQVAVLYQGVNCTEVPVAIHADQLTPTWRVYSTGSNVFQTRAGCLIGAEHVNNSYECDIPIGAGICASYQTQTNSPRRARSVASQSIIAYTMSLGAENSVAYSNNSIAIPTNFTISVTTEILPVSMTKTSVDCTMYICGDSTECSNLLLQYGSFCTQLNRALTGIAVEQDKNTQEVFAQVKQIYKTPPIKDFGGFNFSQILPDPSKPSKRSFIEDLLFNKVTLADAGFIKQYGDCLGDIAARDLICAQKFNGLTVLPPLLTDEMIAQYTSALLAGTITSGWTFGAGAALQIPFAMQMAYRFNGIGVTQNVLYENQKLIANQFNSAIGKIQDSLSSTASALGKLQDVVNQNAQALNTLVKQLSSNFGAISSVLNDILSRLDKVEAEVQIDRLITGRLQSLQTYVTQQLIRAAEIRASANLAATKMSECVLGQSKRVDFCGKGYHLMSFPQSAPHGVVFLHVTYVPAQEKNFTTAPAICHDGKAHFPREGVFVSNGTHWFVTQRNFYEPQIITTDNTFVSGNCDVVIGIVNNTVYDPLQPELDSFKEELDKYFKNHTSPDVDLGDISGINASVVNIQKEIDRLNEVAKNLNESLIDLQELGKYEQYIKGGSGYIPEAPRDGQAYVRKDGEWVLLSTFL

SEQ ID NO: 85 - protein, 1371 aa, Artificial Sequence
  SARS-CoV-2/Wuhan/WIV05/2019__EPI_ISL_402128 spike protein (1-1211)(K986P_V987P) LumSynth construct
MFVFLVLLPLVSSQCVNLTTRTQLPPAYTNSFTRGVYYPDKVFRSSVLHSTQDLFLPFFSNVTWFHAIHVSGTNGTKRFDNPVLPFNDGVYFASTEKSNIIRGWIFGTTLDSKTQSLLIVNNATNVVIKVCEFQFCNDPFLGVYYHKNNKSWMESEFRVYSSANNCTFEYVSQPFLMDLEGKQGNFKNLREFVFKNIDGYFKIYSKHTPINLVRDLPQGFSALEPLVDLPIGINITRFQTLLALHRSYLTPGDSSSGWTAGAAAYYVGYLQPRTFLLKYNENGTITDAVDCALDPLSETKCTLKSFTVEKGIYQTSNFRVQPTESIVRFPNITNLCPFGEVFNATRFASVYAWNRKRISNCVADYSVLYNSASFSTFKCYGVSPTKLNDLCFTNVYADSFVIRGDEVRQIAPGQTGKIADYNYKLPDDFTGCVIAWNSNNLDSKVGGNYNYLYRLFRKSNLKPFERDISTEIYQAGSTPCNGVEGFNCYFPLQSYGFQPTNGVGYQPYRVVVLSFELLHAPATVCGPKKSTNLVKNKCVNFNFNGLTGTGVLTESNKKFLPFQQFGRDIADTTDAVRDPQTLEILDITPCSFGGVSVITPGTNTSNQVAVLYQDVNCTEVPVAIHADQLTPTWRVYSTGSNVFQTRAGCLIGAEHVNNSYECDIPIGAGICASYQTQTNSPRRARSVASQSIIAYTMSLGAENSVAYSNNSIAIPTNFTISVTTEILPVSMTKTSVDCTMYICGDSTECSNLLLQYGSFCTQLNRALTGIAVEQDKNTQEVFAQVKQIYKTPPIKDFGGFNFSQILPDPSKPSKRSFIEDLLFNKVTLADAGFIKQYGDCLGDIAARDLICAQKFNGLTVLPPLLTDEMIAQYTSALLAGTITSGWTFGAGAALQIPFAMQMAYRFNGIGVTQNVLYENQKLIANQFNSAIGKIQDSLSSTASALGKLQDVVNQNAQALNTLVKQLSSNFGAISSVLNDILSRLDPPEAEVQIDRLITGRLQSLQTYVTQQLIRAAEIRASANLAATKMSECVLGQSKRVDFCGKGYHLMSFPQSAPHGVVFLHVTYVPAQEKNFTTAPAICHDGKAHFPREGVFVSNGTHWFVTQRNFYEPQIITTDNTFVSGNCDVVIGIVNNTVYDPLQPELDSFKEELDKYFKNHTSPDVDLGDISGINASVVNIQKEIDRLNEVAKNLNESLIDLQELGKYEQYIKGGGSGGGQIYEGKLTAEGLRFGIVASRFNHALVDRLVEGAIDAIVRHGGREEDITLVRVPGSWEIPVAAGELARKEDIDAVIAIGVLIRGATPHFDYIASEVSKGLADLSLELRKPITFGVITADTLEQAIERAGTKHGNKGWEAALSAIEMANLFKSLR

SEQ ID NO: 86 - protein, 1367 aa, Artificial Sequence
  SARS-CoV-2/bat/Yunnan/RaTG13/2013__EPI_ISL_402131 spike protein (1-1207)(K982P_V983P) LumSynth construct
MFVFLVLLPLVSSQCVNLTTRTQLPPAYTNSSTRGVYYPDKVFRSSVLHLTQDLFLPFFSNVTWFHAIHVSGTNGIKRFDNPVLPFNDGVYFASTEKSNIIRGWIFGTTLDSKTQSLLIVNNATNVVIKVCEFQFCNDPFLGVYYHKNNKSWMESEFRVYSSANNCTFEYVSQPFLMDLEGKQGNFKNLREFVFKNIDGYFKIYSKHTPINLVRDLPPGFSALEPLVDLPIGINITRFQTLLALHRSYLTPGDSSSGWTAGAAAYYVGYLQPRTFLLKYNENGTITDAVDCALDPLSETKCTLKSFTVEKGIYQTSNFRVQPTDSIVRFPNITNLCPFGEVFNATTFASVYAWNRKRISNCVADYSVLYNSTSFSTFKCYGVSPTKLNDLCFTNVYADSFVITGDEVRQIAPGQTGKIADYNYKLPDDFTGCVIAWNSKHIDAKEGGNFNYLYRLFRKANLKPFERDISTEIYQAGSKPCNGQTGLNCYYPLYRYGFYPTDGVGHQPYRVVVLSFELLNAPATVCGPKKSTNLVKNKCVNFNFNGLTGTGVLTESNKKFLPFQQFGRDIADTTDAVRDPQTLEILDITPCSFGGVSVITPGTNASNQVAVLYQDVNCTEVPVAIHADQLTPTWRVYSTGSNVFQTRAGCLIGAEHVNNSYECDIPIGAGICASYQTQTNSRSVASQSIIAYTMSLGAENSVAYSNNSIAIPTNFTISVTTEILPVSMTKTSVDCTMYICGDSTECSNLLLQYGSFCTQLNRALTGIAVEQDKNTQEVFAQVKQIYKTPPIKDFGGFNFSQILPDPSKPSKRSFIEDLLFNKVTLADAGFIKQYGDCLGDIAARDLICAQKFNGLTVLPPLLTDEMIAQYTSALLAGTITSGWTFGAGAALQIPFAMQMAYRFNGIGVTQNVLYENQKLIANQFNSAIGKIQDSLSSTASALGKLQDVVNQNAQALNTLVKQLSSNFGAISSVLNDILSRLDPPEAEVQIDRLITGRLQSLQTYVTQQLIRAAEIRASANLAATKMSECVLGQSKRVDFCGKGYHLMSFPQSAPHGVVFLHVTYVPAQEKNFTTAPAICHDGKAHFPREGVFVSNGTHWFVTQRNFYEPQIITTDNTFVSGSCDVVIGIVNNTVYDPLQPELDSFKEELDKYFKNHTSPDVDLGDISGINASVVNIQKEIDRLNEVAKNLNESLIDLQELGKYEQYIKGGGSGGGQIYEGKLTAEGLRFGIVASRFNHALVDRLVEGAIDAIVRHGGREEDITLVRVPGSWEIPVAAGELARKEDIDAVIAIGVLIRGATPHFDYIASEVSKGLADLSLELRKPITFGVITADTLEQAIERAGTKHGNKGWEAALSAIEMANLFKSLR

SEQ ID NO: 87 - protein, 1371 aa, Artificial Sequence
  SARS-CoV-2/Wuhan/HBCDC-HB-01/2019__EPI_ISL_402132 spike protein (1-1211)(K986P_V987P) LumSynth construct
MFVFLVLLPLVSSQCVNLTTRTQLPPAYTNSITRGVYYPDKVFRSSVLHSTQDLFLPFFSNVTWFHAIHVSGTNGTKRFDNPVLPFNDGVYFASTEKSNIIRGWIFGTTLDSKTQSLLIVNNATNVVIKVCEFQFCNDPFLGVYYHKNNKSWMESEFRVYSSANNCTFEYVSQPFLMDLEGKQGNFKNLREFVFKNIDGYFKIYSKHTPINLVRDLPQGFSALEPLVDLPIGINITRFQTLLALHRSYLTPGDSSSGWTAGAAAYYVGYLQPRTFLLKYNENGTITDAVDCALDPLSETKCTLKSFTVEKGIYQTSNFRVQPTESIVRFPNITNLCPFGEVFNATRFASVYAWNRKRISNCVADYSVLYNSASFSTFKCYGVSPTKLNDLCFTNVYADSFVIRGDEVRQIAPGQTGKIADYNYKLPDDFTGCVIAWNSNNLDSKVGGNYNYLYRLFRKSNLKPFERDISTEIYQAGSTPCNGVEGFNCYFPLQSYGFQPTNGVGYQPYRVVVLSFELLHAPATVCGPKKSTNLVKNKCVNFNFNGLTGTGVLTESNKKFLPFQQFGRDIADTTDAVRDPQTLEILDITPCSFGGVSVITPGTNTSNQVAVLYQDVNCTEVPVAIHADQLTPTWRVYSTGSNVFQTRAGCLIGAEHVNNSYECDIPIGAGICASYQTQTNSPRRARSVASQSIIAYTMSLGAENSVAYSNNSIAIPTNFTISVTTEILPVSMTKTSVDCTMYICGDSTECSNLLLQYGSFCTQLNRALTGIAVEQDKNTQEVFAQVKQIYKTPPIKDFGGFNFSQILPDPSKPSKRSFIEDLLFNKVTLADAGFIKQYGDCLGDIAARDLICAQKFNGLTVLPPLLTDEMIAQYTSALLAGTITSGWTFGAGAALQIPFAMQMAYRFNGIGVTQNVLYENQKLIANQFNSAIGKIQDSLSSTASALGKLQDVVNQNAQALNTLVKQLSSNFGAISSVLNDILSRLDPPEAEVQIDRLITGRLQSLQTYVTQQLIRAAEIRASANLAATKMSECVLGQSKRVDFCGKGYHLMSFPQSAPHGVVFLHVTYVPAQEKNFTTAPAICHDGKAHFPREGVFVSNGTHWFVTQRNFYEPQIITTDNTFVSGNCDVVIGIVNNTVYDPLQPELDSFKEELDKYFKNHTSPDVDLGDISGINASVVNIQKEIDRLNEVAKNLNESLIDLQELGKYEQYIKGGGSGGGQIYEGKLTAEGLRFGIVASRFNHALVDRLVEGAIDAIVRHGGREEDITLVRVPGSWEIPVAAGELARKEDIDAVIAIGVLIRGATPHFDYIASEVSKGLADLSLELRKPITFGVITADTLEQAIERAGTKHGNKGWEAALSAIEMANLFKSLR

SEQ ID NO: 88 - protein, 1371 aa, Artificial Sequence
  SARS-CoV-2/Guangdong/20SF028/2020__EPI_ISL_403936 spike protein (1-1211)(K986P_V987P) LumSynth construct
MFVFLVLLPLVSSQCVNLTTRTQLPPAYTNSFTRGVYYPDKVFRSSVLYSTQDLFLPFFSNVTWFHAIHVSGTNGTKRFDNPVLPFNDGVYFASTEKSNIIRGWIFGTTLDSKTQSLLIVNNATNVVIKVCEFQFCNDPFLGVYYHKNNKSWMESEFRVYSSANNCTFEYVSQPFLMDLEGKQGNFKNLREFVFKNIDGYFKIYSKHTPINLVRDLPQGFSALEPLVDLPIGINITRFQTLLALHRSYLTPGDSSSGWTAGAAAYYVGYLQPRTFLLKYNENGTITDAVDCALDPLSETKCTLKSFTVEKGIYQTSNFRVQPTESIVRFPNITNLCPFGEVFNATRFASVYAWNRKRISNCVADYSVLYNSASFSTFKCYGVSPTKLNDLCFTNVYADSFVIRGDEVRQIAPGQTGKIADYNYKLPDDFTGCVIAWNSNNLDSKVGGNYNYLYRLFRKSNLKPFERDISTEIYQAGSTPCNGVEGFNCYFPLQSYGFQPTNGVGYQPYRVVVLSFELLHAPATVCGPKKSTNLVKNKCVNFNFNGLTGTGVLTESNKKFLPFQQFGRDIADTTDAVRDPQTLEILDITPCSFGGVSVITPGTNTSNQVAVLYQDVNCTEVPVAIHADQLTPTWRVYSTGSNVFQTRAGCLIGAEHVNNSYECDIPIGAGICASYQTQTNSPRRARSVASQSIIAYTMSLGAENSVAYSNNSIAIPTNFTISVTTEILPVSMTKTSVDCTMYICGDSTECSNLLLQYGSFCTQLNRALTGIAVEQDKNTQEVFAQVKQIYKTPPIKDFGGFNFSQILPDPSKPSKRSFIEDLLFNKVTLADAGFIKQYGDCLGDIAARDLICAQKFNGLTVLPPLLTDEMIAQYTSALLAGTITSGWTFGAGAALQIPFAMQMAYRFNGIGVTQNVLYENQKLIANQFNSAIGKIQDSLSSTASALGKLQDVVNQNAQALNTLVKQLSSNFGAISSVLNDILSRLDPPEAEVQIDRLITGRLQSLQTYVTQQLIRAAEIRASANLAATKMSECVLGQSKRVDFCGKGYHLMSFPQSAPHGVVFLHVTYVPAQEKNFTTAPAICHDGKAHFPREGVFVSNGTHWFVTQRNFYEPQIITTDNTFVSGNCDVVIGIVNNTVYDPLQPELDSFKEELDKYFKNHTSPDVDLGDISGINASVVNIQKEIDRLNEVAKNLNESLIDLQELGKYEQYIKGGGSGGGQIYEGKLTAEGLRFGIVASRFNHALVDRLVEGAIDAIVRHGGREEDITLVRVPGSWEIPVAAGELARKEDIDAVIAIGVLIRGATPHFDYIASEVSKGLADLSLELRKPITFGVITADTLEQAIERAGTKHGNKGWEAALSAIEMANLFKSLR

SEQ ID NO: 89 - protein, 1371 aa, Artificial Sequence
  SARS-CoV-2/Shenzhen/SZTH-001/2020__EPI_ISL_406592 spike protein (1-1211)(K986P_V987P) LumSynth construct
MFVFLVLLPLVSSQCVNLTTRTQLPPAYTNSFTRGVYYPDKVFRSSVLHSTQDLFLPFFSNVTWFHAIHVSGTNGTKRFDNPVLPFNDGVYFASTEKSNIIRGWIFGTTLDSKTQSLLIVNNATNVVIKVCEFQFCNDPFLGVYYHKNNKSWMESEFRVYSSANNCTFEYVSQPFLMDLEGKQGNFKNLREFVFKNIDGYFKIYSKHTPINLVRDLPQGFSALEPLVDLPIGINITRFQTLLALHRSYLTPGDSSSGWTAGAAAYYVGYLQPRTFLLKYNENGTITDAVDCALDPLSETKCTLKSFTVEKGIYQTSNFRVQPTESIVRFPNITNLCPFGEVFNATRFASVYAWNRKRISNCVADYSVLYNSASFSTFKCYGVSPTKLNDLCFTNVYADSFVIRGDEVRQIAPGQTGKIADYNYKLPDDFTGCVIAWNSNNLDSKVGGNYNYLYRLFRKSNLKPFERDISTEIYQAGSTPCNGVEGFNCYFPLQSYGFQPTNGVGYQPYRVVVLSFELLHAPATVCGPKKSTNLVKNKCVNFNFNGLTGTGVLTESNKKFLPFQQFGRDIADTTDAVRDPQTLEILDITPCSFGGVSVITPGTNTSNQVAVLYQDVNCTEVPVAIHADQLTPTWRVYSTGSNVFQTRAGCLIGAEHVNNSYECDIPIGAGICASYQTQTNSPRRARSVASQSIIAYTMSLGAENSVAYSNNSIAIPTNFTISVTTEILPVSMTKTSVDCTMYICGDSTECSNLLLQYGSFCTQLNRALTGIAVEQDKNTQEVFAQVKQIYKTPPIKDFGGFNFSQILPDPSKPSKRSFIEDLLFNKVTLADAGFIKQYGDCLGDIAARDLICAQKFNGLTVLPPLLTDEMIAQYTSALLAGTITSGWTFGAGAALQIPFAMQMAYRFNGIGVTQNVLYENQKLIANQFNSAIGKIQDSLSSTASALGKLQDVVNQNAQALNTLVKQLSSNFGAISSVLNDILSRLDPPEAEVQIDRLITGRLQSLQTYVTQQLIRAAEIRASANLAATKMSECVLGQSKRVDFCGKGYHLMSFPQSAPHGVVFLHVTYVPAQEKNFTTAPAICHDGKAHFPREGVFVSNGTHWFVTQRNFYEPQIITTDNTFVSGNCDVLIGIVNNTVYDPLQPELDSFKEELDKYFKNHTSPDVDLGDISGINASVVNIQKEIDRLNEVAKNLNESLIDLQELGKYEQYIKGGGSGGGQIYEGKLTAEGLRFGIVASRFNHALVDRLVEGAIDAIVRHGGREEDITLVRVPGSWEIPVAAGELARKEDIDAVIAIGVLIRGATPHFDYIASEVSKGLADLSLELRKPITFGVITADTLEQAIERAGTKHGNKGWEAALSAIEMANLFKSLR

SEQ ID NO: 90 - protein, 1371 aa, Artificial Sequence
  SARS-CoV-2/Shenzhen/SZTH-004/2020__EPI_ISL_406595 spike protein (1-1211)(K986P_V987P) LumSynth construct
MFVFLVLLPLVSSQCVNLTTRTQLPPAYTNSFTRGVYYPDKVFRSSVLHSTQDLFLPFFSNVTWFHAIHVSGTNGTKRFDNPVLPFNDGVYFASTEKSNIIRGWIFGTTLDSKTQSLLIVNNATNVVIKVCEFQFCNDPFLGVYYHKNNKSWMESEFRVYSSANNCTFEYVSQPFLMDLEGKQGNFKNLREFVFKNIDGYFKIYSKHTPINLVRDLPQGFSALEPLVDLPIGINITRFQTLLALHRSYLTPGDSSSGWTAGAAAYYVGYLQPRTFLLKYNENGTITDAVDCALDPLSETKCTLKSFTVEKGIYQTSNFRVQPTESIVRFPNITNLCPFGEVFNATRFASVYAWDRKRISNCVAYYSVLYNSASFSTFKCYGVSPTKLNDLCFTNVYADSFVIRGDEVRQIAPGQTGKIADYNYKLPDDFTGCVIAWNSNNLDSKVGGNYNYLYRLFRKSNLKPFERDISTEIYQAGSTPCNGVEGFNCYFPLQSYGFQPTNGVGYQPYRVVVLSFELLHAPATVCGPKKSTNLVKNKCVNFNFNGLTGTGVLTESNKKFLPFQQFGRDIADTTDAVRDPQTLEILDITPCSFGGVSVITPGTNTSNQVAVLYQDVNCTEVPVAIHADQLTPTWRVYSTGSNVFQTRAGCLIGAEHVNNSYECDIPIGAGICASYQTQTNSPRRARSVASQSIIAYTMSLGAENSVAYSNNSIAIPTNFTISVTTEILPVSMTKTSVDCTMYICGDSTECSNLLLQYGSFCTQLNRALTGIAVEQDKNTQEVFAQVKQIYKTPPIKDFGGFNFSQILPDPSKPSKRSFIEDLLFNKVTLADAGFIKQYGDCLGDIAARDLICAQKFNGLTVLPPLLTDEMIAQYTSALLAGTITSGWTFGAGAALQIPFAMQMAYRFNGIGVTQNVLYENQKLIANQFNSAIGKIQDSLSSTASALGKLQDVVNQNAQALNTLVKQLSSNFGAISSVLNDILSRLDPPEAEVQIDRLITGRLQSLQTYVTQQLIRAAEIRASANLAATKMSECVLGQSKRVDFCGKGYHLMSFPQSAPHGVVFLHVTYVPAQEKNFTTAPAICHDGKAHFPREGVFVSNGTHWFVTQRNFYEPQIITTDNTFVSGNCDVVIGIVNNTVYDPLQPELDSFKEELDKYFKNHTSPDVDLGDISGINASVVNIQKEIDRLNEVAKNLNESLIDLQELGKYEQYIKGGGSGGGQIYEGKLTAEGLRFGIVASRFNHALVDRLVEGAIDAIVRHGGREEDITLVRVPGSWEIPVAAGELARKEDIDAVIAIGVLIRGATPHFDYIASEVSKGLADLSLELRKPITFGVITADTLEQAIERAGTKHGNKGWEAALSAIEMANLFKSLR

SEQ ID NO: 91 - protein, 1371 aa, Artificial Sequence
  SARS-CoV-2/France/IDF0372/2020__EPI_ISL_406596 spike protein (1-1211)(K986P_V987P) LumSynth construct
MFVFLVLLPLVSSQCVNLTTRTQLPPAYTNSFTRGVYYPDKVFRSSVLHSTQDLFLPFFSNVTWFHAIHVSGTNGTKRFDNPVLPFNDGVYFASTEKSNIIRGWIFGTTLDSKTQSLLIVNNATNVVIKVCEFQFCNDPFLGVYYHKNNKSWMESEFRVYSSANNCTFEYVSQPFLMDLEGKQGNFKNLREFVFKNIDGYFKIYSKHTPINLVRDLPQGFSALEPLVDLPIGINITRFQTLLALHRSYLTPGDSSSGWTAGAAAYYVGYLQPRTFLLKYNENGTITDAVDCALDPLSETKCTLKSFTVEKGIYQTSNFRVQPTESIVRFPNITNLCPFGEVFNATRFASVYAWNRKRISNCVADYSFLYNSASFSTFKCYGVSPTKLNDLCFTNVYADSFVIRGDEVRQIAPGQTGKIADYNYKLPDDFTGCVIAWNSNNLDSKVGGNYNYLYRLFRKSNLKPFERDISTEIYQAGSTPCNGVEGFNCYFPLQSYGFQPTNGVGYQPYRVVVLSFELLHAPATVCGPKKSTNLVKNKCVNFNFNGLTGTGVLTESNKKFLPFQQFGRDIADTTDAVRDPQTLEILDITPCSFGGVSVITPGTNTSNQVAVLYQDVNCTEVPVAIHADQLTPTWRVYSTGSNVFQTRAGCLIGAEHVNNSYECDIPIGAGICASYQTQTNSPRRARSVASQSIIAYTMSLGAENSVAYSNNSIAIPTNFTISVTTEILPVSMTKTSVDCTMYICGDSTECSNLLLQYGSFCTQLNRALTGIAVEQDKNTQEVFAQVKQIYKTPPIKDFGGFNFSQILPDPSKPSKRSFIEDLLFNKVTLADAGFIKQYGDCLGDIAARDLICAQKFNGLTVLPPLLTDEMIAQYTSALLAGTITSGWTFGAGAALQIPFAMQMAYRFNGIGVTQNVLYENQKLIANQFNSAIGKIQDSLSSTASALGKLQDVVNQNAQALNTLVKQLSSNFGAISSVLNDILSRLDPPEAEVQIDRLITGRLQSLQTYVTQQLIRAAEIRASANLAATKMSECVLGQSKRVDFCGKGYHLMSFPQSAPHGVVFLHVTYVPAQEKNFTTAPAICHDGKAHFPREGVFVSNGTHWFVTQRNFYEPQIITTDNTFVSGNCDVVIGIVNNTVYDPLQPELDSFKEELDKYFKNHTSPDVDLGDISGINASVVNIQKEIDRLNEVAKNLNESLIDLQELGKYEQYIKGGGSGGGQIYEGKLTAEGLRFGIVASRFNHALVDRLVEGAIDAIVRHGGREEDITLVRVPGSWEIPVAAGELARKEDIDAVIAIGVLIRGATPHFDYIASEVSKGLADLSLELRKPITFGVITADTLEQAIERAGTKHGNKGWEAALSAIEMANLFKSLR

SEQ ID NO: 92 - protein, 1371 aa, Artificial Sequence
  SARS-CoV-2/Australia/VIC01/2020__EPI_ISL_406844 spike protein (1-1211)(K986P_V987P) LumSynth construct
MFVFLVLLPLVSSQCVNLTTRTQLPPAYTNSFTRGVYYPDKVFRSSVLHSTQDLFLPFFSNVTWFHAIHVSGTNGTKRFDNPVLPFNDGVYFASTEKSNIIRGWIFGTTLDSKTQSLLIVNNATNVVIKVCEFQFCNDPFLGVYYHKNNKSWMESEFRVYSSANNCTFEYVSQPFLMDLEGKQGNFKNLREFVFKNIDGYFKIYSKHTPINLVRDLPQGFSALEPLVDLPIGINITRFQTLLALHRRYLTPGDSSSGWTAGAAAYYVGYLQPRTFLLKYNENGTITDAVDCALDPLSETKCTLKSFTVEKGIYQTSNFRVQPTESIVRFPNITNLCPFGEVFNATRFASVYAWNRKRISNCVADYSVLYNSASFSTFKCYGVSPTKLNDLCFTNVYADSFVIRGDEVRQIAPGQTGKIADYNYKLPDDFTGCVIAWNSNNLDSKVGGNYNYLYRLFRKSNLKPFERDISTEIYQAGSTPCNGVEGFNCYFPLQSYGFQPTNGVGYQPYRVVVLSFELLHAPATVCGPKKSTNLVKNKCVNFNFNGLTGTGVLTESNKKFLPFQQFGRDIADTTDAVRDPQTLEILDITPCSFGGVSVITPGTNTSNQVAVLYQDVNCTEVPVAIHADQLTPTWRVYSTGSNVFQTRAGCLIGAEHVNNSYECDIPIGAGICASYQTQTNSPRRARSVASQSIIAYTMSLGAENSVAYSNNSIAIPTNFTISVTTEILPVSMTKTSVDCTMYICGDSTECSNLLLQYGSFCTQLNRALTGIAVEQDKNTQEVFAQVKQIYKTPPIKDFGGFNFSQILPDPSKPSKRSFIEDLLFNKVTLADAGFIKQYGDCLGDIAARDLICAQKFNGLTVLPPLLTDEMIAQYTSALLAGTITSGWTFGAGAALQIPFAMQMAYRFNGIGVTQNVLYENQKLIANQFNSAIGKIQDSLSSTASALGKLQDVVNQNAQALNTLVKQLSSNFGAISSVLNDILSRLDPPEAEVQIDRLITGRLQSLQTYVTQQLIRAAEIRASANLAATKMSECVLGQSKRVDFCGKGYHLMSFPQSAPHGVVFLHVTYVPAQEKNFTTAPAICHDGKAHFPREGVFVSNGTHWFVTQRNFYEPQIITTDNTFVSGNCDVVIGIVNNTVYDPLQPELDSFKEELDKYFKNHTSPDVDLGDISGINASVVNIQKEIDRLNEVAKNLNESLIDLQELGKYEQYIKGGGSGGGQIYEGKLTAEGLRFGIVASRFNHALVDRLVEGAIDAIVRHGGREEDITLVRVPGSWEIPVAAGELARKEDIDAVIAIGVLIRGATPHFDYIASEVSKGLADLSLELRKPITFGVITADTLEQAIERAGTKHGNKGWEAALSAIEMANLFKSLR

SEQ ID NO: 93 - protein, 1371 aa, Artificial Sequence
  SARS-CoV-2/Germany/BavPat1/2020__EPI_ISL_406862 spike protein (1-1211)(K986P_V987P) LumSynth construct
MFVFLVLLPLVSSQCVNLTTRTQLPPAYTNSFTRGVYYPDKVFRSSVLHSTQDLFLPFFSNVTWFHAIHVSGTNGTKRFDNPVLPFNDGVYFASTEKSNIIRGWIFGTTLDSKTQSLLIVNNATNVVIKVCEFQFCNDPFLGVYYHKNNKSWMESEFRVYSSANNCTFEYVSQPFLMDLEGKQGNFKNLREFVFKNIDGYFKIYSKHTPINLVRDLPQGFSALEPLVDLPIGINITRFQTLLALHRSYLTPGDSSSGWTAGAAAYYVGYLQPRTFLLKYNENGTITDAVDCALDPLSETKCTLKSFTVEKGIYQTSNFRVQPTESIVRFPNITNLCPFGEVFNATRFASVYAWNRKRISNCVADYSVLYNSASFSTFKCYGVSPTKLNDLCFTNVYADSFVIRGDEVRQIAPGQTGKIADYNYKLPDDFTGCVIAWNSNNLDSKVGGNYNYLYRLFRKSNLKPFERDISTEIYQAGSTPCNGVEGFNCYFPLQSYGFQPTNGVGYQPYRVVVLSFELLHAPATVCGPKKSTNLVKNKCVNFNFNGLTGTGVLTESNKKFLPFQQFGRDIADTTDAVRDPQTLEILDITPCSFGGVSVITPGTNTSNQVAVLYQGVNCTEVPVAIHADQLTPTWRVYSTGSNVFQTRAGCLIGAEHVNNSYECDIPIGAGICASYQTQTNSPRRARSVASQSIIAYTMSLGAENSVAYSNNSIAIPTNFTISVTTEILPVSMTKTSVDCTMYICGDSTECSNLLLQYGSFCTQLNRALTGIAVEQDKNTQEVFAQVKQIYKTPPIKDFGGFNFSQILPDPSKPSKRSFIEDLLFNKVTLADAGFIKQYGDCLGDIAARDLICAQKFNGLTVLPPLLTDEMIAQYTSALLAGTITSGWTFGAGAALQIPFAMQMAYRFNGIGVTQNVLYENQKLIANQFNSAIGKIQDSLSSTASALGKLQDVVNQNAQALNTLVKQLSSNFGAISSVLNDILSRLDPPEAEVQIDRLITGRLQSLQTYVTQQLIRAAEIRASANLAATKMSECVLGQSKRVDFCGKGYHLMSFPQSAPHGVVFLHVTYVPAQEKNFTTAPAICHDGKAHFPREGVFVSNGTHWFVTQRNFYEPQIITTDNTFVSGNCDVVIGIVNNTVYDPLQPELDSFKEELDKYFKNHTSPDVDLGDISGINASVVNIQKEIDRLNEVAKNLNESLIDLQELGKYEQYIKGGGSGGGQIYEGKLTAEGLRFGIVASRFNHALVDRLVEGAIDAIVRHGGREEDITLVRVPGSWEIPVAAGELARKEDIDAVIAIGVLIRGATPHFDYIASEVSKGLADLSLELRKPITFGVITADTLEQAIERAGTKHGNKGWEAALSAIEMANLFKSLR

SEQ ID NO: 94 - protein, 1377 aa, Artificial Sequence
  SARS-CoV-2/Wuhan/WIV05/2019__EPI_ISL_402128 spike protein (1-1211)(K986P_V987P) Ferritin construct
MFVFLVLLPLVSSQCVNLTTRTQLPPAYTNSFTRGVYYPDKVFRSSVLHSTQDLFLPFFSNVTWFHAIHVSGTNGTKRFDNPVLPFNDGVYFASTEKSNIIRGWIFGTTLDSKTQSLLIVNNATNVVIKVCEFQFCNDPFLGVYYHKNNKSWMESEFRVYSSANNCTFEYVSQPFLMDLEGKQGNFKNLREFVFKNIDGYFKIYSKHTPINLVRDLPQGFSALEPLVDLPIGINITRFQTLLALHRSYLTPGDSSSGWTAGAAAYYVGYLQPRTFLLKYNENGTITDAVDCALDPLSETKCTLKSFTVEKGIYQTSNFRVQPTESIVRFPNITNLCPFGEVFNATRFASVYAWNRKRISNCVADYSVLYNSASFSTFKCYGVSPTKLNDLCFTNVYADSFVIRGDEVRQIAPGQTGKIADYNYKLPDDFTGCVIAWNSNNLDSKVGGNYNYLYRLFRKSNLKPFERDISTEIYQAGSTPCNGVEGFNCYFPLQSYGFQPTNGVGYQPYRVVVLSFELLHAPATVCGPKKSTNLVKNKCVNFNFNGLTGTGVLTESNKKFLPFQQFGRDIADTTDAVRDPQTLEILDITPCSFGGVSVITPGTNTSNQVAVLYQDVNCTEVPVAIHADQLTPTWRVYSTGSNVFQTRAGCLIGAEHVNNSYECDIPIGAGICASYQTQTNSPRRARSVASQSIIAYTMSLGAENSVAYSNNSIAIPTNFTISVTTEILPVSMTKTSVDCTMYICGDSTECSNLLLQYGSFCTQLNRALTGIAVEQDKNTQEVFAQVKQIYKTPPIKDFGGFNFSQILPDPSKPSKRSFIEDLLFNKVTLADAGFIKQYGDCLGDIAARDLICAQKFNGLTVLPPLLTDEMIAQYTSALLAGTITSGWTFGAGAALQIPFAMQMAYRFNGIGVTQNVLYENQKLIANQFNSAIGKIQDSLSSTASALGKLQDVVNQNAQALNTLVKQLSSNFGAISSVLNDILSRLDPPEAEVQIDRLITGRLQSLQTYVTQQLIRAAEIRASANLAATKMSECVLGQSKRVDFCGKGYHLMSFPQSAPHGVVFLHVTYVPAQEKNFTTAPAICHDGKAHFPREGVFVSNGTHWFVTQRNFYEPQIITTDNTFVSGNCDVVIGIVNNTVYDPLQPELDSFKEELDKYFKNHTSPDVDLGDISGINASVVNIQKEIDRLNEVAKNLNESLIDLQELGKYEQYIKGGSDIIKLLNEQVNKEMQSSNLYMSMSSWCYTHSLDGAGLFLFDHAAEEYEHAKKLIIFLNENNVPVQLTSISAPEHKFEGLTQIFQKAYEHEQHISESINNIVDHAIKSKDHATFNFLQWYVAEQHEEEVLFKDILDKIELIGNENHGLYLADQYVKGIAKSRKS

SEQ ID NO: 95 - protein, 1373 aa, Artificial Sequence
  SARS-CoV-2/bat/Yunnan/RaTG13/2013__EPI_ISL_402131 spike protein (1-1207)(K982P_V983P) Ferritin construct
MFVFLVLLPLVSSQCVNLTTRTQLPPAYTNSSTRGVYYPDKVFRSSVLHLTQDLFLPFFSNVTWFHAIHVSGTNGIKRFDNPVLPFNDGVYFASTEKSNIIRGWIFGTTLDSKTQSLLIVNNATNVVIKVCEFQFCNDPFLGVYYHKNNKSWMESEFRVYSSANNCTFEYVSQPFLMDLEGKQGNFKNLREFVFKNIDGYFKIYSKHTPINLVRDLPPGFSALEPLVDLPIGINITRFQTLLALHRSYLTPGDSSSGWTAGAAAYYVGYLQPRTFLLKYNENGTITDAVDCALDPLSETKCTLKSFTVEKGIYQTSNFRVQPTDSIVRFPNITNLCPFGEVFNATTFASVYAWNRKRISNCVADYSVLYNSTSFSTFKCYGVSPTKLNDLCFTNVYADSFVITGDEVRQIAPGQTGKIADYNYKLPDDFTGCVIAWNSKHIDAKEGGNFNYLYRLFRKANLKPFERDISTEIYQAGSKPCNGQTGLNCYYPLYRYGFYPTDGVGHQPYRVVVLSFELLNAPATVCGPKKSTNLVKNKCVNFNFNGLTGTGVLTESNKKFLPFQQFGRDIADTTDAVRDPQTLEILDITPCSFGGVSVITPGTNASNQVAVLYQDVNCTEVPVAIHADQLTPTWRVYSTGSNVFQTRAGCLIGAEHVNNSYECDIPIGAGICASYQTQTNSRSVASQSIIAYTMSLGAENSVAYSNNSIAIPTNFTISVTTEILPVSMTKTSVDCTMYICGDSTECSNLLLQYGSFCTQLNRALTGIAVEQDKNTQEVFAQVKQIYKTPPIKDFGGFNFSQILPDPSKPSKRSFIEDLLFNKVTLADAGFIKQYGDCLGDIAARDLICAQKFNGLTVLPPLLTDEMIAQYTSALLAGTITSGWTFGAGAALQIPFAMQMAYRFNGIGVTQNVLYENQKLIANQFNSAIGKIQDSLSSTASALGKLQDVVNQNAQALNTLVKQLSSNFGAISSVLNDILSRLDPPEAEVQIDRLITGRLQSLQTYVTQQLIRAAEIRASANLAATKMSECVLGQSKRVDFCGKGYHLMSFPQSAPHGVVFLHVTYVPAQEKNFTTAPAICHDGKAHFPREGVFVSNGTHWFVTQRNFYEPQIITTDNTFVSGSCDVVIGIVNNTVYDPLQPELDSFKEELDKYFKNHTSPDVDLGDISGINASVVNIQKEIDRLNEVAKNLNESLIDLQELGKYEQYIKGGSDIIKLLNEQVNKEMQSSNLYMSMSSWCYTHSLDGAGLFLFDHAAEEYEHAKKLIIFLNENNVPVQLTSISAPEHKFEGLTQIFQKAYEHEQHISESINNIVDHAIKSKDHATFNFLQWYVAEQHEEEVLFKDILDKIELIGNENHGLYLADQYVKGIAKSRKS

SEQ ID NO: 96 - protein, 1377 aa, Artificial Sequence
  SARS-CoV-2/Wuhan/HBCDC-HB-01/2019__EPI_ISL_402132 spike protein (1-1211)(K986P_V987P) Ferritin construct
MFVFLVLLPLVSSQCVNLTTRTQLPPAYTNSITRGVYYPDKVFRSSVLHSTQDLFLPFFSNVTWFHAIHVSGTNGTKRFDNPVLPFNDGVYFASTEKSNIIRGWIFGTTLDSKTQSLLIVNNATNVVIKVCEFQFCNDPFLGVYYHKNNKSWMESEFRVYSSANNCTFEYVSQPFLMDLEGKQGNFKNLREFVFKNIDGYFKIYSKHTPINLVRDLPQGFSALEPLVDLPIGINITRFQTLLALHRSYLTPGDSSSGWTAGAAAYYVGYLQPRTFLLKYNENGTITDAVDCALDPLSETKCTLKSFTVEKGIYQTSNFRVQPTESIVRFPNITNLCPFGEVFNATRFASVYAWNRKRISNCVADYSVLYNSASFSTFKCYGVSPTKLNDLCFTNVYADSFVIRGDEVRQIAPGQTGKIADYNYKLPDDFTGCVIAWNSNNLDSKVGGNYNYLYRLFRKSNLKPFERDISTEIYQAGSTPCNGVEGFNCYFPLQSYGFQPTNGVGYQPYRVVVLSFELLHAPATVCGPKKSTNLVKNKCVNFNFNGLTGTGVLTESNKKFLPFQQFGRDIADTTDAVRDPQTLEILDITPCSFGGVSVITPGTNTSNQVAVLYQDVNCTEVPVAIHADQLTPTWRVYSTGSNVFQTRAGCLIGAEHVNNSYECDIPIGAGICASYQTQTNSPRRARSVASQSIIAYTMSLGAENSVAYSNNSIAIPTNFTISVTTEILPVSMTKTSVDCTMYICGDSTECSNLLLQYGSFCTQLNRALTGIAVEQDKNTQEVFAQVKQIYKTPPIKDFGGFNFSQILPDPSKPSKRSFIEDLLFNKVTLADAGFIKQYGDCLGDIAARDLICAQKFNGLTVLPPLLTDEMIAQYTSALLAGTITSGWTFGAGAALQIPFAMQMAYRFNGIGVTQNVLYENQKLIANQFNSAIGKIQDSLSSTASALGKLQDVVNQNAQALNTLVKQLSSNFGAISSVLNDILSRLDPPEAEVQIDRLITGRLQSLQTYVTQQLIRAAEIRASANLAATKMSECVLGQSKRVDFCGKGYHLMSFPQSAPHGVVFLHVTYVPAQEKNFTTAPAICHDGKAHFPREGVFVSNGTHWFVTQRNFYEPQIITTDNTFVSGNCDVVIGIVNNTVYDPLQPELDSFKEELDKYFKNHTSPDVDLGDISGINASVVNIQKEIDRLNEVAKNLNESLIDLQELGKYEQYIKGGSDIIKLLNEQVNKEMQSSNLYMSMSSWCYTHSLDGAGLFLFDHAAEEYEHAKKLIIFLNENNVPVQLTSISAPEHKFEGLTQIFQKAYEHEQHISESINNIVDHAIKSKDHATFNFLQWYVAEQHEEEVLFKDILDKIELIGNENHGLYLADQYVKGIAKSRKS

SEQ ID NO: 97 - protein, 1377 aa, Artificial Sequence
  SARS-CoV-2/Guangdong/20SF028/2020__EPI_ISL_403936 spike protein (1-1211)(K986P_V987P) Ferritin construct
MFVFLVLLPLVSSQCVNLTTRTQLPPAYTNSFTRGVYYPDKVFRSSVLYSTQDLFLPFFSNVTWFHAIHVSGTNGTKRFDNPVLPFNDGVYFASTEKSNIIRGWIFGTTLDSKTQSLLIVNNATNVVIKVCEFQFCNDPFLGVYYHKNNKSWMESEFRVYSSANNCTFEYVSQPFLMDLEGKQGNFKNLREFVFKNIDGYFKIYSKHTPINLVRDLPQGFSALEPLVDLPIGINITRFQTLLALHRSYLTPGDSSSGWTAGAAAYYVGYLQPRTFLLKYNENGTITDAVDCALDPLSETKCTLKSFTVEKGIYQTSNFRVQPTESIVRFPNITNLCPFGEVFNATRFASVYAWNRKRISNCVADYSVLYNSASFSTFKCYGVSPTKLNDLCFTNVYADSFVIRGDEVRQIAPGQTGKIADYNYKLPDDFTGCVIAWNSNNLDSKVGGNYNYLYRLFRKSNLKPFERDISTEIYQAGSTPCNGVEGFNCYFPLQSYGFQPTNGVGYQPYRVVVLSFELLHAPATVCGPKKSTNLVKNKCVNFNFNGLTGTGVLTESNKKFLPFQQFGRDIADTTDAVRDPQTLEILDITPCSFGGVSVITPGTNTSNQVAVLYQDVNCTEVPVAIHADQLTPTWRVYSTGSNVFQTRAGCLIGAEHVNNSYECDIPIGAGICASYQTQTNSPRRARSVASQSIIAYTMSLGAENSVAYSNNSIAIPTNFTISVTTEILPVSMTKTSVDCTMYICGDSTECSNLLLQYGSFCTQLNRALTGIAVEQDKNTQEVFAQVKQIYKTPPIKDFGGFNFSQILPDPSKPSKRSFIEDLLFNKVTLADAGFIKQYGDCLGDIAARDLICAQKFNGLTVLPPLLTDEMIAQYTSALLAGTITSGWTFGAGAALQIPFAMQMAYRFNGIGVTQNVLYENQKLIANQFNSAIGKIQDSLSSTASALGKLQDVVNQNAQALNTLVKQLSSNFGAISSVLNDILSRLDPPEAEVQIDRLITGRLQSLQTYVTQQLIRAAEIRASANLAATKMSECVLGQSKRVDFCGKGYHLMSFPQSAPHGVVFLHVTYVPAQEKNFTTAPAICHDGKAHFPREGVFVSNGTHWFVTQRNFYEPQIITTDNTFVSGNCDVVIGIVNNTVYDPLQPELDSFKEELDKYFKNHTSPDVDLGDISGINASVVNIQKEIDRLNEVAKNLNESLIDLQELGKYEQYIKGGSDIIKLLNEQVNKEMQSSNLYMSMSSWCYTHSLDGAGLFLFDHAAEEYEHAKKLIIFLNENNVPVQLTSISAPEHKFEGLTQIFQKAYEHEQHISESINNIVDHAIKSKDHATFNFLQWYVAEQHEEEVLFKDILDKIELIGNENHGLYLADQYVKGIAKSRKS

SEQ ID NO: 98 - protein, 1377 aa, Artificial Sequence
  SARS-CoV-2/Shenzhen/SZTH-001/2020__EPI_ISL_406592 spike protein (1-1211)(K986P_V987P) Ferritin construct
MFVFLVLLPLVSSQCVNLTTRTQLPPAYTNSFTRGVYYPDKVFRSSVLHSTQDLFLPFFSNVTWFHAIHVSGTNGTKRFDNPVLPFNDGVYFASTEKSNIIRGWIFGTTLDSKTQSLLIVNNATNVVIKVCEFQFCNDPFLGVYYHKNNKSWMESEFRVYSSANNCTFEYVSQPFLMDLEGKQGNFKNLREFVFKNIDGYFKIYSKHTPINLVRDLPQGFSALEPLVDLPIGINITRFQTLLALHRSYLTPGDSSSGWTAGAAAYYVGYLQPRTFLLKYNENGTITDAVDCALDPLSETKCTLKSFTVEKGIYQTSNFRVQPTESIVRFPNITNLCPFGEVFNATRFASVYAWNRKRISNCVADYSVLYNSASFSTFKCYGVSPTKLNDLCFTNVYADSFVIRGDEVRQIAPGQTGKIADYNYKLPDDFTGCVIAWNSNNLDSKVGGNYNYLYRLFRKSNLKPFERDISTEIYQAGSTPCNGVEGFNCYFPLQSYGFQPTNGVGYQPYRVVVLSFELLHAPATVCGPKKSTNLVKNKCVNFNFNGLTGTGVLTESNKKFLPFQQFGRDIADTTDAVRDPQTLEILDITPCSFGGVSVITPGTNTSNQVAVLYQDVNCTEVPVAIHADQLTPTWRVYSTGSNVFQTRAGCLIGAEHVNNSYECDIPIGAGICASYQTQTNSPRRARSVASQSIIAYTMSLGAENSVAYSNNSIAIPTNFTISVTTEILPVSMTKTSVDCTMYICGDSTECSNLLLQYGSFCTQLNRALTGIAVEQDKNTQEVFAQVKQIYKTPPIKDFGGFNFSQILPDPSKPSKRSFIEDLLFNKVTLADAGFIKQYGDCLGDIAARDLICAQKFNGLTVLPPLLTDEMIAQYTSALLAGTITSGWTFGAGAALQIPFAMQMAYRFNGIGVTQNVLYENQKLIANQFNSAIGKIQDSLSSTASALGKLQDVVNQNAQALNTLVKQLSSNFGAISSVLNDILSRLDPPEAEVQIDRLITGRLQSLQTYVTQQLIRAAEIRASANLAATKMSECVLGQSKRVDFCGKGYHLMSFPQSAPHGVVFLHVTYVPAQEKNFTTAPAICHDGKAHFPREGVFVSNGTHWFVTQRNFYEPQIITTDNTFVSGNCDVLIGIVNNTVYDPLQPELDSFKEELDKYFKNHTSPDVDLGDISGINASVVNIQKEIDRLNEVAKNLNESLIDLQELGKYEQYIKGGSDIIKLLNEQVNKEMQSSNLYMSMSSWCYTHSLDGAGLFLFDHAAEEYEHAKKLIIFLNENNVPVQLTSISAPEHKFEGLTQIFQKAYEHEQHISESINNIVDHAIKSKDHATFNFLQWYVAEQHEEEVLFKDILDKIELIGNENHGLYLADQYVKGIAKSRKS

SEQ ID NO: 99 - protein, 1377 aa, Artificial Sequence
  SARS-CoV-2/Shenzhen/SZTH-004/2020__EPI_ISL_406595 spike protein (1-1211)(K986P_V987P) Ferritin construct
MFVFLVLLPLVSSQCVNLTTRTQLPPAYTNSFTRGVYYPDKVFRSSVLHSTQDLFLPFFSNVTWFHAIHVSGTNGTKRFDNPVLPFNDGVYFASTEKSNIIRGWIFGTTLDSKTQSLLIVNNATNVVIKVCEFQFCNDPFLGVYYHKNNKSWMESEFRVYSSANNCTFEYVSQPFLMDLEGKQGNFKNLREFVFKNIDGYFKIYSKHTPINLVRDLPQGFSALEPLVDLPIGINITRFQTLLALHRSYLTPGDSSSGWTAGAAAYYVGYLQPRTFLLKYNENGTITDAVDCALDPLSETKCTLKSFTVEKGIYQTSNFRVQPTESIVRFPNITNLCPFGEVFNATRFASVYAWDRKRISNCVAYYSVLYNSASFSTFKCYGVSPTKLNDLCFTNVYADSFVIRGDEVRQIAPGQTGKIADYNYKLPDDFTGCVIAWNSNNLDSKVGGNYNYLYRLFRKSNLKPFERDISTEIYQAGSTPCNGVEGFNCYFPLQSYGFQPTNGVGYQPYRVVVLSFELLHAPATVCGPKKSTNLVKNKCVNFNFNGLTGTGVLTESNKKFLPFQQFGRDIADTTDAVRDPQTLEILDITPCSFGGVSVITPGTNTSNQVAVLYQDVNCTEVPVAIHADQLTPTWRVYSTGSNVFQTRAGCLIGAEHVNNSYECDIPIGAGICASYQTQTNSPRRARSVASQSIIAYTMSLGAENSVAYSNNSIAIPTNFTISVTTEILPVSMTKTSVDCTMYICGDSTECSNLLLQYGSFCTQLNRALTGIAVEQDKNTQEVFAQVKQIYKTPPIKDFGGFNFSQILPDPSKPSKRSFIEDLLFNKVTLADAGFIKQYGDCLGDIAARDLICAQKFNGLTVLPPLLTDEMIAQYTSALLAGTITSGWTFGAGAALQIPFAMQMAYRFNGIGVTQNVLYENQKLIANQFNSAIGKIQDSLSSTASALGKLQDVVNQNAQALNTLVKQLSSNFGAISSVLNDILSRLDPPEAEVQIDRLITGRLQSLQTYVTQQLIRAAEIRASANLAATKMSECVLGQSKRVDFCGKGYHLMSFPQSAPHGVVFLHVTYVPAQEKNFTTAPAICHDGKAHFPREGVFVSNGTHWFVTQRNFYEPQIITTDNTFVSGNCDVVIGIVNNTVYDPLQPELDSFKEELDKYFKNHTSPDVDLGDISGINASVVNIQKEIDRLNEVAKNLNESLIDLQELGKYEQYIKGGSDIIKLLNEQVNKEMQSSNLYMSMSSWCYTHSLDGAGLFLFDHAAEEYEHAKKLIIFLNENNVPVQLTSISAPEHKFEGLTQIFQKAYEHEQHISESINNIVDHAIKSKDHATFNFLQWYVAEQHEEEVLFKDILDKIELIGNENHGLYLADQYVKGIAKSRKS

SEQ ID NO: 100 - protein, 1377 aa, Artificial Sequence
  SARS-CoV-2/France/IDF0372/2020__EPI_ISL_406596 spike protein (1-1211)(K986P_V987P) Ferritin construct
MFVFLVLLPLVSSQCVNLTTRTQLPPAYTNSFTRGVYYPDKVFRSSVLHSTQDLFLPFFSNVTWFHAIHVSGTNGTKRFDNPVLPFNDGVYFASTEKSNIIRGWIFGTTLDSKTQSLLIVNNATNVVIKVCEFQFCNDPFLGVYYHKNNKSWMESEFRVYSSANNCTFEYVSQPFLMDLEGKQGNFKNLREFVFKNIDGYFKIYSKHTPINLVRDLPQGFSALEPLVDLPIGINITRFQTLLALHRSYLTPGDSSSGWTAGAAAYYVGYLQPRTFLLKYNENGTITDAVDCALDPLSETKCTLKSFTVEKGIYQTSNFRVQPTESIVRFPNITNLCPFGEVFNATRFASVYAWNRKRISNCVADYSFLYNSASFSTFKCYGVSPTKLNDLCFTNVYADSFVIRGDEVRQIAPGQTGKIADYNYKLPDDFTGCVIAWNSNNLDSKVGGNYNYLYRLFRKSNLKPFERDISTEIYQAGSTPCNGVEGFNCYFPLQSYGFQPTNGVGYQPYRVVVLSFELLHAPATVCGPKKSTNLVKNKCVNFNFNGLTGTGVLTESNKKFLPFQQFGRDIADTTDAVRDPQTLEILDITPCSFGGVSVITPGTNTSNQVAVLYQDVNCTEVPVAIHADQLTPTWRVYSTGSNVFQTRAGCLIGAEHVNNSYECDIPIGAGICASYQTQTNSPRRARSVASQSIIAYTMSLGAENSVAYSNNSIAIPTNFTISVTTEILPVSMTKTSVDCTMYICGDSTECSNLLLQYGSFCTQLNRALTGIAVEQDKNTQEVFAQVKQIYKTPPIKDFGGFNFSQILPDPSKPSKRSFIEDLLFNKVTLADAGFIKQYGDCLGDIAARDLICAQKFNGLTVLPPLLTDEMIAQYTSALLAGTITSGWTFGAGAALQIPFAMQMAYRFNGIGVTQNVLYENQKLIANQFNSAIGKIQDSLSSTASALGKLQDVVNQNAQALNTLVKQLSSNFGAISSVLNDILSRLDPPEAEVQIDRLITGRLQSLQTYVTQQLIRAAEIRASANLAATKMSECVLGQSKRVDFCGKGYHLMSFPQSAPHGVVFLHVTYVPAQEKNFTTAPAICHDGKAHFPREGVFVSNGTHWFVTQRNFYEPQIITTDNTFVSGNCDVVIGIVNNTVYDPLQPELDSFKEELDKYFKNHTSPDVDLGDISGINASVVNIQKEIDRLNEVAKNLNESLIDLQELGKYEQYIKGGSDIIKLLNEQVNKEMQSSNLYMSMSSWCYTHSLDGAGLFLFDHAAEEYEHAKKLIIFLNENNVPVQLTSISAPEHKFEGLTQIFQKAYEHEQHISESINNIVDHAIKSKDHATFNFLQWYVAEQHEEEVLFKDILDKIELIGNENHGLYLADQYVKGIAKSRKS

SEQ ID NO: 101 - protein, 1377 aa, Artificial Sequence
  SARS-CoV-2/Australia/VIC01/2020__EPI_ISL_406844 spike protein (1-1211)(K986P_V987P) Ferritin construct
MFVFLVLLPLVSSQCVNLTTRTQLPPAYTNSFTRGVYYPDKVFRSSVLHSTQDLFLPFFSNVTWFHAIHVSGTNGTKRFDNPVLPFNDGVYFASTEKSNIIRGWIFGTTLDSKTQSLLIVNNATNVVIKVCEFQFCNDPFLGVYYHKNNKSWMESEFRVYSSANNCTFEYVSQPFLMDLEGKQGNFKNLREFVFKNIDGYFKIYSKHTPINLVRDLPQGFSALEPLVDLPIGINITRFQTLLALHRRYLTPGDSSSGWTAGAAAYYVGYLQPRTFLLKYNENGTITDAVDCALDPLSETKCTLKSFTVEKGIYQTSNFRVQPTESIVRFPNITNLCPFGEVFNATRFASVYAWNRKRISNCVADYSVLYNSASFSTFKCYGVSPTKLNDLCFTNVYADSFVIRGDEVRQIAPGQTGKIADYNYKLPDDFTGCVIAWNSNNLDSKVGGNYNYLYRLFRKSNLKPFERDISTEIYQAGSTPCNGVEGFNCYFPLQSYGFQPTNGVGYQPYRVVVLSFELLHAPATVCGPKKSTNLVKNKCVNFNFNGLTGTGVLTESNKKFLPFQQFGRDIADTTDAVRDPQTLEILDITPCSFGGVSVITPGTNTSNQVAVLYQDVNCTEVPVAIHADQLTPTWRVYSTGSNVFQTRAGCLIGAEHVNNSYECDIPIGAGICASYQTQTNSPRRARSVASQSIIAYTMSLGAENSVAYSNNSIAIPTNFTISVTTEILPVSMTKTSVDCTMYICGDSTECSNLLLQYGSFCTQLNRALTGIAVEQDKNTQEVFAQVKQIYKTPPIKDFGGFNFSQILPDPSKPSKRSFIEDLLFNKVTLADAGFIKQYGDCLGDIAARDLICAQKFNGLTVLPPLLTDEMIAQYTSALLAGTITSGWTFGAGAALQIPFAMQMAYRFNGIGVTQNVLYENQKLIANQFNSAIGKIQDSLSSTASALGKLQDVVNQNAQALNTLVKQLSSNFGAISSVLNDILSRLDPPEAEVQIDRLITGRLQSLQTYVTQQLIRAAEIRASANLAATKMSECVLGQSKRVDFCGKGYHLMSFPQSAPHGVVFLHVTYVPAQEKNFTTAPAICHDGKAHFPREGVFVSNGTHWFVTQRNFYEPQIITTDNTFVSGNCDVVIGIVNNTVYDPLQPELDSFKEELDKYFKNHTSPDVDLGDISGINASVVNIQKEIDRLNEVAKNLNESLIDLQELGKYEQYIKGGSDIIKLLNEQVNKEMQSSNLYMSMSSWCYTHSLDGAGLFLFDHAAEEYEHAKKLIIFLNENNVPVQLTSISAPEHKFEGLTQIFQKAYEHEQHISESINNIVDHAIKSKDHATFNFLQWYVAEQHEEEVLFKDILDKIELIGNENHGLYLADQYVKGIAKSRKS

SEQ ID NO: 102 - protein, 1377 aa, Artificial Sequence
  SARS-CoV-2/Germany/BavPat1/2020__EPI_ISL_406862 spike protein (1-1211)(K986P_V987P) Ferritin construct
MFVFLVLLPLVSSQCVNLTTRTQLPPAYTNSFTRGVYYPDKVFRSSVLHSTQDLFLPFFSNVTWFHAIHVSGTNGTKRFDNPVLPFNDGVYFASTEKSNIIRGWIFGTTLDSKTQSLLIVNNATNVVIKVCEFQFCNDPFLGVYYHKNNKSWMESEFRVYSSANNCTFEYVSQPFLMDLEGKQGNFKNLREFVFKNIDGYFKIYSKHTPINLVRDLPQGFSALEPLVDLPIGINITRFQTLLALHRSYLTPGDSSSGWTAGAAAYYVGYLQPRTFLLKYNENGTITDAVDCALDPLSETKCTLKSFTVEKGIYQTSNFRVQPTESIVRFPNITNLCPFGEVFNATRFASVYAWNRKRISNCVADYSVLYNSASFSTFKCYGVSPTKLNDLCFTNVYADSFVIRGDEVRQIAPGQTGKIADYNYKLPDDFTGCVIAWNSNNLDSKVGGNYNYLYRLFRKSNLKPFERDISTEIYQAGSTPCNGVEGFNCYFPLQSYGFQPTNGVGYQPYRVVVLSFELLHAPATVCGPKKSTNLVKNKCVNFNFNGLTGTGVLTESNKKFLPFQQFGRDIADTTDAVRDPQTLEILDITPCSFGGVSVITPGTNTSNQVAVLYQGVNCTEVPVAIHADQLTPTWRVYSTGSNVFQTRAGCLIGAEHVNNSYECDIPIGAGICASYQTQTNSPRRARSVASQSIIAYTMSLGAENSVAYSNNSIAIPTNFTISVTTEILPVSMTKTSVDCTMYICGDSTECSNLLLQYGSFCTQLNRALTGIAVEQDKNTQEVFAQVKQIYKTPPIKDFGGFNFSQILPDPSKPSKRSFIEDLLFNKVTLADAGFIKQYGDCLGDIAARDLICAQKFNGLTVLPPLLTDEMIAQYTSALLAGTITSGWTFGAGAALQIPFAMQMAYRFNGIGVTQNVLYENQKLIANQFNSAIGKIQDSLSSTASALGKLQDVVNQNAQALNTLVKQLSSNFGAISSVLNDILSRLDPPEAEVQIDRLITGRLQSLQTYVTQQLIRAAEIRASANLAATKMSECVLGQSKRVDFCGKGYHLMSFPQSAPHGVVFLHVTYVPAQEKNFTTAPAICHDGKAHFPREGVFVSNGTHWFVTQRNFYEPQIITTDNTFVSGNCDVVIGIVNNTVYDPLQPELDSFKEELDKYFKNHTSPDVDLGDISGINASVVNIQKEIDRLNEVAKNLNESLIDLQELGKYEQYIKGGSDIIKLLNEQVNKEMQSSNLYMSMSSWCYTHSLDGAGLFLFDHAAEEYEHAKKLIIFLNENNVPVQLTSISAPEHKFEGLTQIFQKAYEHEQHISESINNIVDHAIKSKDHATFNFLQWYVAEQHEEEVLFKDILDKIELIGNENHGLYLADQYVKGIAKSRKS

SEQ ID NO: 103 - protein, 1241 aa, Artificial Sequence
  SARS-CoV-2/Wuhan/WIV05/2019__EPI_ISL_402128 spike protein (1-1211)(K986P_V987P) Foldon construct
MFVFLVLLPLVSSQCVNLTTRTQLPPAYTNSFTRGVYYPDKVFRSSVLHSTQDLFLPFFSNVTWFHAIHVSGTNGTKRFDNPVLPFNDGVYFASTEKSNIIRGWIFGTTLDSKTQSLLIVNNATNVVIKVCEFQFCNDPFLGVYYHKNNKSWMESEFRVYSSANNCTFEYVSQPFLMDLEGKQGNFKNLREFVFKNIDGYFKIYSKHTPINLVRDLPQGFSALEPLVDLPIGINITRFQTLLALHRSYLTPGDSSSGWTAGAAAYYVGYLQPRTFLLKYNENGTITDAVDCALDPLSETKCTLKSFTVEKGIYQTSNFRVQPTESIVRFPNITNLCPFGEVFNATRFASVYAWNRKRISNCVADYSVLYNSASFSTFKCYGVSPTKLNDLCFTNVYADSFVIRGDEVRQIAPGQTGKIADYNYKLPDDFTGCVIAWNSNNLDSKVGGNYNYLYRLFRKSNLKPFERDISTEIYQAGSTPCNGVEGFNCYFPLQSYGFQPTNGVGYQPYRVVVLSFELLHAPATVCGPKKSTNLVKNKCVNFNFNGLTGTGVLTESNKKFLPFQQFGRDIADTTDAVRDPQTLEILDITPCSFGGVSVITPGTNTSNQVAVLYQDVNCTEVPVAIHADQLTPTWRVYSTGSNVFQTRAGCLIGAEHVNNSYECDIPIGAGICASYQTQTNSPRRARSVASQSIIAYTMSLGAENSVAYSNNSIAIPTNFTISVTTEILPVSMTKTSVDCTMYICGDSTECSNLLLQYGSFCTQLNRALTGIAVEQDKNTQEVFAQVKQIYKTPPIKDFGGFNFSQILPDPSKPSKRSFIEDLLFNKVTLADAGFIKQYGDCLGDIAARDLICAQKFNGLTVLPPLLTDEMIAQYTSALLAGTITSGWTFGAGAALQIPFAMQMAYRFNGIGVTQNVLYENQKLIANQFNSAIGKIQDSLSSTASALGKLQDVVNQNAQALNTLVKQLSSNFGAISSVLNDILSRLDPPEAEVQIDRLITGRLQSLQTYVTQQLIRAAEIRASANLAATKMSECVLGQSKRVDFCGKGYHLMSFPQSAPHGVVFLHVTYVPAQEKNFTTAPAICHDGKAHFPREGVFVSNGTHWFVTQRNFYEPQIITTDNTFVSGNCDVVIGIVNNTVYDPLQPELDSFKEELDKYFKNHTSPDVDLGDISGINASVVNIQKEIDRLNEVAKNLNESLIDLQELGKYEQYIKGGSGYIPEAPRDGQAYVRKDGEWVLLSTFL

SEQ ID NO: 104 - protein, 1237 aa, Artificial Sequence
  SARS-CoV-2/bat/Yunnan/RaTG13/2013__EPI_ISL_402131 spike protein (1-1207)(K982P_V983P) Foldon construct
MFVFLVLLPLVSSQCVNLTTRTQLPPAYTNSSTRGVYYPDKVFRSSVLHLTQDLFLPFFSNVTWFHAIHVSGTNGIKRFDNPVLPFNDGVYFASTEKSNIIRGWIFGTTLDSKTQSLLIVNNATNVVIKVCEFQFCNDPFLGVYYHKNNKSWMESEFRVYSSANNCTFEYVSQPFLMDLEGKQGNFKNLREFVFKNIDGYFKIYSKHTPINLVRDLPPGFSALEPLVDLPIGINITRFQTLLALHRSYLTPGDSSSGWTAGAAAYYVGYLQPRTFLLKYNENGTITDAVDCALDPLSETKCTLKSFTVEKGIYQTSNFRVQPTDSIVRFPNITNLCPFGEVFNATTFASVYAWNRKRISNCVADYSVLYNSTSFSTFKCYGVSPTKLNDLCFTNVYADSFVITGDEVRQIAPGQTGKIADYNYKLPDDFTGCVIAWNSKHIDAKEGGNFNYLYRLFRKANLKPFERDISTEIYQAGSKPCNGQTGLNCYYPLYRYGFYPTDGVGHQPYRVVVLSFELLNAPATVCGPKKSTNLVKNKCVNFNFNGLTGTGVLTESNKKFLPFQQFGRDIADTTDAVRDPQTLEILDITPCSFGGVSVITPGTNASNQVAVLYQDVNCTEVPVAIHADQLTPTWRVYSTGSNVFQTRAGCLIGAEHVNNSYECDIPIGAGICASYQTQTNSRSVASQSIIAYTMSLGAENSVAYSNNSIAIPTNFTISVTTEILPVSMTKTSVDCTMYICGDSTECSNLLLQYGSFCTQLNRALTGIAVEQDKNTQEVFAQVKQIYKTPPIKDFGGFNFSQILPDPSKPSKRSFIEDLLFNKVTLADAGFIKQYGDCLGDIAARDLICAQKFNGLTVLPPLLTDEMIAQYTSALLAGTITSGWTFGAGAALQIPFAMQMAYRFNGIGVTQNVLYENQKLIANQFNSAIGKIQDSLSSTASALGKLQDVVNQNAQALNTLVKQLSSNFGAISSVLNDILSRLDPPEAEVQIDRLITGRLQSLQTYVTQQLIRAAEIRASANLAATKMSECVLGQSKRVDFCGKGYHLMSFPQSAPHGVVFLHVTYVPAQEKNFTTAPAICHDGKAHFPREGVFVSNGTHWFVTQRNFYEPQIITTDNTFVSGSCDVVIGIVNNTVYDPLQPELDSFKEELDKYFKNHTSPDVDLGDISGINASVVNIQKEIDRLNEVAKNLNESLIDLQELGKYEQYIKGGSGYIPEAPRDGQAYVRKDGEWVLLSTFL

SEQ ID NO: 105 - protein, 1241 aa, Artificial Sequence
  SARS-CoV-2/Wuhan/HBCDC-HB-01/2019__EPI_ISL_402132 spike protein (1-1211)(K986P_V987P) Foldon construct
MFVFLVLLPLVSSQCVNLTTRTQLPPAYTNSITRGVYYPDKVFRSSVLHSTQDLFLPFFSNVTWFHAIHVSGTNGTKRFDNPVLPFNDGVYFASTEKSNIIRGWIFGTTLDSKTQSLLIVNNATNVVIKVCEFQFCNDPFLGVYYHKNNKSWMESEFRVYSSANNCTFEYVSQPFLMDLEGKQGNFKNLREFVFKNIDGYFKIYSKHTPINLVRDLPQGFSALEPLVDLPIGINITRFQTLLALHRSYLTPGDSSSGWTAGAAAYYVGYLQPRTFLLKYNENGTITDAVDCALDPLSETKCTLKSFTVEKGIYQTSNFRVQPTESIVRFPNITNLCPFGEVFNATRFASVYAWNRKRISNCVADYSVLYNSASFSTFKCYGVSPTKLNDLCFTNVYADSFVIRGDEVRQIAPGQTGKIADYNYKLPDDFTGCVIAWNSNNLDSKVGGNYNYLYRLFRKSNLKPFERDISTEIYQAGSTPCNGVEGFNCYFPLQSYGFQPTNGVGYQPYRVVVLSFELLHAPATVCGPKKSTNLVKNKCVNFNFNGLTGTGVLTESNKKFLPFQQFGRDIADTTDAVRDPQTLEILDITPCSFGGVSVITPGTNTSNQVAVLYQDVNCTEVPVAIHADQLTPTWRVYSTGSNVFQTRAGCLIGAEHVNNSYECDIPIGAGICASYQTQTNSPRRARSVASQSIIAYTMSLGAENSVAYSNNSIAIPTNFTISVTTEILPVSMTKTSVDCTMYICGDSTECSNLLLQYGSFCTQLNRALTGIAVEQDKNTQEVFAQVKQIYKTPPIKDFGGFNFSQILPDPSKPSKRSFIEDLLFNKVTLADAGFIKQYGDCLGDIAARDLICAQKFNGLTVLPPLLTDEMIAQYTSALLAGTITSGWTFGAGAALQIPFAMQMAYRFNGIGVTQNVLYENQKLIANQFNSAIGKIQDSLSSTASALGKLQDVVNQNAQALNTLVKQLSSNFGAISSVLNDILSRLDPPEAEVQIDRLITGRLQSLQTYVTQQLIRAAEIRASANLAATKMSECVLGQSKRVDFCGKGYHLMSFPQSAPHGVVFLHVTYVPAQEKNFTTAPAICHDGKAHFPREGVFVSNGTHWFVTQRNFYEPQIITTDNTFVSGNCDVVIGIVNNTVYDPLQPELDSFKEELDKYFKNHTSPDVDLGDISGINASVVNIQKEIDRLNEVAKNLNESLIDLQELGKYEQYIKGGSGYIPEAPRDGQAYVRKDGEWVLLSTFL

SEQ ID NO: 106 - protein, 1241 aa, Artificial Sequence
  SARS-CoV-2/Guangdong/20SF028/2020__EPI_ISL_403936 spike protein (1-1211)(K986P_V987P) Foldon construct
MFVFLVLLPLVSSQCVNLTTRTQLPPAYTNSFTRGVYYPDKVFRSSVLYSTQDLFLPFFSNVTWFHAIHVSGTNGTKRFDNPVLPFNDGVYFASTEKSNIIRGWIFGTTLDSKTQSLLIVNNATNVVIKVCEFQFCNDPFLGVYYHKNNKSWMESEFRVYSSANNCTFEYVSQPFLMDLEGKQGNFKNLREFVFKNIDGYFKIYSKHTPINLVRDLPQGFSALEPLVDLPIGINITRFQTLLALHRSYLTPGDSSSGWTAGAAAYYVGYLQPRTFLLKYNENGTITDAVDCALDPLSETKCTLKSFTVEKGIYQTSNFRVQPTESIVRFPNITNLCPFGEVFNATRFASVYAWNRKRISNCVADYSVLYNSASFSTFKCYGVSPTKLNDLCFTNVYADSFVIRGDEVRQIAPGQTGKIADYNYKLPDDFTGCVIAWNSNNLDSKVGGNYNYLYRLFRKSNLKPFERDISTEIYQAGSTPCNGVEGFNCYFPLQSYGFQPTNGVGYQPYRVVVLSFELLHAPATVCGPKKSTNLVKNKCVNFNFNGLTGTGVLTESNKKFLPFQQFGRDIADTTDAVRDPQTLEILDITPCSFGGVSVITPGTNTSNQVAVLYQDVNCTEVPVAIHADQLTPTWRVYSTGSNVFQTRAGCLIGAEHVNNSYECDIPIGAGICASYQTQTNSPRRARSVASQSIIAYTMSLGAENSVAYSNNSIAIPTNFTISVTTEILPVSMTKTSVDCTMYICGDSTECSNLLLQYGSFCTQLNRALTGIAVEQDKNTQEVFAQVKQIYKTPPIKDFGGFNFSQILPDPSKPSKRSFIEDLLFNKVTLADAGFIKQYGDCLGDIAARDLICAQKFNGLTVLPPLLTDEMIAQYTSALLAGTITSGWTFGAGAALQIPFAMQMAYRFNGIGVTQNVLYENQKLIANQFNSAIGKIQDSLSSTASALGKLQDVVNQNAQALNTLVKQLSSNFGAISSVLNDILSRLDPPEAEVQIDRLITGRLQSLQTYVTQQLIRAAEIRASANLAATKMSECVLGQSKRVDFCGKGYHLMSFPQSAPHGVVFLHVTYVPAQEKNFTTAPAICHDGKAHFPREGVFVSNGTHWFVTQRNFYEPQIITTDNTFVSGNCDVVIGIVNNTVYDPLQPELDSFKEELDKYFKNHTSPDVDLGDISGINASVVNIQKEIDRLNEVAKNLNESLIDLQELGKYEQYIKGGSGYIPEAPRDGQAYVRKDGEWVLLSTFL

SEQ ID NO: 107 - protein, 1241 aa, Artificial Sequence
  SARS-CoV-2/Shenzhen/SZTH-001/2020__EPI_ISL_406592 spike protein (1-1211)(K986P_V987P) Foldon construct
MFVFLVLLPLVSSQCVNLTTRTQLPPAYTNSFTRGVYYPDKVFRSSVLHSTQDLFLPFFSNVTWFHAIHVSGTNGTKRFDNPVLPFNDGVYFASTEKSNIIRGWIFGTTLDSKTQSLLIVNNATNVVIKVCEFQFCNDPFLGVYYHKNNKSWMESEFRVYSSANNCTFEYVSQPFLMDLEGKQGNFKNLREFVFKNIDGYFKIYSKHTPINLVRDLPQGFSALEPLVDLPIGINITRFQTLLALHRSYLTPGDSSSGWTAGAAAYYVGYLQPRTFLLKYNENGTITDAVDCALDPLSETKCTLKSFTVEKGIYQTSNFRVQPTESIVRFPNITNLCPFGEVFNATRFASVYAWNRKRISNCVADYSVLYNSASFSTFKCYGVSPTKLNDLCFTNVYADSFVIRGDEVRQIAPGQTGKIADYNYKLPDDFTGCVIAWNSNNLDSKVGGNYNYLYRLFRKSNLKPFERDISTEIYQAGSTPCNGVEGFNCYFPLQSYGFQPTNGVGYQPYRVVVLSFELLHAPATVCGPKKSTNLVKNKCVNFNFNGLTGTGVLTESNKKFLPFQQFGRDIADTTDAVRDPQTLEILDITPCSFGGVSVITPGTNTSNQVAVLYQDVNCTEVPVAIHADQLTPTWRVYSTGSNVFQTRAGCLIGAEHVNNSYECDIPIGAGICASYQTQTNSPRRARSVASQSIIAYTMSLGAENSVAYSNNSIAIPTNFTISVTTEILPVSMTKTSVDCTMYICGDSTECSNLLLQYGSFCTQLNRALTGIAVEQDKNTQEVFAQVKQIYKTPPIKDFGGFNFSQILPDPSKPSKRSFIEDLLFNKVTLADAGFIKQYGDCLGDIAARDLICAQKFNGLTVLPPLLTDEMIAQYTSALLAGTITSGWTFGAGAALQIPFAMQMAYRFNGIGVTQNVLYENQKLIANQFNSAIGKIQDSLSSTASALGKLQDVVNQNAQALNTLVKQLSSNFGAISSVLNDILSRLDPPEAEVQIDRLITGRLQSLQTYVTQQLIRAAEIRASANLAATKMSECVLGQSKRVDFCGKGYHLMSFPQSAPHGVVFLHVTYVPAQEKNFTTAPAICHDGKAHFPREGVFVSNGTHWFVTQRNFYEPQIITTDNTFVSGNCDVLIGIVNNTVYDPLQPELDSFKEELDKYFKNHTSPDVDLGDISGINASVVNIQKEIDRLNEVAKNLNESLIDLQELGKYEQYIKGGSGYIPEAPRDGQAYVRKDGEWVLLSTFL

SEQ ID NO: 108 - protein, 1241 aa, Artificial Sequence
  SARS-CoV-2/Shenzhen/SZTH-004/2020__EPI_ISL_406595 spike protein (1-1211)(K986P_V987P) Foldon construct
MFVFLVLLPLVSSQCVNLTTRTQLPPAYTNSFTRGVYYPDKVFRSSVLHSTQDLFLPFFSNVTWFHAIHVSGTNGTKRFDNPVLPFNDGVYFASTEKSNIIRGWIFGTTLDSKTQSLLIVNNATNVVIKVCEFQFCNDPFLGVYYHKNNKSWMESEFRVYSSANNCTFEYVSQPFLMDLEGKQGNFKNLREFVFKNIDGYFKIYSKHTPINLVRDLPQGFSALEPLVDLPIGINITRFQTLLALHRSYLTPGDSSSGWTAGAAAYYVGYLQPRTFLLKYNENGTITDAVDCALDPLSETKCTLKSFTVEKGIYQTSNFRVQPTESIVRFPNITNLCPFGEVFNATRFASVYAWDRKRISNCVAYYSVLYNSASFSTFKCYGVSPTKLNDLCFTNVYADSFVIRGDEVRQIAPGQTGKIADYNYKLPDDFTGCVIAWNSNNLDSKVGGNYNYLYRLFRKSNLKPFERDISTEIYQAGSTPCNGVEGFNCYFPLQSYGFQPTNGVGYQPYRVVVLSFELLHAPATVCGPKKSTNLVKNKCVNFNFNGLTGTGVLTESNKKFLPFQQFGRDIADTTDAVRDPQTLEILDITPCSFGGVSVITPGTNTSNQVAVLYQDVNCTEVPVAIHADQLTPTWRVYSTGSNVFQTRAGCLIGAEHVNNSYECDIPIGAGICASYQTQTNSPRRARSVASQSIIAYTMSLGAENSVAYSNNSIAIPTNFTISVTTEILPVSMTKTSVDCTMYICGDSTECSNLLLQYGSFCTQLNRALTGIAVEQDKNTQEVFAQVKQIYKTPPIKDFGGFNFSQILPDPSKPSKRSFIEDLLFNKVTLADAGFIKQYGDCLGDIAARDLICAQKFNGLTVLPPLLTDEMIAQYTSALLAGTITSGWTFGAGAALQIPFAMQMAYRFNGIGVTQNVLYENQKLIANQFNSAIGKIQDSLSSTASALGKLQDVVNQNAQALNTLVKQLSSNFGAISSVLNDILSRLDPPEAEVQIDRLITGRLQSLQTYVTQQLIRAAEIRASANLAATKMSECVLGQSKRVDFCGKGYHLMSFPQSAPHGVVFLHVTYVPAQEKNFTTAPAICHDGKAHFPREGVFVSNGTHWFVTQRNFYEPQIITTDNTFVSGNCDVVIGIVNNTVYDPLQPELDSFKEELDKYFKNHTSPDVDLGDISGINASVVNIQKEIDRLNEVAKNLNESLIDLQELGKYEQYIKGGSGYIPEAPRDGQAYVRKDGEWVLLSTFL

SEQ ID NO: 109 - protein, 1241 aa, Artificial Sequence
  SARS-CoV-2/France/IDF0372/2020__EPI_ISL_406596 spike protein (1-1211)(K986P_V987P) Foldon construct
MFVFLVLLPLVSSQCVNLTTRTQLPPAYTNSFTRGVYYPDKVFRSSVLHSTQDLFLPFFSNVTWFHAIHVSGTNGTKRFDNPVLPFNDGVYFASTEKSNIIRGWIFGTTLDSKTQSLLIVNNATNVVIKVCEFQFCNDPFLGVYYHKNNKSWMESEFRVYSSANNCTFEYVSQPFLMDLEGKQGNFKNLREFVFKNIDGYFKIYSKHTPINLVRDLPQGFSALEPLVDLPIGINITRFQTLLALHRSYLTPGDSSSGWTAGAAAYYVGYLQPRTFLLKYNENGTITDAVDCALDPLSETKCTLKSFTVEKGIYQTSNFRVQPTESIVRFPNITNLCPFGEVFNATRFASVYAWNRKRISNCVADYSFLYNSASFSTFKCYGVSPTKLNDLCFTNVYADSFVIRGDEVRQIAPGQTGKIADYNYKLPDDFTGCVIAWNSNNLDSKVGGNYNYLYRLFRKSNLKPFERDISTEIYQAGSTPCNGVEGFNCYFPLQSYGFQPTNGVGYQPYRVVVLSFELLHAPATVCGPKKSTNLVKNKCVNFNFNGLTGTGVLTESNKKFLPFQQFGRDIADTTDAVRDPQTLEILDITPCSFGGVSVITPGTNTSNQVAVLYQDVNCTEVPVAIHADQLTPTWRVYSTGSNVFQTRAGCLIGAEHVNNSYECDIPIGAGICASYQTQTNSPRRARSVASQSIIAYTMSLGAENSVAYSNNSIAIPTNFTISVTTEILPVSMTKTSVDCTMYICGDSTECSNLLLQYGSFCTQLNRALTGIAVEQDKNTQEVFAQVKQIYKTPPIKDFGGFNFSQILPDPSKPSKRSFIEDLLFNKVTLADAGFIKQYGDCLGDIAARDLICAQKFNGLTVLPPLLTDEMIAQYTSALLAGTITSGWTFGAGAALQIPFAMQMAYRFNGIGVTQNVLYENQKLIANQFNSAIGKIQDSLSSTASALGKLQDVVNQNAQALNTLVKQLSSNFGAISSVLNDILSRLDPPEAEVQIDRLITGRLQSLQTYVTQQLIRAAEIRASANLAATKMSECVLGQSKRVDFCGKGYHLMSFPQSAPHGVVFLHVTYVPAQEKNFTTAPAICHDGKAHFPREGVFVSNGTHWFVTQRNFYEPQIITTDNTFVSGNCDVVIGIVNNTVYDPLQPELDSFKEELDKYFKNHTSPDVDLGDISGINASVVNIQKEIDRLNEVAKNLNESLIDLQELGKYEQYIKGGSGYIPEAPRDGQAYVRKDGEWVLLSTFL

SEQ ID NO: 110 - protein, 1241 aa, Artificial Sequence
  SARS-CoV-2/Australia/VIC01/2020__EPI_ISL_406844 spike protein (1-1211)(K986P_V987P) Foldon construct
MFVFLVLLPLVSSQCVNLTTRTQLPPAYTNSFTRGVYYPDKVFRSSVLHSTQDLFLPFFSNVTWFHAIHVSGTNGTKRFDNPVLPFNDGVYFASTEKSNIIRGWIFGTTLDSKTQSLLIVNNATNVVIKVCEFQFCNDPFLGVYYHKNNKSWMESEFRVYSSANNCTFEYVSQPFLMDLEGKQGNFKNLREFVFKNIDGYFKIYSKHTPINLVRDLPQGFSALEPLVDLPIGINITRFQTLLALHRRYLTPGDSSSGWTAGAAAYYVGYLQPRTFLLKYNENGTITDAVDCALDPLSETKCTLKSFTVEKGIYQTSNFRVQPTESIVRFPNITNLCPFGEVFNATRFASVYAWNRKRISNCVADYSVLYNSASFSTFKCYGVSPTKLNDLCFTNVYADSFVIRGDEVRQIAPGQTGKIADYNYKLPDDFTGCVIAWNSNNLDSKVGGNYNYLYRLFRKSNLKPFERDISTEIYQAGSTPCNGVEGFNCYFPLQSYGFQPTNGVGYQPYRVVVLSFELLHAPATVCGPKKSTNLVKNKCVNFNFNGLTGTGVLTESNKKFLPFQQFGRDIADTTDAVRDPQTLEILDITPCSFGGVSVITPGTNTSNQVAVLYQDVNCTEVPVAIHADQLTPTWRVYSTGSNVFQTRAGCLIGAEHVNNSYECDIPIGAGICASYQTQTNSPRRARSVASQSIIAYTMSLGAENSVAYSNNSIAIPTNFTISVTTEILPVSMTKTSVDCTMYICGDSTECSNLLLQYGSFCTQLNRALTGIAVEQDKNTQEVFAQVKQIYKTPPIKDFGGFNFSQILPDPSKPSKRSFIEDLLFNKVTLADAGFIKQYGDCLGDIAARDLICAQKFNGLTVLPPLLTDEMIAQYTSALLAGTITSGWTFGAGAALQIPFAMQMAYRFNGIGVTQNVLYENQKLIANQFNSAIGKIQDSLSSTASALGKLQDVVNQNAQALNTLVKQLSSNFGAISSVLNDILSRLDPPEAEVQIDRLITGRLQSLQTYVTQQLIRAAEIRASANLAATKMSECVLGQSKRVDFCGKGYHLMSFPQSAPHGVVFLHVTYVPAQEKNFTTAPAICHDGKAHFPREGVFVSNGTHWFVTQRNFYEPQIITTDNTFVSGNCDVVIGIVNNTVYDPLQPELDSFKEELDKYFKNHTSPDVDLGDISGINASVVNIQKEIDRLNEVAKNLNESLIDLQELGKYEQYIKGGSGYIPEAPRDGQAYVRKDGEWVLLSTFL

SEQ ID NO: 111 - protein, 1241 aa, Artificial Sequence
  SARS-CoV-2/Germany/BavPat1/2020__EPI_ISL_406862 spike protein (1-1211)(K986P_V987P) Foldon construct
MFVFLVLLPLVSSQCVNLTTRTQLPPAYTNSFTRGVYYPDKVFRSSVLHSTQDLFLPFFSNVTWFHAIHVSGTNGTKRFDNPVLPFNDGVYFASTEKSNIIRGWIFGTTLDSKTQSLLIVNNATNVVIKVCEFQFCNDPFLGVYYHKNNKSWMESEFRVYSSANNCTFEYVSQPFLMDLEGKQGNFKNLREFVFKNIDGYFKIYSKHTPINLVRDLPQGFSALEPLVDLPIGINITRFQTLLALHRSYLTPGDSSSGWTAGAAAYYVGYLQPRTFLLKYNENGTITDAVDCALDPLSETKCTLKSFTVEKGIYQTSNFRVQPTESIVRFPNITNLCPFGEVFNATRFASVYAWNRKRISNCVADYSVLYNSASFSTFKCYGVSPTKLNDLCFTNVYADSFVIRGDEVRQIAPGQTGKIADYNYKLPDDFTGCVIAWNSNNLDSKVGGNYNYLYRLFRKSNLKPFERDISTEIYQAGSTPCNGVEGFNCYFPLQSYGFQPTNGVGYQPYRVVVLSFELLHAPATVCGPKKSTNLVKNKCVNFNFNGLTGTGVLTESNKKFLPFQQFGRDIADTTDAVRDPQTLEILDITPCSFGGVSVITPGTNTSNQVAVLYQGVNCTEVPVAIHADQLTPTWRVYSTGSNVFQTRAGCLIGAEHVNNSYECDIPIGAGICASYQTQTNSPRRARSVASQSIIAYTMSLGAENSVAYSNNSIAIPTNFTISVTTEILPVSMTKTSVDCTMYICGDSTECSNLLLQYGSFCTQLNRALTGIAVEQDKNTQEVFAQVKQIYKTPPIKDFGGFNFSQILPDPSKPSKRSFIEDLLFNKVTLADAGFIKQYGDCLGDIAARDLICAQKFNGLTVLPPLLTDEMIAQYTSALLAGTITSGWTFGAGAALQIPFAMQMAYRFNGIGVTQNVLYENQKLIANQFNSAIGKIQDSLSSTASALGKLQDVVNQNAQALNTLVKQLSSNFGAISSVLNDILSRLDPPEAEVQIDRLITGRLQSLQTYVTQQLIRAAEIRASANLAATKMSECVLGQSKRVDFCGKGYHLMSFPQSAPHGVVFLHVTYVPAQEKNFTTAPAICHDGKAHFPREGVFVSNGTHWFVTQRNFYEPQIITTDNTFVSGNCDVVIGIVNNTVYDPLQPELDSFKEELDKYFKNHTSPDVDLGDISGINASVVNIQKEIDRLNEVAKNLNESLIDLQELGKYEQYIKGGSGYIPEAPRDGQAYVRKDGEWVLLSTFL

SEQ ID NO: 112 - protein, 153 aa, Artificial Sequence
  Aa/VF5_ribH(C37A_N102D) Lumazine Synthase (LumSynth)
QIYEGKLTAEGLRFGIVASRFNHALVDRLVEGAIDAIVRHGGREEDITLVRVPGSWEIPVAAGELARKEDIDAVIAIGVLIRGATPHFDYIASEVSKGLADLSLELRKPITFGVITADTLEQAIERAGTKHGNKGWEAALSAIEMANLFKSLR

SEQ ID NO: 113 - protein, 163 aa, Artificial Sequence
  Hp/J99_pfr(5-167_N19Q) Ferritin
DIIKLLNEQVNKEMQSSNLYMSMSSWCYTHSLDGAGLFLFDHAAEEYEHAKKLIIFLNENNVPVQLTSISAPEHKFEGLTQIFQKAYEHEQHISESINNIVDHAIKSKDHATFNFLQWYVAEQHEEEVLFKDILDKIELIGNENHGLYLADQYVKGIAKSRKS

SEQ ID NO: 114 - protein, 27 aa, Artificial Sequence
  BPT4_wac(458-484) Foldon
GYIPEAPRDGQAYVRKDGEWVLLSTFL

SEQ ID NO: 115 - protein, 7 aa, Artificial Sequence
  Linker GGGSGGG
GGGSGGG

SEQ ID NO: 116 - RNA, 3822 nt, Artificial Sequence
  SARS-CoV-2/Wuhan/WIV05/2019__EPI_ISL_402128 spike protein CDS wt (1-1273)
auguuuguuuuucuuguuuuauugccacuagucucuagucaguguguuaaucuuacaaccagaacucaauuacccccugcauacacuaauucuuucacacgugguguuuauuacccugacaaaguuuucagauccucaguuuuacauucaacucaggacuuguucuuaccuuucuuuuccaauguuacuugguuccaugcuauacaugucucugggaccaaugguacuaagagguuugauaacccuguccuaccauuuaaugaugguguuuauuuugcuuccacugagaagucuaacauaauaagaggcuggauuuuugguacuacuuuagauucgaagacccagucccuacuuauuguuaauaacgcuacuaauguuguuauuaaagucugugaauuucaauuuuguaaugauccauuuuuggguguuuauuaccacaaaaacaacaaaaguuggauggaaagugaguucagaguuuauucuagugcgaauaauugcacuuuugaauaugucucucagccuuuucuuauggaccuugaaggaaaacaggguaauuucaaaaaucuuagggaauuuguguuuaagaauauugaugguuauuuuaaaauauauucuaagcacacgccuauuaauuuagugcgugaucucccucaggguuuuucggcuuuagaaccauugguagauuugccaauagguauuaacaucacuagguuucaaacuuuacuugcuuuacauagaaguuauuugacuccuggugauucuucuucagguuggacagcuggugcugcagcuuauuauguggguuaucuucaaccuaggacuuuucuauuaaaauauaaugaaaauggaaccauuacagaugcuguagacugugcacuugacccucucucagaaacaaaguguacguugaaauccuucacuguagaaaaaggaaucuaucaaacuucuaacuuuagaguccaaccaacagaaucuauuguuagauuuccuaauauuacaaacuugugcccuuuuggugaaguuuuuaacgccaccagauuugcaucuguuuaugcuuggaacaggaagagaaucagcaacuguguugcugauuauucuguccuauauaauuccgcaucauuuuccacuuuuaaguguuauggagugucuccuacuaaauuaaaugaucucugcuuuacuaaugucuaugcagauucauuuguaauuagaggugaugaagucagacaaaucgcuccagggcaaacuggaaagauugcugauuauaauuauaaauuaccagaugauuuuacaggcugcguuauagcuuggaauucuaacaaucuugauucuaagguuggugguaauuauaauuaccuguauagauuguuuaggaagucuaaucucaaaccuuuugagagagauauuucaacugaaaucuaucaggccgguagcacaccuuguaaugguguugaagguuuuaauuguuacuuuccuuuacaaucauaugguuuccaacccacuaaugguguugguuaccaaccauacagaguaguaguacuuucuuuugaacuucuacaugcaccagcaacuguuuguggaccuaaaaagucuacuaauuugguuaaaaacaaaugugucaauuucaacuucaaugguuuaacaggcacagguguucuuacugagucuaacaaaaaguuucugccuuuccaacaauuuggcagagacauugcugacacuacugaugcuguccgugauccacagacacuugagauucuugacauuacaccauguucuuuugguggugucaguguuauaacaccaggaacaaauacuucuaaccagguugcuguucuuuaucaggauguuaacugcacagaagucccuguugcuauucaugcagaucaacuuacuccuacuuggcguguuuauucuacagguucuaauguuuuucaaacacgugcaggcuguuuaauaggggcugaacaugucaacaacucauaugagugugacauacccauuggugcagguauaugcgcuaguuaucagacucagacuaauucuccucggcgggcacguaguguagcuagucaauccaucauugccuacacuaugucacuuggugcagaaaauucaguugcuuacucuaauaacucuauugccauacccacaaauuuuacuauuaguguuaccacagaaauucuaccagugucuaugaccaagacaucaguagauuguacaauguacauuuguggugauucaacugaaugcagcaaucuuuuguugcaauauggcaguuuuuguacacaauuaaaccgugcuuuaacuggaauagcuguugaacaagacaaaaacacccaagaaguuuuugcacaagucaaacaaauuuacaaaacaccaccaauuaaagauuuuggugguuuuaauuuuucacaaauauuaccagauccaucaaaaccaagcaagaggucauuuauugaagaucuacuuuucaacaaagugacacuugcagaugcuggcuucaucaaacaauauggugauugccuuggugauauugcugcuagagaccucauuugugcacaaaaguuuaacggccuuacuguuuugccaccuuugcucacagaugaaaugauugcucaauacacuucugcacuguuagcggguacaaucacuucugguuggaccuuuggugcaggugcugcauuacaaauaccauuugcuaugcaaauggcuuauagguuuaaugguauuggaguuacacagaauguucucuaugagaaccaaaaauugauugccaaccaauuuaauagugcuauuggcaaaauucaagacucacuuucuuccacagcaagugcacuuggaaaacuucaagauguggucaaccaaaaugcacaagcuuuaaacacgcuuguuaaacaacuuagcuccaauuuuggugcaauuucaaguguuuuaaaugauauccuuucacgucuugacaaaguugaggcugaagugcaaauugauagguugaucacaggcagacuucaaaguuugcagacauaugugacucaacaauuaauuagagcugcagaaaucagagcuucugcuaaucuugcugcuacuaaaaugucagaguguguacuuggacaaucaaaaagaguugauuuuuguggaaagggcuaucaucuuauguccuucccucagucagcaccucaugguguagucuucuugcaugugacuuaugucccugcacaagaaaagaacuucacaacugcuccugccauuugucaugauggaaaagcacacuuuccucgugaaggugucuuuguuucaaauggcacacacugguuuguaacacaaaggaauuuuuaugaaccacaaaucauuacuacagacaacacauuugugucugguaacugugauguuguaauaggaauugucaacaacacaguuuaugauccuuugcaaccugaauuagacucauucaaggaggaguuagauaaauauuuuaagaaucauacaucaccagauguugauuuaggugacaucucuggcauuaaugcuucaguuguaaacauucaaaaagaaauugaccgccucaaugagguugccaagaauuuaaaugaaucucucaucgaucuccaagaacuuggaaaguaugagcaguauauaaaauggccaugguacauuuggcuagguuuuauagcuggcuugauugccauaguaauggugacaauuaugcuuugcuguaugaccaguugcuguaguugucucaagggcuguuguucuuguggauccugcugcaaauuugaugaagacgacucugagccagugcucaaaggagucaaauuacauuacacauaa

SEQ ID NO: 117 - RNA, 3822 nt, Artificial Sequence
  SARS-CoV-2/Wuhan/WIV02/2019__EPI_ISL_402127 spike protein CDS wt (1-1273)
auguuuguuuuucuuguuuuauugccacuagucucuagucaguguguuaaucuuacaaccagaacucaauuacccccugcauacacuaauucuuucacacgugguguuuauuacccugacaaaguuuucagauccucaguuuuacauucaacucaggacuuguucuuaccuuucuuuuccaauguuacuugguuccaugcuauacaugucucugggaccaaugguacuaagagguuugauaacccuguccuaccauuuaaugaugguguuuauuuugcuuccacugagaagucuaacauaauaagaggcuggauuuuugguacuacuuuagauucgaagacccagucccuacuuauuguuaauaacgcuacuaauguuguuauuaaagucugugaauuucaauuuuguaaugauccauuuuuggguguuuauuaccacaaaaacaacaaaaguuggauggaaagugaguucagaguuuauucuagugcgaauaauugcacuuuugaauaugucucucagccuuuucuuauggaccuugaaggaaaacaggguaauuucaaaaaucuuagggaauuuguguuuaagaauauugaugguuauuuuaaaauauauucuaagcacacgccuauuaauuuagugcgugaucucccucaggguuuuucggcuuuagaaccauugguagauuugccaauagguauuaacaucacuagguuucaaacuuuacuugcuuuacauagaaguuauuugacuccuggugauucuucuucagguuggacagcuggugcugcagcuuauuauguggguuaucuucaaccuaggacuuuucuauuaaaauauaaugaaaauggaaccauuacagaugcuguagacugugcacuugacccucucucagaaacaaaguguacguugaaauccuucacuguagaaaaaggaaucuaucaaacuucuaacuuuagaguccaaccaacagaaucuauuguuagauuuccuaauauuacaaacuugugcccuuuuggugaaguuuuuaacgccaccagauuugcaucuguuuaugcuuggaacaggaagagaaucagcaacuguguugcugauuauucuguccuauauaauuccgcaucauuuuccacuuuuaaguguuauggagugucuccuacuaaauuaaaugaucucugcuuuacuaaugucuaugcagauucauuuguaauuagaggugaugaagucagacaaaucgcuccagggcaaacuggaaagauugcugauuauaauuauaaauuaccagaugauuuuacaggcugcguuauagcuuggaauucuaacaaucuugauucuaagguuggugguaauuauaauuaccuguauagauuguuuaggaagucuaaucucaaaccuuuugagagagauauuucaacugaaaucuaucaggccgguagcacaccuuguaaugguguugaagguuuuaauuguuacuuuccuuuacaaucauaugguuuccaacccacuaaugguguugguuaccaaccauacagaguaguaguacuuucuuuugaacuucuacaugcaccagcaacuguuuguggaccuaaaaagucuacuaauuugguuaaaaacaaaugugucaauuucaacuucaaugguuuaacaggcacagguguucuuacugagucuaacaaaaaguuucugccuuuccaacaauuuggcagagacauugcugacacuacugaugcuguccgugauccacagacacuugagauucuugacauuacaccauguucuuuugguggugucaguguuauaacaccaggaacaaauacuucuaaccagguugcuguucuuuaucaggauguuaacugcacagaagucccuguugcuauucaugcagaucaacuuacuccuacuuggcguguuuauucuacagguucuaauguuuuucaaacacgugcaggcuguuuaauaggggcugaacaugucaacaacucauaugagugugacauacccauuggugcagguauaugcgcuaguuaucagacucagacuaauucuccucggcgggcacguaguguagcuagucaauccaucauugccuacacuaugucacuuggugcagaaaauucaguugcuuacucuaauaacucuauugccauacccacaaauuuuacuauuaguguuaccacagaaauucuaccagugucuaugaccaagacaucaguagauuguacaauguacauuuguggugauucaacugaaugcagcaaucuuuuguugcaauauggcaguuuuuguacacaauuaaaccgugcuuuaacuggaauagcuguugaacaagacaaaaacacccaagaaguuuuugcacaagucaaacaaauuuacaaaacaccaccaauuaaagauuuuggugguuuuaauuuuucacaaauauuaccagauccaucaaaaccaagcaagaggucauuuauugaagaucuacuuuucaacaaagugacacuugcagaugcuggcuucaucaaacaauauggugauugccuuggugauauugcugcuagagaccucauuugugcacaaaaguuuaacggccuuacuguuuugccaccuuugcucacagaugaaaugauugcucaauacacuucugcacuguuagcggguacaaucacuucugguuggaccuuuggugcaggugcugcauuacaaauaccauuugcuaugcaaauggcuuauagguuuaaugguauuggaguuacacagaauguucucuaugagaaccaaaaguugauugccaaccaauuuaauagugcuauuggcaaaauucaagacucacuuucuuccacagcaagugcacuuggaaaacuucaagauguggucaaccaaaaugcacaagcuuuaaacacgcuuguuaaacaacuuagcuccaauuuuggugcaauuucaaguguuuuaaaugauauccuuucacgucuugacaaaguugaggcugaagugcaaauugauagguugaucacaggcagacuucaaaguuugcagacauaugugacucaacaauuaauuagagcugcagaaaucagagcuucugcuaaucuugcugcuacuaaaaugucagaguguguacuuggacaaucaaaaagaguugauuuuuguggaaagggcuaucaucuuauguccuucccucagucagcaccucaugguguagucuucuugcaugugacuuaugucccugcacaagaaaagaacuucacaacugcuccugccauuugucaugauggaaaagcacacuuuccucgugaaggugucuuuguuucaaauggcacacacugguuuguaacacaaaggaauuuuuaugaaccacaaaucauuacuacagacaacacauuugugucugguaacugugauguuguaauaggaauugucaacaacacaguuuaugauccuuugcaaccugaauuagacucauucaaggaggaguuagauaaauauuuuaagaaucauacaucaccagauguugauuuaggugacaucucuggcauuaaugcuucaguuguaaacauucaaaaagaaauugaccgccucaaugagguugccaagaauuuaaaugaaucucucaucgaucuccaagaacuuggaaaguaugagcaguauauaaaauggccaugguacauuuggcuagguuuuauagcuggcuugauugccauaguaauggugacaauuaugcuuugcuguaugaccaguugcuguaguugucucaagggcuguuguucuuguggauccugcugcaaauuugaugaagacgacucugagccagugcucaaaggagucaaauuacauuacacauaa

SEQ ID NO: 118 - RNA, 3810 nt, Artificial Sequence
  SARS-CoV-2/bat/Yunnan/RaTG13/2013__EPI_ISL_402131 spike protein CDS wt (1-1269)
auguuuguuuuucuuguuuuauugccacuaguuucuagucaguguguuaaucuaacaacuagaacucaguuaccuccugcauacaccaacucauccacccguggugucuauuacccugacaaaguuuucagaucuucaguuuuacauuuaacucaggauuuguuuuuaccuuucuucuccaaugugaccugguuccaugcuauacauguuucagggaccaaugguauuaaaagguuugauaacccaguucugccauucaacgauggcgucuauuuugcuuccacugagaagucuaauauaauaagaggauggauuuuugguacuaccuuagauucgaagacccagucucuacuuauuguuaauaacgcuacuaauguuguuauuaaagucugugaauuucaauuuuguaaugauccauuuuuggguguuuauuaccacaaaaacaacaaaaguuggauggaaagugaguucagaguuuacucuagugcgaauaauugcacuuuugaguaugucucucagccuuuucuuauggaccuugaaggaaaacaggguaauuucaaaaaucuuagggaauucguguuuaagaauauugaugguuauuucaaaauauauucuaaacauacgccuauuaauuuagugcgugaucuucccccugguuuuucagcuuuagaaccauugguagaucugccaauagguauuaacaucacuagguuucaaacuuuacuugcuuuacauagaagcuauuugacuccuggugauucuucuucagguuggacagcuggugcugcagcuuauuauguggguuaucuucaaccaaggacuuuucuacuaaaauauaaugagaauggaaccauuacagaugcuguagacugugcacuugacccucuuucagaaacaaaguguacguuaaaauccuucacuguugaaaaaggaauuuaucaaaccucuaacuuuagaguccaaccaacagauucuauuguuagauucccaaauauuacaaacuuauguccuuuuggugaaguuuuuaacgccaccacauucgcaucaguuuaugcuuggaacagaaagagaauuagcaacuguguugcugauuacucuguccuauauaauuccacuucauuuucuaccuuuaaauguuauggagugucuccuacuaaauuaaaugaucucugcuuuacuaauguuuaugcagacucauuugugauuacaggugaugaagucagacaaauugcgccaggacaaacuggaaagauugcugacuacaauuauaaacuaccagaugauuuuacugguuguguuauagcuuggaauucuaagcauauugaugcaaaagagggcgguaauuuuaacuaucuuuaccgucucuuuagaaaagcuaaucuuaaacccuuugagagggauaucucaacugaaauuuaccaagcaggcagcaaaccuuguaauggucaaacuggucuaaauugcuacuacccacuuuauagauauggauuuuacccuacugaugguguuggucaccaaccuuauaggguaguaguacuuucuuuugaacuucuaaaugcaccagcaacuguuuguggaccuaagaagucuacuaacuugguuaaaaauaaaugugucaauuucaacuuuaaugguuuaacuggcacagguguccucacagagucuaauaaaaaguuucuaccuuuccaacaauuugguagagacauugcagacacuacugaugccguccgugauccacagacacuugagauucuugacauuacaccauguucuuuugguggugucaguguuauaacaccuggaacaaaugccucuaaccagguugcuguucuuuaucaggauguuaacugcacagaagucccuguugcuauccaugcagaccaacuuacucccacuuggcguguuuacuccacagguucuaauguuuuucaaacacgugcagguuguuuaauaggggcugaacaugucaauaacucguaugagugugacauaccuauuggugcaggaauaugcgccaguuaucagacucaaacuaauucacguaguguggccagucaaucuauuauugccuacacuaugucacuuggugcagaaaauucaguugcuuauucuaauaacucuauugccauaccuacaaauuuuacuauuagugugaccacugaaauucuaccugugucuaugacaaagacaucgguagacuguacaauguauauuuguggugauucaacugagugcagcaaccuuuuguugcaauaugguaguuuuugcacacaauuaaaucgugcuuuaacuggaauagcuguugaacaggacaaaaauacucaagaaguuuuugcucaaguuaaacaaauuuauaagacaccaccaauuaaagauuuuggugguuucaauuuuucacaaauauuaccagauccaucaaaaccaagcaagaggucauuuauugaggauuuacuuuucaauaaagugacacuugcugaugcuggcuucaucaaacaauauggugauugccuuggugauauugcugcuagggaucuuauuugugcucaaaaguucaauggccuuacuguucugccaccuuugcucacagaugaaaugaucgcucaauacacuucugcacuauuagcagguacaaucacuucugguuggacuuuuggugcaggugcugcuuuacaaauaccauuugccaugcaaauggcuuauagguuuaaugguauuggaguuacacagaauguucucuaugagaaccaaaaauugauugccaaccaguuuaauagugcuauuggcaaaauucaagacucacuuucuucuacagcaagugcacuuggaaaacuucaagauguugucaaccaaaaugcacaagcuuuaaacacgcuuguuaaacaacuuagcuccaauuuuggagcuauuucuagcguguuaaaugauauccuuucacgucucgacaaaguugaggcugaagugcagauugacagguugaucacaggcagacuucaaagcuugcagacauaugugacucaacaauuaauuagagcugcagaaaucagagcuucugccaaucuugcugcuacuaaaaugucagaguguguacucggacaaucaaaaagaguugauuuuuguggaaaaggcuaucaucuuaugucuuucccucagucagcaccucaugguguagucuucuugcaugugacauaugucccugcacaagaaaagaacuucacaacugcuccugccauuugucaugauggaaaagcacacuuuccacgugaagguguuuucguuucaaauggcacacacugguuuguuacacaaaggaauuuuuaugaaccacaaauuauuacaacagacaacacauuugucucugguagcugugauguuguaauaggaauugucaacaacacaguuuaugauccuuugcaaccagaacuugauucauucaaggaggaguuggauaaauacuuuaaaaaucauacaucaccugauguagauuuaggugacauuucuggcauuaaugcuucaguugucaauauucaaaaggaaauugaccgccucaaugagguugccaaaaaucuaaaugaaucucucaucgaucuccaagaacuuggaaaguaugaacaguauauaaaauggccaugguacauuuggcuagguuuuauagcuggcuugauugccauaauaauggucacgauuaugcuuugcuguaugaccaguugcugcaguugucucaagggcuguuguucuugcggaucuugcugcaaauuugaugaagacgacucugagccagugcucaaaggagucaaauuacauuacacauaa

SEQ ID NO: 119 - RNA, 3822 nt, Artificial Sequence
  SARS-CoV-2/Wuhan/HBCDC-HB-01/2019__EPI_ISL_402132 spike protein CDS wt (1-1273)
auguuuguuuuucuuguuuuauugccacuagucucuagucaguguguuaaucuuacaaccagaacucaauuacccccugcauacacuaauucuaucacacgugguguuuauuacccugacaaaguuuucagauccucaguuuuacauucaacucaggacuuguucuuaccuuucuuuuccaauguuacuugguuccaugcuauacaugucucugggaccaaugguacuaagagguuugauaacccuguccuaccauuuaaugaugguguuuauuuugcuuccacugagaagucuaacauaauaagaggcuggauuuuugguacuacuuuagauucgaagacccagucccuacuuauuguuaauaacgcuacuaauguuguuauuaaagucugugaauuucaauuuuguaaugauccauuuuuggguguuuauuaccacaaaaacaacaaaaguuggauggaaagugaguucagaguuuauucuagugcgaauaauugcacuuuugaauaugucucucagccuuuucuuauggaccuugaaggaaaacaggguaauuucaaaaaucuuagggaauuuguguuuaagaauauugaugguuauuuuaaaauauauucuaagcacacgccuauuaauuuagugcgugaucucccucaggguuuuucggcuuuagaaccauugguagauuugccaauagguauuaacaucacuagguuucaaacuuuacuugcuuuacauagaaguuauuugacuccuggugauucuucuucagguuggacagcuggugcugcagcuuauuauguggguuaucuucaaccuaggacuuuucuauuaaaauauaaugaaaauggaaccauuacagaugcuguagacugugcacuugacccucucucagaaacaaaguguacguugaaauccuucacuguagaaaaaggaaucuaucaaacuucuaacuuuagaguccaaccaacagaaucuauuguuagauuuccuaauauuacaaacuugugcccuuuuggugaaguuuuuaacgccaccagauuugcaucuguuuaugcuuggaacaggaagagaaucagcaacuguguugcugauuauucuguccuauauaauuccgcaucauuuuccacuuuuaaguguuauggagugucuccuacuaaauuaaaugaucucugcuuuacuaaugucuaugcagauucauuuguaauuagaggugaugaagucagacaaaucgcuccagggcaaacuggaaagauugcugauuauaauuauaaauuaccagaugauuuuacaggcugcguuauagcuuggaauucuaacaaucuugauucuaagguuggugguaauuauaauuaccuguauagauuguuuaggaagucuaaucucaaaccuuuugagagagauauuucaacugaaaucuaucaggccgguagcacaccuuguaaugguguugaagguuuuaauuguuacuuuccuuuacaaucauaugguuuccaacccacuaaugguguugguuaccaaccauacagaguaguaguacuuucuuuugaacuucuacaugcaccagcaacuguuuguggaccuaaaaagucuacuaauuugguuaaaaacaaaugugucaauuucaacuucaaugguuuaacaggcacagguguucuuacugagucuaacaaaaaguuucugccuuuccaacaauuuggcagagacauugcugacacuacugaugcuguccgugauccacagacacuugagauucuugacauuacaccauguucuuuugguggugucaguguuauaacaccaggaacaaauacuucuaaccagguugcuguucuuuaucaggauguuaacugcacagaagucccuguugcuauucaugcagaucaacuuacuccuacuuggcguguuuauucuacagguucuaauguuuuucaaacacgugcaggcuguuuaauaggggcugaacaugucaacaacucauaugagugugacauacccauuggugcagguauaugcgcuaguuaucagacucagacuaauucuccucggcgggcacguaguguagcuagucaauccaucauugccuacacuaugucacuuggugcagaaaauucaguugcuuacucuaauaacucuauugccauacccacaaauuuuacuauuaguguuaccacagaaauucuaccagugucuaugaccaagacaucaguagauuguacaauguacauuuguggugauucaacugaaugcagcaaucuuuuguugcaauauggcaguuuuuguacacaauuaaaccgugcuuuaacuggaauagcuguugaacaagacaaaaacacccaagaaguuuuugcacaagucaaacaaauuuacaaaacaccaccaauuaaagauuuuggugguuuuaauuuuucacaaauauuaccagauccaucaaaaccaagcaagaggucauuuauugaagaucuacuuuucaacaaagugacacuugcagaugcuggcuucaucaaacaauauggugauugccuuggugauauugcugcuagagaccucauuugugcacaaaaguuuaacggccuuacuguuuugccaccuuugcucacagaugaaaugauugcucaauacacuucugcacuguuagcggguacaaucacuucugguuggaccuuuggugcaggugcugcauuacaaauaccauuugcuaugcaaauggcuuauagguuuaaugguauuggaguuacacagaauguucucuaugagaaccaaaaauugauugccaaccaauuuaauagugcuauuggcaaaauucaagacucacuuucuuccacagcaagugcacuuggaaaacuucaagauguggucaaccaaaaugcacaagcuuuaaacacgcuuguuaaacaacuuagcuccaauuuuggugcaauuucaaguguuuuaaaugauauccuuucacgucuugacaaaguugaggcugaagugcaaauugauagguugaucacaggcagacuucaaaguuugcagacauaugugacucaacaauuaauuagagcugcagaaaucagagcuucugcuaaucuugcugcuacuaaaaugucagaguguguacuuggacaaucaaaaagaguugauuuuuguggaaagggcuaucaucuuauguccuucccucagucagcaccucaugguguagucuucuugcaugugacuuaugucccugcacaagaaaagaacuucacaacugcuccugccauuugucaugauggaaaagcacacuuuccucgugaaggugucuuuguuucaaauggcacacacugguuuguaacacaaaggaauuuuuaugaaccacaaaucauuacuacagacaacacauuugugucugguaacugugauguuguaauaggaauugucaacaacacaguuuaugauccuuugcaaccugaauuagacucauucaaggaggaguuagauaaauauuuuaagaaucauacaucaccagauguugauuuaggugacaucucuggcauuaaugcuucaguuguaaacauucaaaaagaaauugaccgccucaaugagguugccaagaauuuaaaugaaucucucaucgaucuccaagaacuuggaaaguaugagcaguauauaaaauggccaugguacauuuggcuagguuuuauagcuggcuugauugccauaguaauggugacaauuaugcuuugcuguaugaccaguugcuguaguugucucaagggcuguuguucuuguggauccugcugcaaauuugaugaagacgacucugagccagugcucaaaggagucaaauuacauuacacauaa

SEQ ID NO: 120 - RNA, 3822 nt, Artificial Sequence
  SARS-CoV-2/Guangdong/20SF014/2020__EPI_ISL_403934 spike protein CDS wt (1-1273)
auguuuguuuuucuuguuuuauugccacuagucucuagucaguguguuaaucuuacaaccagaacucaauuacccccugcauacacuaauucuuucacacgugguguuuauuacccugacaaaguuuucagauccucaguuuuacauucaacucaggacuuguucuuaccuuucuuuuccaauguuacuugguuccaugcuauacaugucucugggaccaaugguacuaagagguuugauaacccuguccuaccauuuaaugaugguguuuauuuugcuuccacugagaagucuaacauaauaagaggcuggauuuuugguacuacuuuagauucgaagacccagucccuacuuauuguuaauaacgcuacuaauguuguuauuaaagucugugaauuucaauuuuguaaugauccauuuuuggguguuuauuaccacaaaaacaacaaaaguuggauggaaagugaguucagaguuuauucuagugcgaauaauugcacuuuugaauaugucucucagccuuuucuuauggaccuugaaggaaaacaggguaauuucaaaaaucuuagggaauuuguguuuaagaauauugaugguuauuuuaaaauauauucuaagcacacgccuauuaauuuagugcgugaucucccucaggguuuuucggcuuuagaaccauugguagauuugccaauagguauuaacaucacuagguuucaaacuuuacuugcuuuacauagaaguuauuugacuccuggugauucuucuucagguuggacagcuggugcugcagcuuauuauguggguuaucuucaaccuaggacuuuucuauuaaaauauaaugaaaauggaaccauuacagaugcuguagacugugcacuugacccucucucagaaacaaaguguacguugaaauccuucacuguagaaaaaggaaucuaucaaacuucuaacuuuagaguccaaccaacagaaucuauuguuagauuuccuaauauuacaaacuugugcccuuuuggugaaguuuuuaacgccaccagauuugcaucuguuuaugcuuggaacaggaagagaaucagcaacuguguugcugauuauucuguccuauauaauuccgcaucauuuuccacuuuuaaguguuauggagugucuccuacuaaauuaaaugaucucugcuuuacuaaugucuaugcagauucauuuguaauuagaggugaugaagucagacaaaucgcuccagggcaaacuggaaagauugcugauuauaauuauaaauuaccagaugauuuuacaggcugcguuauagcuuggaauucuaacaaucuugauucuaagguuggugguaauuauaauuaccuguauagauuguuuaggaagucuaaucucaaaccuuuugagagagauauuucaacugaaaucuaucaggccgguagcacaccuuguaaugguguugaagguuuuaauuguuacuuuccuuuacaaucauaugguuuccaacccacuaaugguguugguuaccaaccauacagaguaguaguacuuucuuuugaacuucuacaugcaccagcaacuguuuguggaccuaaaaagucuacuaauuugguuaaaaacaaaugugucaauuucaacuucaaugguuuaacaggcacagguguucuuacugagucuaacaaaaaguuucugccuuuccaacaauuuggcagagacauugcugacacuacugaugcuguccgugauccacagacacuugagauucuugacauuacaccauguucuuuugguggugucaguguuauaacaccaggaacaaauacuucuaaccagguugcuguucuuuaucaggauguuaacugcacagaagucccuguugcuauucaugcagaucaacuuacuccuacuuggcguguuuauucuacagguucuaauguuuuucaaacacgugcaggcuguuuaauaggggcugaacaugucaacaacucauaugagugugacauacccauuggugcaggcauaugcgcuaguuaucagacucagacuaauucuccucggcgggcacguaguguagcuagucaauccaucauugccuacacuaugucacuuggugcagaaaauucaguugcuuacucuaauaacucuauugccauacccacaaauuuuacuauuaguguuaccacagaaauucuaccagugucuaugaccaagacaucaguagauuguacaauguacauuuguggugauucaacugaaugcagcaaucuuuuguugcaauauggcaguuuuuguacacaauuaaaccgugcuuuaacuggaauagcuguugaacaagacaaaaacacccaagaaguuuuugcacaagucaaacaaauuuacaaaacaccaccaauuaaagauuuuggugguuuuaauuuuucacaaauauuaccagauccaucaaaaccaagcaagaggucauuuauugaagaucuacuuuucaacaaagugacacuugcagaugcuggcuucaucaaacaauauggugauugccuuggugauauugcugcuagagaccucauuugugcacaaaaguuuaacggccuuacuguuuugccaccuuugcucacagaugaaaugauugcucaauacacuucugcacuguuagcggguacaaucacuucugguuggaccuuuggugcaggugcugcauuacaaauaccauuugcuaugcaaauggcuuauagguuuaaugguauuggaguuacacagaauguucucuaugagaaccaaaaauugauugccaaccaauuuaauagugcuauuggcaaaauucaagacucacuuucuuccacagcaagugcacuuggaaaacuucaagauguggucaaccaaaaugcacaagcuuuaaacacgcuuguuaaacaacuuagcuccaauuuuggugcaauuucaaguguuuuaaaugauauccuuucacgucuugacaaaguugaggcugaagugcaaauugauagguugaucacaggcagacuucaaaguuugcagacauaugugacucaacaauuaauuagagcugcagaaaucagagcuucugcuaaucuugcugcuacuaaaaugucagaguguguacuuggacaaucaaaaagaguugauuuuuguggaaagggcuaucaucuuauguccuucccucagucagcaccucaugguguagucuucuugcaugugacuuaugucccugcacaagaaaagaacuucacaacugcuccugccauuugucaugauggaaaagcacacuuuccucgugaaggugucuuuguuucaaauggcacacacugguuuguaacacaaaggaauuuuuaugaaccacaaaucauuacuacagacaacacauuugugucugguaacugugauguuguaauaggaauugucaacaacacaguuuaugauccuuugcaaccugaauuagacucauucaaggaggaguuagauaaauauuuuaagaaucauacaucaccagauguugauuuaggugacaucucuggcauuaaugcuucaguuguaaacauucaaaaagaaauugaccgccucaaugagguugccaagaauuuaaaugaaucucucaucgaucuccaagaacuuggaaaguaugagcaguauauaaaauggccaugguacauuuggcuagguuuuauagcuggcuugauugccauaguaauggugacaauuaugcuuugcuguaugaccaguugcuguaguugucucaagggcuguuguucuuguggauccugcugcaaauuugaugaagacgacucugagccagugcucaaaggagucaaauuacauuacacauaa

SEQ ID NO: 121 - RNA, 3822 nt, Artificial Sequence
  SARS-CoV-2/Guangdong/20SF028/2020__EPI_ISL_403936 spike protein CDS wt (1-1273)
auguuuguuuuucuuguuuuauugccacuagucucuagucaguguguuaaucuuacaaccagaacucaauuacccccugcauacacuaauucuuucacacgugguguuuauuacccugacaaaguuuucagauccucaguuuuauauucaacucaggacuuguucuuaccuuucuuuuccaauguuacuugguuccaugcuauacaugucucugggaccaaugguacuaagagguuugauaacccuguccuaccauuuaaugaugguguuuauuuugcuuccacugagaagucuaacauaauaagaggcuggauuuuugguacuacuuuagauucgaagacccagucccuacuuauuguuaauaacgcuacuaauguuguuauuaaagucugugaauuucaauuuuguaaugauccauuuuuggguguuuauuaccacaaaaacaacaaaaguuggauggaaagugaguucagaguuuauucuagugcgaauaauugcacuuuugaauaugucucucagccuuuucuuauggaccuugaaggaaaacaggguaauuucaaaaaucuuagggaauuuguguuuaagaauauugaugguuauuuuaaaauauauucuaagcacacgccuauuaauuuagugcgugaucucccucaggguuuuucggcuuuagaaccauugguagauuugccaauagguauuaacaucacuagguuucaaacuuuacuugcuuuacauagaaguuauuugacuccuggugauucuucuucagguuggacagcuggugcugcagcuuauuauguggguuaucuucaaccuaggacuuuucuauuaaaauauaaugaaaauggaaccauuacagaugcuguagacugugcacuugacccucucucagaaacaaaguguacguugaaauccuucacuguagaaaaaggaaucuaucaaacuucuaacuuuagaguccaaccaacagaaucuauuguuagauuuccuaauauuacaaacuugugcccuuuuggugaaguuuuuaacgccaccagauuugcaucuguuuaugcuuggaacaggaagagaaucagcaacuguguugcugauuauucuguccuauauaauuccgcaucauuuuccacuuuuaaguguuauggagugucuccuacuaaauuaaaugaucucugcuuuacuaaugucuaugcagauucauuuguaauuagaggugaugaagucagacaaaucgcuccagggcaaacuggaaagauugcugauuauaauuauaaauuaccagaugauuuuacaggcugcguuauagcuuggaauucuaacaaucuugauucuaagguuggugguaauuauaauuaccuguauagauuguuuaggaagucuaaucucaaaccuuuugagagagauauuucaacugaaaucuaucaggccgguagcacaccuuguaaugguguugaagguuuuaauuguuacuuuccuuuacaaucauaugguuuccaacccacuaaugguguugguuaccaaccauacagaguaguaguacuuucuuuugaacuucuacaugcaccagcaacuguuuguggaccuaaaaagucuacuaauuugguuaaaaacaaaugugucaauuucaacuucaaugguuuaacaggcacagguguucuuacugagucuaacaaaaaguuucugccuuuccaacaauuuggcagagacauugcugacacuacugaugcuguccgugauccacagacacuugagauucuugacauuacaccauguucuuuugguggugucaguguuauaacaccaggaacaaauacuucuaaccagguugcuguucuuuaucaggauguuaacugcacagaagucccuguugcuauucaugcagaucaacuuacuccuacuuggcguguuuauucuacagguucuaauguuuuucaaacacgugcaggcuguuuaauaggggcugaacaugucaacaacucauaugagugugacauacccauuggugcagguauaugcgcuaguuaucagacucagacuaauucuccucggcgggcacguaguguagcuagucaauccaucauugccuacacuaugucacuuggugcagaaaauucaguugcuuacucuaauaacucuauugccauacccacaaauuuuacuauuaguguuaccacagaaauucuaccagugucuaugaccaagacaucaguagauuguacaauguacauuuguggugauucaacugaaugcagcaaucuuuuguugcaauauggcaguuuuuguacacaauuaaaccgugcuuuaacuggaauagcuguugaacaagacaaaaacacccaagaaguuuuugcacaagucaaacaaauuuacaaaacaccaccaauuaaagauuuuggugguuuuaauuuuucacaaauauuaccagauccaucaaaaccaagcaagaggucauuuauugaagaucuacuuuucaacaaagugacacuugcagaugcuggcuucaucaaacaauauggugauugccuuggugauauugcugcuagagaccucauuugugcacaaaaguuuaacggccuuacuguuuugccaccuuugcucacagaugaaaugauugcucaauacacuucugcacuguuagcggguacaaucacuucugguuggaccuuuggugcaggugcugcauuacaaauaccauuugcuaugcaaauggcuuauagguuuaaugguauuggaguuacacagaauguucucuaugagaaccaaaaauugauugccaaccaauuuaauagugcuauuggcaaaauucaagacucacuuucuuccacagcaagugcacuuggaaaacuucaagauguggucaaccaaaaugcacaagcuuuaaacacgcuuguuaaacaacuuagcuccaauuuuggugcaauuucaaguguuuuaaaugauauccuuucacgucuugacaaaguugaggcugaagugcaaauugauagguugaucacaggcagacuucaaaguuugcagacauaugugacucaacaauuaauuagagcugcagaaaucagagcuucugcuaaucuugcugcuacuaaaaugucagaguguguacuuggacaaucaaaaagaguugauuuuuguggaaagggcuaucaucuuauguccuucccucagucagcaccucaugguguagucuucuugcaugugacuuaugucccugcacaagaaaagaacuucacaacugcuccugccauuugucaugauggaaaagcacacuuuccucgugaaggugucuuuguuucaaauggcacacacugguuuguaacacaaaggaauuuuuaugaaccacaaaucauuacuacagacaacacauuugugucugguaacugugauguuguaauaggaauugucaacaacacaguuuaugauccuuugcaaccugaauuagacucauucaaggaggaguuagauaaauauuuuaagaaucauacaucaccagauguugauuuaggugacaucucuggcauuaaugcuucaguuguaaacauucaaaaagaaauugaccgccucaaugagguugccaagaauuuaaaugaaucucucaucgaucuccaagaacuuggaaaguaugagcaguauauaaaauggccaugguacauuuggcuagguuuuauagcuggcuugauugccauaguaauggugacaauuaugcuuugcuguaugaccaguugcuguaguugucucaagggcuguuguucuuguggauccugcugcaaauuugaugaagacgacucugagccagugcucaaaggagucaaauuacauuacacauaa

SEQ ID NO: 122 - RNA, 3822 nt, Artificial Sequence; identical to SEQ ID NO: 121
  SARS-CoV-2/Guangdong/20SF040/2020__EPI_ISL_403937 spike protein CDS wt (1-1273)

SEQ ID NO: 123 - RNA, 3822 nt, Artificial Sequence
  SARS-CoV-2/USA/IL1/2020__EPI_ISL_404253 spike protein CDS wt (1-1273)
auguuuguuuuucuuguuuuauugccacuagucucuagucaguguguuaaucuuacaaccagaacucaauuacccccugcauacacuaauucuuucacacgugguguuuauuacccugacaaaguuuucagauccucaguuuuacauucaacucaggacuuguucuuaccuuucuuuuccaauguuacuugguuccaugcuauacaugucucugggaccaaugguacuaagagguuugauaacccuguccuaccauuuaaugaugguguuuauuuugcuuccacugagaagucuaacauaauaagaggcuggauuuuugguacuacuuuagauucgaagacccagucccuacuuauuguuaauaacgcuacuaauguuguuauuaaagucugugaauuucaauuuuguaaugauccauuuuuggguguuuauuaccacaaaaacaacaaaaguuggauggaaagugaguucagaguuuauucuagugcgaauaauugcacuuuugaauaugucucucagccuuuucuuauggaccuugaaggaaaacaggguaauuucaaaaaucuuagggaauuuguguuuaagaauauugaugguuauuuuaaaauauauucuaagcacacgccuauuaauuuagugcgugaucucccucaggguuuuucggcuuuagaaccauugguagauuugccaauagguauuaacaucacuagguuucaaacuuuacuugcuuuacauagaaguuauuugacuccuggugauucuucuucagguuggacagcuggugcugcagcuuauuauguggguuaucuucaaccuaggacuuuucuauuaaaauauaaugaaaauggaaccauuacagaugcuguagacugugcacuugacccucucucagaaacaaaguguacguugaaauccuucacuguagaaaaaggaaucuaucaaacuucuaacuuuagaguccaaccaacagaaucuauuguuagauuuccuaauauuacaaacuugugcccuuuuggugaaguuuuuaacgccaccagauuugcaucuguuuaugcuuggaacaggaagagaaucagcaacuguguugcugauuauucuguccuauauaauuccgcaucauuuuccacuuuuaaguguuauggagugucuccuacuaaauuaaaugaucucugcuuuacuaaugucuaugcagauucauuuguaauuagaggugaugaagucagacaaaucgcuccagggcaaacuggaaagauugcugauuauaauuauaaauuaccagaugauuuuacaggcugcguuauagcuuggaauucuaacaaucuugauucuaagguuggugguaauuauaauuaccuguauagauuguuuaggaagucuaaucucaaaccuuuugagagagauauuucaacugaaaucuaucaggccgguagcacaccuuguaaugguguugaagguuuuaauuguuacuuuccuuuacaaucauaugguuuccaacccacuaaugguguugguuaccaaccauacagaguaguaguacuuucuuuugaacuucuacaugcaccagcaacuguuuguggaccuaaaaagucuacuaauuugguuaaaaacaaaugugucaauuucaacuucaaugguuuaacaggcacagguguucuuacugagucuaacaaaaaguuucugccuuuccaacaauuuggcagagacauugcugacacuacugaugcuguccgugauccacagacacuugagauucuugacauuacaccauguucuuuugguggugucaguguuauaacaccaggaacaaauacuucuaaccagguugcuguucuuuaucaggauguuaacugcacagaagucccuguugcuauucaugcagaucaacuuacuccuacuuggcguguuuauucuacagguucuaauguuuuucaaacacgugcaggcuguuuaauaggggcugaacaugucaacaacucauaugagugugacauacccauuggugcagguauaugcgcuaguuaucagacucagacuaauucuccucggcgggcacguaguguagcuagucaauccaucauugccuacacuaugucacuuggugcagaaaauucaguugcuuacucuaauaacucuauugccauacccacaaauuuuacuauuaguguuaccacagaaauucuaccagugucuaugaccaagacaucaguagauuguacaauguacauuuguggugauucaacugaaugcagcaaucuuuuguugcaauauggcaguuuuuguacacaauuaaaccgugcuuuaacuggaauagcuguugaacaagacaaaaacacccaagaaguuuuugcacaagucaaacaaauuuacaaaacaccaccaauuaaagauuuuggugguuuuaauuuuucacaaauauuaccagauccaucaaaaccaagcaagaggucauuuauugaagaucuacuuuucaayaaagugacacuugcagaugcuggcuucaucaaacaauauggugauugccuuggugauauugcugcuagagaccucauuugugcacaaaaguuuaacggccuuacuguuuugccaccuuugcucacagaugaaaugauugcucaauacacuucugcacuguuagcggguacaaucacuucugguuggaccuuuggugcaggugcugcauuacaaauaccauuugcuaugcaaauggcuuauagguuuaaugguauuggaguuacacagaauguucucuaugagaaccaaaaauugauugccaaccaauuuaauagugcuauuggcaaaauucaagacucacuuucuuccacagcaagugcacuuggaaaacuucaagauguggucaaccaaaaugcacaagcuuuaaacacgcuuguuaaacaacuuagcuccaauuuuggugcaauuucaaguguuuuaaaugauauccuuucacgucuugacaaaguugaggcugaagugcaaauugauagguugaucacaggcagacuucaaaguuugcagacauaugugacucaacaauuaauuagagcugcagaaaucagagcuucugcuaaucuugcugcuacuaaaaugucagaguguguacuuggacaaucaaaaagaguugauuuuuguggaaagggcuaucaucuuauguccuucccucagucagcaccucaugguguagucuucuugcaugugacuuaugucccugcacaagaaaagaacuucacaacugcuccugccauuugucaugauggaaaagcacacuuuccucgugaaggugucuuuguuucaaauggcacacacugguuuguaacacaaaggaauuuuuaugaaccacaaaucauuacuacagacaacacauuugugucugguaacugugauguuguaauaggaauugucaacaacacaguuuaugauccuuugcaaccugaauuagacucauucaaggaggaguuagauaaauauuuuaagaaucauacaucaccagauguugauuuaggugacaucucuggcauuaaugcuucaguuguaaacauucaaaaagaaauugaccgccucaaugagguugccaagaauuuaaaugaaucucucaucgaucuccaagaacuuggaaaguaugagcaguauauaaaauggccaugguacauuuggcuagguuuuauagcuggcuugauugccauaguaauggugacaauuaugcuuugcuguaugaccaguugcuguaguugucucaagggcuguuguucuuguggauccugcugcaaauuugaugaagacgacucugagccagugcucaaaggagucaaauuacauuacacauaa

SEQ ID NO: 124 - RNA, 3822 nt, Artificial Sequence
  SARS-CoV-2/USA/CA1/2020__EPI_ISL_406034 spike protein CDS wt (1-1273)
auguuuguuuuucuuguuuuauugccacuagucucuagucaguguguuaaucuuacaaccagaacucaauuacccccugcauacacuaauucuuucacacgugguguuuauuacccugacaaaguuuucagauccucaguuuuacauucaacucaggacuuguucuuaccuuucuuuuccaauguuacuugguuccaugcuauacaugucucugggaccaaugguacuaagagguuugauaacccuguccuaccauuuaaugaugguguuuauuuugcuuccacugagaagucuaacauaauaagaggcuggauuuuugguacuacuuuagauucgaagacccagucccuacuuauuguuaauaacgcuacuaauguuguuauuaaagucugugaauuucaauuuuguaaugauccauuuuuggguguuuauuaccacaaaaacaacaaaaguuggauggaaagugaguucagaguuuauucuagugcgaauaauugcacuuuugaauaugucucucagccuuuucuuauggaccuugaaggaaaacaggguaauuucaaaaaucuuagggaauuuguguuuaagaauauugaugguuauuuuaaaauauauucuaagcacacgccuauuaauuuagugcgugaucucccucaggguuuuucggcuuuagaaccauugguagauuugccaauagguauuaacaucacuagguuucaaacuuuacuugcuuuacauagaaguuauuugacuccuggugauucuucuucagguuggacagcuggugcugcagcuuauuauguggguuaucuucaaccuaggacuuuucuauuaaaauauaaugaaaauggaaccauuacagaugcuguagacugugcacuugacccucucucagaaacaaaguguacguugaaauccuucacuguagaaaaaggaaucuaucaaacuucuaacuuuagaguccaaccaacagaaucuauuguuagauuuccuaauauuacaaacuugugcccuuuuggugaaguuuuuaacgccaccagauuugcaucuguuuaugcuuggaacaggaagagaaucagcaacuguguugcugauuauucuguccuauauaauuccgcaucauuuuccacuuuuaaguguuauggagugucuccuacuaaauuaaaugaucucugcuuuacuaaugucuaugcagauucauuuguaauuagaggugaugaagucagacaaaucgcuccagggcaaacuggaaagauugcugauuauaauuauaaauuaccagaugauuuuacaggcugcguuauagcuuggaauucuaacaaucuugauucuaagguuggugguaauuauaauuaccuguauagauuguuuaggaagucuaaucucaaaccuuuugagagagauauuucaacugaaaucuaucaggccgguagcacaccuuguaaugguguugaagguuuuaauuguuacuuuccuuuacaaucauaugguuuccaacccacuaaugguguugguuaccaaccauacagaguaguaguacuuucuuuugaacuucuacaugcaccagcaacuguuuguggaccuaaaaagucuacuaauuugguuaaaaacaaaugugucaauuucaacuucaaugguuuaacaggcacagguguucuuacugagucuaacaaaaaguuucugccuuuccaacaauuuggcagagacauugcugacacuacugaugcuguccgugauccacagacacuugagauucuugacauuacaccauguucuuuugguggugucaguguuauaacaccaggaacaaauacuucuaaccagguugcuguucuuuaucaggauguuaacugcacagaagucccuguugcuauucaugcagaucaacuuacuccuacuuggcguguuuauucuacagguucuaauguuuuucaaacacgugcaggcuguuuaauaggggcugaacaugucaacaacucauaugagugugacauacccauuggugcagguauaugcgcuaguuaucagacucagacuaauucuccucggcgggcacguaguguagcuagucaauccaucauugccuacacuaugucacuuggugcagaaaauucaguugcuuacucuaauaacucuauugccauacccacaaauuuuacuauuaguguuaccacagaaauucuaccagugucuaugaccaagacaucaguagauuguacaauguacauuuguggugauucaacugaaugcagcaaucuuuuguugcaauauggcaguuuuuguacacaauuaaaccgugcuuuaacuggaauagcuguugaacaagacaaaaacacccaagaaguuuuugcacaagucaaacaaauuuacaaaacaccaccaauuaaagauuuuggugguuuuaauuuuucacaaauauuaccagauccaucaaaaccaagcaagaggucauuuauugaagaucuacuuuucaauaaagugacacuugcagaugcuggcuucaucaaacaauauggugauugccuuggugauauugcugcuagagaccucauuugugcacaaaaguuuaacggccuuacuguuuugccaccuuugcucacagaugaaaugauugcucaauacacuucugcacuguuagcggguacaaucacuucugguuggaccuuuggugcaggugcugcauuacaaauaccauuugcuaugcaaauggcuuauagguuuaaugguauuggaguuacacagaauguucucuaugagaaccaaaaauugauugccaaccaauuuaauagugcuauuggcaaaauucaagacucacuuucuuccacagcaagugcacuuggaaaacuucaagauguggucaaccaaaaugcacaagcuuuaaacacgcuuguuaaacaacuuagcuccaauuuuggugcaauuucaaguguuuuaaaugauauccuuucacgucuugacaaaguugaggcugaagugcaaauugauagguugaucacaggcagacuucaaaguuugcagacauaugugacucaacaauuaauuagagcugcagaaaucagagcuucugcuaaucuugcugcuacuaaaaugucagaguguguacuuggacaaucaaaaagaguugauuuuuguggaaagggcuaucaucuuauguccuucccucagucagcaccucaugguguagucuucuugcaugugacuuaugucccugcacaagaaaagaacuucacaacugcuccugccauuugucaugauggaaaagcacacuuuccucgugaaggugucuuuguuucaaauggcacacacugguuuguaacacaaaggaauuuuuaugaaccacaaaucauuacuacagacaacacauuugugucugguaacugugauguuguaauaggaauugucaacaacacaguuuaugauccuuugcaaccugaauuagacucauucaaggaggaguuagauaaauauuuuaagaaucauacaucaccagauguugauuuaggugacaucucuggcauuaaugcuucaguuguaaacauucaaaaagaaauugaccgccucaaugagguugccaagaauuuaaaugaaucucucaucgaucuccaagaacuuggaaaguaugagcaguauauaaaauggccaugguacauuuggcuagguuuuauagcuggcuugauugccauaguaauggugacaauuaugcuuugcuguaugaccaguugcuguaguugucucaagggcuguuguucuuguggauccugcugcaaauuugaugaagacgacucugagccagugcucaaaggagucaaauuacauuacacauaa

SEQ ID NO: 125 - RNA, 3822 nt, Artificial Sequence; identical to SEQ ID NO: 121
  SARS-CoV-2/Guangdong/20SF174/2020__EPI_ISL_406531 spike protein CDS wt (1-1273)

SEQ ID NO: 126 - RNA, 3822 nt, Artificial Sequence
  SARS-CoV-2/Shenzhen/SZTH-001/2020__EPI_ISL_406592 spike protein CDS wt (1-1273)
auguuuguuuuucuuguuuuauugccacuagucucuagucaguguguuaaucuuacaaccagaacucaauuacccccugcauacacuaauucuuucacacgugguguuuauuacccugacaaaguuuucagauccucaguuuuacauucaacucaggacuuguucuuaccuuucuuuuccaauguuacuugguuccaugcuauacaugucucugggaccaaugguacuaagagguuugauaacccuguccuaccauuuaaugaugguguuuauuuugcuuccacugagaagucuaacauaauaagaggcuggauuuuugguacuacuuuagauucgaagacccagucccuacuuauuguuaauaacgcuacuaauguuguuauuaaagucugugaauuucaauuuuguaaugauccauuuuuggguguuuauuaccacaaaaacaacaaaaguuggauggaaagugaguucagaguuuauucuagugcgaauaauugcacuuuugaauaugucucucagccuuuucuuauggaccuugaaggaaaacaggguaauuucaaaaaucuuagggaauuuguguuuaagaauauugaugguuauuuuaaaauauauucuaagcacacgccuauuaauuuagugcgugaucucccucaggguuuuucggcuuuagaaccauugguagauuugccaauagguauuaacaucacuagguuucaaacuuuacuugcuuuacauagaaguuauuugacuccuggugauucuucuucagguuggacagcuggugcugcagcuuauuauguggguuaucuucaaccuaggacuuuucuauuaaaauauaaugaaaauggaaccauuacagaugcuguagacugugcacuugacccucucucagaaacaaaguguacguugaaauccuucacuguagaaaaaggaaucuaucaaacuucuaacuuuagaguccaaccaacagaaucuauuguuagauuuccuaauauuacaaacuugugcccuuuuggugaaguuuuuaacgccaccagauuugcaucuguuuaugcuuggaacaggaagagaaucagcaacuguguugcugauuauucuguccuauauaauuccgcaucauuuuccacuuuuaaguguuauggagugucuccuacuaaauuaaaugaucucugcuuuacuaaugucuaugcagauucauuuguaauuagaggugaugaagucagacaaaucgcuccagggcaaacuggaaagauugcugauuauaauuauaaauuaccagaugauuuuacaggcugcguuauagcuuggaauucuaacaaucuugauucuaagguuggugguaauuauaauuaccuguauagauuguuuaggaagucuaaucucaaaccuuuugagagagauauuucaacugaaaucuaucaggccgguagcacaccuuguaaugguguugaagguuuuaauuguuacuuuccuuuacaaucauaugguuuccaacccacuaaugguguugguuaccaaccauacagaguaguaguacuuucuuuugaacuucuacaugcaccagcaacuguuuguggaccuaaaaagucuacuaauuugguuaaaaacaaaugugucaauuucaacuucaaugguuuaacaggcacagguguucuuacugagucuaacaaaaaguuucugccuuuccaacaauuuggcagagacauugcugacacuacugaugcuguccgugauccacagacacuugagauucuugacauuacaccauguucuuuugguggugucaguguuauaacaccaggaacaaauacuucuaaccagguugcuguucuuuaucaggauguuaacugcacagaagucccuguugcuauucaugcagaucaacuuacuccuacuuggcguguuuauucuacagguucuaauguuuuucaaacacgugcaggcuguuuaauaggggcugaacaugucaacaacucauaugagugugacauacccauuggugcagguauaugcgcuaguuaucagacucagacuaauucuccucggcgggcacguaguguagcuagucaauccaucauugccuacacuaugucacuuggugcagaaaauucaguugcuuacucuaauaacucuauugccauacccacaaauuuuacuauuaguguuaccacagaaauucuaccagugucuaugaccaagacaucaguagauuguacaauguacauuuguggugauucaacugaaugcagcaaucuuuuguugcaauauggcaguuuuuguacacaauuaaaccgugcuuuaacuggaauagcuguugaacaagacaaaaacacccaagaaguuuuugcacaagucaaacaaauuuacaaaacaccaccaauuaaagauuuuggugguuuuaauuuuucacaaauauuaccagauccaucaaaaccaagcaagaggucauuuauugaagaucuacuuuucaacaaagugacacuugcagaugcuggcuucaucaaacaauauggugauugccuuggugauauugcugcuagagaccucauuugugcacaaaaguuuaacggccuuacuguuuugccaccuuugcucacagaugaaaugauugcucaauacacuucugcacuguuagcggguacaaucacuucugguuggaccuuuggugcaggugcugcauuacaaauaccauuugcuaugcaaauggcuuauagguuuaaugguauuggaguuacacagaauguucucuaugagaaccaaaaauugauugccaaccaauuuaauagugcuauuggcaaaauucaagacucacuuucuuccacagcaagugcacuuggaaaacuucaagauguggucaaccaaaaugcacaagcuuuaaacacgcuuguuaaacaacuuagcuccaauuuuggugcaauuucaaguguuuuaaaugauauccuuucacgucuugacaaaguugaggcugaagugcaaauugauagguugaucacaggcagacuucaaaguuugcagacauaugugacucaacaauuaauuagagcugcagaaaucagagcuucugcuaaucuugcugcuacuaaaaugucagaguguguacuuggacaaucaaaaagaguugauuuuuguggaaagggcuaucaucuuauguccuucccucagucagcaccucaugguguagucuucuugcaugugacuuaugucccugcacaagaaaagaacuucacaacugcuccugccauuugucaugauggaaaagcacacuuuccucgugaaggugucuuuguuucaaauggcacacacugguuuguaacacaaaggaauuuuuaugaaccacaaaucauuacuacagacaacacauuugugucugguaacugugauguucuaauaggaauugucaacaacacaguuuaugauccuuugcaaccugaauuagacucauucaaggaggaguuagauaaauauuuuaagaaucauacaucaccagauguugauuuaggugacaucucuggcauuaaugcuucaguuguaaacauucaaaaagaaauugaccgccucaaugagguugccaagaauuuaaaugaaucucucaucgaucuccaagaacuuggaaaguaugagcaguauauaaaauggccaugguacauuuggcuagguuuuauagcuggcuugauugccauaguaauggugacaauuaugcuuugcuguaugaccaguugcuguaguugucucaagggcuguuguucuuguggauccugcugcaaauuugaugaagacgacucugggccagugcucaaaggagucaaauuacauuacacauaa

SEQ ID NO: 127 - RNA, 3822 nt, Artificial Sequence
  SARS-CoV-2/Shenzhen/SZTH-004/2020__EPI_ISL_406595 spike protein CDS wt (1-1273)
auguuuguuuuucuuguuuuauugccacuagucucuagucaguguguuaaucuuacaaccagaacucaauuacccccugcauacacuaauucuuucacacgugguguuuauuacccugacaaaguuuucagauccucaguuuuacauucaacucaggacuuguucuuaccuuucuuuuccaauguuacuugguuccaugcuauacaugucucugggaccaaugguacuaagagguuugauaacccuguccuaccauuuaaugaugguguuuauuuugcuuccacugagaagucuaacauaauaagaggcuggauuuuugguacuacuuuagauucgaagacccagucccuacuuauuguuaauaacgcuacuaauguuguuauuaaagucugugaauuucaauuuuguaaugauccauuuuuggguguuuauuaccacaaaaacaacaaaaguuggauggaaagugaguucagaguuuauucuagugcgaauaauugcacuuuugaauaugucucucagccuuuucuuauggaccuugaaggaaaacaggguaauuucaaaaaucuuagggaauuuguguuuaagaauauugaugguuauuuuaaaauauauucuaagcacacgccuauuaauuuagugcgugaucucccucaggguuuuucggcuuuagaaccauugguagauuugccaauagguauuaacaucacuagguuucaaacuuuacuugcuuuacauagaaguuauuugacuccuggugauucuucuucagguuggacagcuggugcugcagcuuauuauguggguuaucuucaaccuaggacuuuucuauuaaaauauaaugaaaauggaaccauuacagaugcuguagacugugcacuugacccucucucagaaacaaaguguacguugaaauccuucacuguagaaaaaggaaucuaucaaacuucuaacuuuagaguccaaccaacagaaucuauuguuagauuuccuaauauuacaaacuugugcccuuuuggugaaguuuuuaacgccaccagauuugcaucuguuuaugcuugggacaggaagagaaucagcaacuguguugcuuauuauucuguccuauauaauuccgcaucauuuuccacuuuuaaguguuauggagugucuccuacuaaauuaaaugaucucugcuuuacuaaugucuaugcagauucauuuguaauuagaggugaugaagucagacaaaucgcuccagggcaaacuggaaagauugcugauuauaauuauaaauuaccagaugauuuuacaggcugcguuauagcuuggaauucuaacaaucuugauucuaagguuggugguaauuauaauuaccuguauagauuguuuaggaagucuaaucucaaaccuuuugagagagauauuucaacugaaaucuaucaggccgguagcacaccuuguaaugguguugaagguuuuaauuguuacuuuccuuuacaaucauaugguuuccaacccacuaaugguguugguuaccaaccauacagaguaguaguacuuucuuuugaacuucuacaugcaccagcaacuguuuguggaccuaaaaagucuacuaauuugguuaaaaacaaaugugucaauuucaacuucaaugguuuaacaggcacagguguucuuacugagucuaacaaaaaguuucugccuuuccaacaauuuggcagagacauugcugacacuacugaugcuguccgugauccacagacacuugagauucuugacauuacaccauguucuuuugguggugucaguguuauaacaccaggaacaaauacuucuaaccagguugcuguucuuuaucaggauguuaacugcacagaagucccuguugcuauucaugcagaucaacuuacuccuacuuggcguguuuauucuacagguucuaauguuuuucaaacacgugcaggcuguuuaauaggggcugaacaugucaacaacucauaugagugugacauacccauuggugcaggcauaugcgcuaguuaucagacucagacuaauucuccucggcgggcacguaguguagcuagucaauccaucauugccuacacuaugucacuuggugcagaaaauucaguugcuuacucuaauaacucuauugccauacccacaaauuuuacuauuaguguuaccacagaaauucuaccagugucuaugaccaagacaucaguagauuguacaauguacauuuguggugauucaacugaaugcagcaaucuuuuguugcaauauggcaguuuuuguacacaauuaaaccgugcuuuaacuggaauagcuguugaacaagacaaaaacacccaagaaguuuuugcacaagucaaacaaauuuacaaaacaccaccaauuaaagauuuuggugguuuuaauuuuucacaaauauuaccagauccaucaaaaccaagcaagaggucauuuauugaagaucuacuuuucaacaaagugacacuugcagaugcuggcuucaucaaacaauauggugauugccuuggugauauugcugcuagagaccucauuugugcacaaaaguuuaacggccuuacuguuuugccaccuuugcucacagaugaaaugauugcucaauacacuucugcacuguuagcggguacaaucacuucugguuggaccuuuggugcaggugcugcauuacaaauaccauuugcuaugcaaauggcuuauagguuuaaugguauuggaguuacacagaauguucucuaugagaaccaaaaauugauugccaaccaauuuaauagugcuauuggcaaaauucaagacucacuuucuuccacagcaagugcacuuggaaaacuucaagauguggucaaccaaaaugcacaagcuuuaaacacgcuuguuaaacaacuuagcuccaauuuuggugcaauuucaaguguuuuaaaugauauccuuucacgucuugacaaaguugaggcugaagugcaaauugauagguugaucacaggcagacuucaaaguuugcagacauaugugacucaacaauuaauuagagcugcagaaaucagagcuucugcuaaucuugcugcuacuaaaaugucagaguguguacuuggacaaucaaaaagaguugauuuuuguggaaagggcuaucaucuuauguccuucccucagucagcaccucaugguguagucuucuugcaugugacuuaugucccugcacaagaaaagaacuucacaacugcuccugccauuugucaugauggaaaagcacacuuuccucgugaaggugucuuuguuucaaauggcacacacugguuuguaacacaaaggaauuuuuaugaaccacaaaucauuacuacagacaacacauuugugucugguaacugugauguuguaauaggaauugucaacaacacaguuuaugauccuuugcaaccugaauuagacucauucaaggaggaguuagauaaauauuuuaagaaucauacaucaccagauguugauuuaggugacaucucuggcauuaaugcuucaguuguaaacauucaaaaagaaauugaccgccucaaugagguugccaagaauuuaaaugaaucucucaucgaucuccaagaacuuggaaaguaugagcaguauauaaaauggccaugguacauuuggcuagguuuuauagcuggcuugauugccauaguaauggugacaauuaugcuuugcuguaugaccaguugcuguaguugucucaagggcuguuguucuuguggauccugcugcaaauuugaugaagacgacucugagccagugcucaaaggagucaaauuacauuacacauaa

SEQ ID NO: 128 - RNA, 3822 nt, Artificial Sequence
  SARS-CoV-2/France/IDF0372/2020__EPI_ISL_406596 spike protein CDS wt (1-1273)
auguuuguuuuucuuguuuuauugccacuagucucuagucaguguguuaaucuuacaaccagaacucaauuacccccugcauacacuaauucuuucacacgugguguuuauuacccugacaaaguuuucagauccucaguuuuacauucaacucaggacuuguucuuaccuuucuuuuccaauguuacuugguuccaugcuauacaugucucugggaccaaugguacuaagagguuugauaacccuguccuaccauuuaaugaugguguuuauuuugcuuccacugagaagucuaacauaauaagaggcuggauuuuugguacuacuuuagauucgaagacccagucccuacuuauuguuaauaacgcuacuaauguuguuauuaaagucugugaauuucaauuuuguaaugauccauuuuuggguguuuauuaccacaaaaacaacaaaaguuggauggaaagugaguucagaguuuauucuagugcgaauaauugcacuuuugaauaugucucucagccuuuucuuauggaccuugaaggaaaacaggguaauuucaaaaaucuuagggaauuuguguuuaagaauauugaugguuauuuuaaaauauauucuaagcacacgccuauuaauuuagugcgugaucucccucaggguuuuucggcuuuagaaccauugguagauuugccaauagguauuaacaucacuagguuucaaacuuuacuugcuuuacauagaaguuauuugacuccuggugauucuucuucagguuggacagcuggugcugcagcuuauuauguggguuaucuucaaccuaggacuuuucuauuaaaauauaaugaaaauggaaccauuacagaugcuguagacugugcacuugacccucucucagaaacaaaguguacguugaaauccuucacuguagaaaaaggaaucuaucaaacuucuaacuuuagaguccaaccaacagaaucuauuguuagauuuccuaauauuacaaacuugugcccuuuuggugaaguuuuuaacgccaccagauuugcaucuguuuaugcuuggaacaggaagagaaucagcaacuguguugcugauuauucuuuccuauauaauuccgcaucauuuuccacuuuuaaguguuauggagugucuccuacuaaauuaaaugaucucugcuuuacuaaugucuaugcagauucauuuguaauuagaggugaugaagucagacaaaucgcuccagggcaaacuggaaagauugcugauuauaauuauaaauuaccagaugauuuuacaggcugcguuauagcuuggaauucuaacaaucuugauucuaagguuggugguaauuauaauuaccuguauagauuguuuaggaagucuaaucucaaaccuuuugagagagauauuucaacugaaaucuaucaggccgguagcacaccuuguaaugguguugaagguuuuaauuguuacuuuccuuuacaaucauaugguuuccaacccacuaaugguguugguuaccaaccauacagaguaguaguacuuucuuuugaacuucuacaugcaccagcaacuguuuguggaccuaaaaagucuacuaauuugguuaaaaacaaaugugucaauuucaacuucaaugguuuaacaggcacagguguucuuacugagucuaacaaaaaguuucugccuuuccaacaauuuggcagagacauugcugacacuacugaugcuguccgugauccacagacacuugagauucuugacauuacaccauguucuuuugguggugucaguguuauaacaccaggaacaaauacuucuaaccagguugcuguucuuuaucaggauguuaacugcacagaagucccuguugcuauucaugcagaucaacuuacuccuacuuggcguguuuauucuacagguucuaauguuuuucaaacacgugcaggcuguuuaauaggggcugaacaugucaacaacucauaugagugugacauacccauuggugcagguauaugcgcuaguuaucagacucagacuaauucuccucggcgggcacguaguguagcuagucaauccaucauugccuacacuaugucacuuggugcagaaaauucaguugcuuacucuaauaacucuauugccauacccacaaauuuuacuauuaguguuaccacagaaauucuaccagugucuaugaccaagacaucaguagauuguacaauguacauuuguggugauucaacugaaugcagcaaucuuuuguugcaauauggcaguuuuuguacacaauuaaaccgugcuuuaacuggaauagcuguugaacaagacaaaaacacccaagaaguuuuugcacaagucaaacaaauuuacaaaacaccaccaauuaaagauuuuggugguuuuaauuuuucacaaauauuaccagauccaucaaaaccaagcaagaggucauuuauugaagaucuacuuuucaacaaagugacacuugcagaugcuggcuucaucaaacaauauggugauugccuuggugauauugcugcuagagaccucauuugugcacaaaaguuuaacggccuuacuguuuugccaccuuugcucacagaugaaaugauugcucaauacacuucugcacuguuagcggguacaaucacuucugguuggaccuuuggugcaggugcugcauuacaaauaccauuugcuaugcaaauggcuuauagguuuaaugguauuggaguuacacagaauguucucuaugagaaccaaaaauugauugccaaccaauuuaauagugcuauuggcaaaauucaagacucacuuucuuccacagcaagugcacuuggaaaacuucaagauguggucaaccaaaaugcacaagcuuuaaacacgcuuguuaaacaacuuagcuccaauuuuggugcaauuucaaguguuuuaaaugauauccuuucacgucuugacaaaguugaggcugaagugcaaauugauagguugaucacaggcagacuucaaaguuugcagacauaugugacucaacaauuaauuagagcugcagaaaucagagcuucugcuaaucuugcugcuacuaaaaugucagaguguguacuuggacaaucaaaaagaguugauuuuuguggaaagggcuaucaucuuauguccuucccucagucagcaccucaugguguagucuucuugcaugugacuuaugucccugcacaagaaaagaacuucacaacugcuccugccauuugucaugauggaaaagcacacuuuccucgugaaggugucuuuguuucaaauggcacacacugguuuguaacacaaaggaauuuuuaugaaccacaaaucauuacuacagacaacacauuugugucugguaacugugauguuguaauaggaauugucaacaacacaguuuaugauccuuugcaaccugaauuagacucauucaaggaggaguuagauaaauauuuuaagaaucauacaucaccagauguugauuuaggugacaucucuggcauuaaugcuucaguuguaaacauucaaaaagaaauugaccgccucaaugagguugccaagaauuuaaaugaaucucucaucgaucuccaagaacuuggaaaguaugagcaguauauaaaauggccaugguacauuuggcuagguuuuauagcuggcuugauugccauaguaauggugacaauuaugcuuugcuguaugaccaguugcuguaguugucucaagggcuguuguucuuguggauccugcugcaaauuugaugaagacgacucugagccagugcucaaaggagucaaauuacauuacacauaa

SEQ ID NO: 129 - RNA, 3822 nt, Artificial Sequence; identical to SEQ ID NO: 128
  SARS-CoV-2/France/IDF0373/2020__EPI_ISL_406597 spike protein CDS wt (1-1273)

SEQ ID NO: 130 - RNA, 3822 nt, Artificial Sequence
  SARS-CoV-2/Australia/VIC01/2020__EPI_ISL_406844 spike protein CDS wt (1-1273)
auguuuguuuuucuuguuuuauugccacuagucucuagucaguguguuaaucuuacaaccagaacucaauuacccccugcauacacuaauucuuucacacgugguguuuauuacccugacaaaguuuucagauccucaguuuuacauucaacucaggacuuguucuuaccuuucuuuuccaauguuacuugguuccaugcuauacaugucucugggaccaaugguacuaagagguuugauaacccuguccuaccauuuaaugaugguguuuauuuugcuuccacugagaagucuaacauaauaagaggcuggauuuuugguacuacuuuagauucgaagacccagucccuacuuauuguuaauaacgcuacuaauguuguuauuaaagucugugaauuucaauuuuguaaugauccauuuuuggguguuuauuaccacaaaaacaacaaaaguuggauggaaagugaguucagaguuuauucuagugcgaauaauugcacuuuugaauaugucucucagccuuuucuuauggaccuugaaggaaaacaggguaauuucaaaaaucuuagggaauuuguguuuaagaauauugaugguuauuuuaaaauauauucuaagcacacgccuauuaauuuagugcgugaucucccucaggguuuuucggcuuuagaaccauugguagauuugccaauagguauuaacaucacuagguuucaaacuuuacuugcuuuacauagaagguauuugacuccuggugauucuucuucagguuggacagcuggugcugcagcuuauuauguggguuaucuucaaccuaggacuuuucuauuaaaauauaaugaaaauggaaccauuacagaugcuguagacugugcacuugacccucucucagaaacaaaguguacguugaaauccuucacuguagaaaaaggaaucuaucaaacuucuaacuuuagaguccaaccaacagaaucuauuguuagauuuccuaauauuacaaacuugugcccuuuuggugaaguuuuuaacgccaccagauuugcaucuguuuaugcuuggaacaggaagagaaucagcaacuguguugcugauuauucuguccuauauaauuccgcaucauuuuccacuuuuaaguguuauggagugucuccuacuaaauuaaaugaucucugcuuuacuaaugucuaugcagauucauuuguaauuagaggugaugaagucagacaaaucgcuccagggcaaacuggaaagauugcugauuauaauuauaaauuaccagaugauuuuacaggcugcguuauagcuuggaauucuaacaaucuugauucuaagguuggugguaauuauaauuaccuguauagauuguuuaggaagucuaaucucaaaccuuuugagagagauauuucaacugaaaucuaucaggccgguagcacaccuuguaaugguguugaagguuuuaauuguuacuuuccuuuacaaucauaugguuuccaacccacuaaugguguugguuaccaaccauacagaguaguaguacuuucuuuugaacuucuacaugcaccagcaacuguuuguggaccuaaaaagucuacuaauuugguuaaaaacaaaugugucaauuucaacuucaaugguuuaacaggcacagguguucuuacugagucuaacaaaaaguuucugccuuuccaacaauuuggcagagacauugcugacacuacugaugcuguccgugauccacagacacuugagauucuugacauuacaccauguucuuuugguggugucaguguuauaacaccaggaacaaauacuucuaaccagguugcuguucuuuaucaggauguuaacugcacagaagucccuguugcuauucaugcagaucaacuuacuccuacuuggcguguuuauucuacagguucuaauguuuuucaaacacgugcaggcuguuuaauaggggcugaacaugucaacaacucauaugagugugacauacccauuggugcagguauaugcgcuaguuaucagacucagacuaauucuccucggcgggcacguaguguagcuagucaauccaucauugccuacacuaugucacuuggugcagaaaauucaguugcuuacucuaauaacucuauugccauacccacaaauuuuacuauuaguguuaccacagaaauucuaccagugucuaugaccaagacaucaguagauuguacaauguacauuuguggugauucaacugaaugcagcaaucuuuuguugcaauauggcaguuuuuguacacaauuaaaccgugcuuuaacuggaauagcuguugaacaagacaaaaacacccaagaaguuuuugcacaagucaaacaaauuuacaaaacaccaccaauuaaagauuuuggugguuuuaauuuuucacaaauauuaccagauccaucaaaaccaagcaagaggucauuuauugaagaucuacuuuucaacaaagugacacuugcagaugcuggcuucaucaaacaauauggugauugccuuggugauauugcugcuagagaccucauuugugcacaaaaguuuaacggccuuacuguuuugccaccuuugcucacagaugaaaugauugcucaauacacuucugcacuguuagcggguacaaucacuucugguuggaccuuuggugcaggugcugcauuacaaauaccauuugcuaugcaaauggcuuauagguuuaaugguauuggaguuacacagaauguucucuaugagaaccaaaaauugauugccaaccaauuuaauagugcuauuggcaaaauucaagacucacuuucuuccacagcaagugcacuuggaaaacuucaagauguggucaaccaaaaugcacaagcuuuaaacacgcuuguuaaacaacuuagcuccaauuuuggugcaauuucaaguguuuuaaaugauauccuuucacgucuugacaaaguugaggcugaagugcaaauugauagguugaucacaggcagacuucaaaguuugcagacauaugugacucaacaauuaauuagagcugcagaaaucagagcuucugcuaaucuugcugcuacuaaaaugucagaguguguacuuggacaaucaaaaagaguugauuuuuguggaaagggcuaucaucuuauguccuucccucagucagcaccucaugguguagucuucuugcaugugacuuaugucccugcacaagaaaagaacuucacaacugcuccugccauuugucaugauggaaaagcacacuuuccucgugaaggugucuuuguuucaaauggcacacacugguuuguaacacaaaggaauuuuuaugaaccacaaaucauuacuacagacaacacauuugugucugguaacugugauguuguaauaggaauugucaacaacacaguuuaugauccuuugcaaccugaauuagacucauucaaggaggaguuagauaaauauuuuaagaaucauacaucaccagauguugauuuaggugacaucucuggcauuaaugcuucaguuguaaacauucaaaaagaaauugaccgccucaaugagguugccaagaauuuaaaugaaucucucaucgaucuccaagaacuuggaaaguaugagcaguauauaaaauggccaugguacauuuggcuagguuuuauagcuggcuugauugccauaguaauggugacaauuaugcuuugcuguaugaccaguugcuguaguugucucaagggcuguuguucuuguggauccugcugcaaauuugaugaagacgacucugagccagugcucaaaggagucaaauuacauuacacauaa

SEQ ID NO: 131 - RNA, 3822 nt, Artificial Sequence
  SARS-CoV-2/Germany/BavPat1/2020__EPI_ISL_406862 spike protein CDS wt (1-1273)
auguuuguuuuucuuguuuuauugccacuagucucuagucaguguguuaaucuuacaaccagaacucaauuacccccugcauacacuaauucuuucacacgugguguuuauuacccugacaaaguuuucagauccucaguuuuacauucaacucaggacuuguucuuaccuuucuuuuccaauguuacuugguuccaugcuauacaugucucugggaccaaugguacuaagagguuugauaacccuguccuaccauuuaaugaugguguuuauuuugcuuccacugagaagucuaacauaauaagaggcuggauuuuugguacuacuuuagauucgaagacccagucccuacuuauuguuaauaacgcuacuaauguuguuauuaaagucugugaauuucaauuuuguaaugauccauuuuuggguguuuauuaccacaaaaacaacaaaaguuggauggaaagugaguucagaguuuauucuagugcgaauaauugcacuuuugaauaugucucucagccuuuucuuauggaccuugaaggaaaacaggguaauuucaaaaaucuuagggaauuuguguuuaagaauauugaugguuauuuuaaaauauauucuaagcacacgccuauuaauuuagugcgugaucucccucaggguuuuucggcuuuagaaccauugguagauuugccaauagguauuaacaucacuagguuucaaacuuuacuugcuuuacauagaaguuauuugacuccuggugauucuucuucagguuggacagcuggugcugcagcuuauuauguggguuaucuucaaccuaggacuuuucuauuaaaauauaaugaaaauggaaccauuacagaugcuguagacugugcacuugacccucucucagaaacaaaguguacguugaaauccuucacuguagaaaaaggaaucuaucaaacuucuaacuuuagaguccaaccaacagaaucuauuguuagauuuccuaauauuacaaacuugugcccuuuuggugaaguuuuuaacgccaccagauuugcaucuguuuaugcuuggaacaggaagagaaucagcaacuguguugcugauuauucuguccuauauaauuccgcaucauuuuccacuuuuaaguguuauggagugucuccuacuaaauuaaaugaucucugcuuuacuaaugucuaugcagauucauuuguaauuagaggugaugaagucagacaaaucgcuccagggcaaacuggaaagauugcugauuauaauuauaaauuaccagaugauuuuacaggcugcguuauagcuuggaauucuaacaaucuugauucuaagguuggugguaauuauaauuaccuguauagauuguuuaggaagucuaaucucaaaccuuuugagagagauauuucaacugaaaucuaucaggccgguagcacaccuuguaaugguguugaagguuuuaauuguuacuuuccuuuacaaucauaugguuuccaacccacuaaugguguugguuaccaaccauacagaguaguaguacuuucuuuugaacuucuacaugcaccagcaacuguuuguggaccuaaaaagucuacuaauuugguuaaaaacaaaugugucaauuucaacuucaaugguuuaacaggcacagguguucuuacugagucuaacaaaaaguuucugccuuuccaacaauuuggcagagacauugcugacacuacugaugcuguccgugauccacagacacuugagauucuugacauuacaccauguucuuuugguggugucaguguuauaacaccaggaacaaauacuucuaaccagguugcuguucuuuaucaggguguuaacugcacagaagucccuguugcuauucaugcagaucaacuuacuccuacuuggcguguuuauucuacagguucuaauguuuuucaaacacgugcaggcuguuuaauaggggcugaacaugucaacaacucauaugagugugacauacccauuggugcagguauaugcgcuaguuaucagacucagacuaauucuccucggcgggcacguaguguagcuagucaauccaucauugccuacacuaugucacuuggugcagaaaauucaguugcuuacucuaauaacucuauugccauacccacaaauuuuacuauuaguguuaccacagaaauucuaccagugucuaugaccaagacaucaguagauuguacaauguacauuuguggugauucaacugaaugcagcaaucuuuuguugcaauauggcaguuuuuguacacaauuaaaccgugcuuuaacuggaauagcuguugaacaagacaaaaacacccaagaaguuuuugcacaagucaaacaaauuuacaaaacaccaccaauuaaagauuuuggugguuuuaauuuuucacaaauauuaccagauccaucaaaaccaagcaagaggucauuuauugaagaucuacuuuucaacaaagugacacuugcagaugcuggcuucaucaaacaauauggugauugccuuggugauauugcugcuagagaccucauuugugcacaaaaguuuaacggccuuacuguuuugccaccuuugcucacagaugaaaugauugcucaauacacuucugcacuguuagcggguacaaucacuucugguuggaccuuuggugcaggugcugcauuacaaauaccauuugcuaugcaaauggcuuauagguuuaaugguauuggaguuacacagaauguucucuaugagaaccaaaaauugauugccaaccaauuuaauagugcuauuggcaaaauucaagacucacuuucuuccacagcaagugcacuuggaaaacuucaagauguggucaaccaaaaugcacaagcuuuaaacacgcuuguuaaacaacuuagcuccaauuuuggugcaauuucaaguguuuuaaaugauauccuuucacgucuugacaaaguugaggcugaagugcaaauugauagguugaucacaggcagacuucaaaguuugcagacauaugugacucaacaauuaauuagagcugcagaaaucagagcuucugcuaaucuugcugcuacuaaaaugucagaguguguacuuggacaaucaaaaagaguugauuuuuguggaaagggcuaucaucuuauguccuucccucagucagcaccucaugguguagucuucuugcaugugacuuaugucccugcacaagaaaagaacuucacaacugcuccugccauuugucaugauggaaaagcacacuuuccucgugaaggugucuuuguuucaaauggcacacacugguuuguaacacaaaggaauuuuuaugaaccacaaaucauuacuacagacaacacauuugugucugguaacugugauguuguaauaggaauugucaacaacacaguuuaugauccuuugcaaccugaauuagacucauucaaggaggaguuagauaaauauuuuaagaaucauacaucaccagauguugauuuaggugacaucucuggcauuaaugcuucaguuguaaacauucaaaaagaaauugaccgccucaaugagguugccaagaauuuaaaugaaucucucaucgaucuccaagaacuuggaaaguaugagcaguauauaaaauggccaugguacauuuggcuagguuuuauagcuggcuugauugccauaguaauggugacaauuaugcuuugcuguaugaccaguugcuguaguugucucaagggcuguuguucuuguggauccugcugcaaauuugaugaagacgacucugagccagugcucaaaggagucaaauuacauuacacauaa

SEQ ID NO: 132 - RNA, 2046 nt, Artificial Sequence
  SARS-CoV-2/Wuhan/WIV05/2019__EPI_ISL_402128 spike protein CDS wt (1-681)
auguuuguuuuucuuguuuuauugccacuagucucuagucaguguguuaaucuuacaaccagaacucaauuacccccugcauacacuaauucuuucacacgugguguuuauuacccugacaaaguuuucagauccucaguuuuacauucaacucaggacuuguucuuaccuuucuuuuccaauguuacuugguuccaugcuauacaugucucugggaccaaugguacuaagagguuugauaacccuguccuaccauuuaaugaugguguuuauuuugcuuccacugagaagucuaacauaauaagaggcuggauuuuugguacuacuuuagauucgaagacccagucccuacuuauuguuaauaacgcuacuaauguuguuauuaaagucugugaauuucaauuuuguaaugauccauuuuuggguguuuauuaccacaaaaacaacaaaaguuggauggaaagugaguucagaguuuauucuagugcgaauaauugcacuuuugaauaugucucucagccuuuucuuauggaccuugaaggaaaacaggguaauuucaaaaaucuuagggaauuuguguuuaagaauauugaugguuauuuuaaaauauauucuaagcacacgccuauuaauuuagugcgugaucucccucaggguuuuucggcuuuagaaccauugguagauuugccaauagguauuaacaucacuagguuucaaacuuuacuugcuuuacauagaaguuauuugacuccuggugauucuucuucagguuggacagcuggugcugcagcuuauuauguggguuaucuucaaccuaggacuuuucuauuaaaauauaaugaaaauggaaccauuacagaugcuguagacugugcacuugacccucucucagaaacaaaguguacguugaaauccuucacuguagaaaaaggaaucuaucaaacuucuaacuuuagaguccaaccaacagaaucuauuguuagauuuccuaauauuacaaacuugugcccuuuuggugaaguuuuuaacgccaccagauuugcaucuguuuaugcuuggaacaggaagagaaucagcaacuguguugcugauuauucuguccuauauaauuccgcaucauuuuccacuuuuaaguguuauggagugucuccuacuaaauuaaaugaucucugcuuuacuaaugucuaugcagauucauuuguaauuagaggugaugaagucagacaaaucgcuccagggcaaacuggaaagauugcugauuauaauuauaaauuaccagaugauuuuacaggcugcguuauagcuuggaauucuaacaaucuugauucuaagguuggugguaauuauaauuaccuguauagauuguuuaggaagucuaaucucaaaccuuuugagagagauauuucaacugaaaucuaucaggccgguagcacaccuuguaaugguguugaagguuuuaauuguuacuuuccuuuacaaucauaugguuuccaacccacuaaugguguugguuaccaaccauacagaguaguaguacuuucuuuugaacuucuacaugcaccagcaacuguuuguggaccuaaaaagucuacuaauuugguuaaaaacaaaugugucaauuucaacuucaaugguuuaacaggcacagguguucuuacugagucuaacaaaaaguuucugccuuuccaacaauuuggcagagacauugcugacacuacugaugcuguccgugauccacagacacuugagauucuugacauuacaccauguucuuuugguggugucaguguuauaacaccaggaacaaauacuucuaaccagguugcuguucuuuaucaggauguuaacugcacagaagucccuguugcuauucaugcagaucaacuuacuccuacuuggcguguuuauucuacagguucuaauguuuuucaaacacgugcaggcuguuuaauaggggcugaacaugucaacaacucauaugagugugacauacccauuggugcagguauaugcgcuaguuaucagacucagacuaauucuccuuaa

SEQ ID NO: 133 - RNA, 45 nt, Artificial Sequence
  SARS-CoV-2/Wuhan/WIV05/2019__EPI_ISL_402128 spike protein CDS wt (1-15)
auguuuguuuuucuuguuuuauugccacuagucucuagucagugu

SEQ ID NO: 134 - RNA, 1998 nt, Artificial Sequence
  SARS-CoV-2/Wuhan/WIV05/2019__EPI_ISL_402128 spike protein CDS wt (16-681)
guuaaucuuacaaccagaacucaauuacccccugcauacacuaauucuuucacacgugguguuuauuacccugacaaaguuuucagauccucaguuuuacauucaacucaggacuuguucuuaccuuucuuuuccaauguuacuugguuccaugcuauacaugucucugggaccaaugguacuaagagguuugauaacccuguccuaccauuuaaugaugguguuuauuuugcuuccacugagaagucuaacauaauaagaggcuggauuuuugguacuacuuuagauucgaagacccagucccuacuuauuguuaauaacgcuacuaauguuguuauuaaagucugugaauuucaauuuuguaaugauccauuuuuggguguuuauuaccacaaaaacaacaaaaguuggauggaaagugaguucagaguuuauucuagugcgaauaauugcacuuuugaauaugucucucagccuuuucuuauggaccuugaaggaaaacaggguaauuucaaaaaucuuagggaauuuguguuuaagaauauugaugguuauuuuaaaauauauucuaagcacacgccuauuaauuuagugcgugaucucccucaggguuuuucggcuuuagaaccauugguagauuugccaauagguauuaacaucacuagguuucaaacuuuacuugcuuuacauagaaguuauuugacuccuggugauucuucuucagguuggacagcuggugcugcagcuuauuauguggguuaucuucaaccuaggacuuuucuauuaaaauauaaugaaaauggaaccauuacagaugcuguagacugugcacuugacccucucucagaaacaaaguguacguugaaauccuucacuguagaaaaaggaaucuaucaaacuucuaacuuuagaguccaaccaacagaaucuauuguuagauuuccuaauauuacaaacuugugcccuuuuggugaaguuuuuaacgccaccagauuugcaucuguuuaugcuuggaacaggaagagaaucagcaacuguguugcugauuauucuguccuauauaauuccgcaucauuuuccacuuuuaaguguuauggagugucuccuacuaaauuaaaugaucucugcuuuacuaaugucuaugcagauucauuuguaauuagaggugaugaagucagacaaaucgcuccagggcaaacuggaaagauugcugauuauaauuauaaauuaccagaugauuuuacaggcugcguuauagcuuggaauucuaacaaucuugauucuaagguuggugguaauuauaauuaccuguauagauuguuuaggaagucuaaucucaaaccuuuugagagagauauuucaacugaaaucuaucaggccgguagcacaccuuguaaugguguugaagguuuuaauuguuacuuuccuuuacaaucauaugguuuccaacccacuaaugguguugguuaccaaccauacagaguaguaguacuuucuuuugaacuucuacaugcaccagcaacuguuuguggaccuaaaaagucuacuaauuugguuaaaaacaaaugugucaauuucaacuucaaugguuuaacaggcacagguguucuuacugagucuaacaaaaaguuucugccuuuccaacaauuuggcagagacauugcugacacuacugaugcuguccgugauccacagacacuugagauucuugacauuacaccauguucuuuugguggugucaguguuauaacaccaggaacaaauacuucuaaccagguugcuguucuuuaucaggauguuaacugcacagaagucccuguugcuauucaugcagaucaacuuacuccuacuuggcguguuuauucuacagguucuaauguuuuucaaacacgugcaggcuguuuaauaggggcugaacaugucaacaacucauaugagugugacauacccauuggugcagguauaugcgcuaguuaucagacucagacuaauucuccu

SEQ ID NO: 135 - RNA, 1776 nt, Artificial Sequence
  SARS-CoV-2/Wuhan/WIV05/2019__EPI_ISL_402128 spike protein CDS wt (682-1273)
cggcgggcacguaguguagcuagucaauccaucauugccuacacuaugucacuuggugcagaaaauucaguugcuuacucuaauaacucuauugccauacccacaaauuuuacuauuaguguuaccacagaaauucuaccagugucuaugaccaagacaucaguagauuguacaauguacauuuguggugauucaacugaaugcagcaaucuuuuguugcaauauggcaguuuuuguacacaauuaaaccgugcuuuaacuggaauagcuguugaacaagacaaaaacacccaagaaguuuuugcacaagucaaacaaauuuacaaaacaccaccaauuaaagauuuuggugguuuuaauuuuucacaaauauuaccagauccaucaaaaccaagcaagaggucauuuauugaagaucuacuuuucaacaaagugacacuugcagaugcuggcuucaucaaacaauauggugauugccuuggugauauugcugcuagagaccucauuugugcacaaaaguuuaacggccuuacuguuuugccaccuuugcucacagaugaaaugauugcucaauacacuucugcacuguuagcggguacaaucacuucugguuggaccuuuggugcaggugcugcauuacaaauaccauuugcuaugcaaauggcuuauagguuuaaugguauuggaguuacacagaauguucucuaugagaaccaaaaauugauugccaaccaauuuaauagugcuauuggcaaaauucaagacucacuuucuuccacagcaagugcacuuggaaaacuucaagauguggucaaccaaaaugcacaagcuuuaaacacgcuuguuaaacaacuuagcuccaauuuuggugcaauuucaaguguuuuaaaugauauccuuucacgucuugacaaaguugaggcugaagugcaaauugauagguugaucacaggcagacuucaaaguuugcagacauaugugacucaacaauuaauuagagcugcagaaaucagagcuucugcuaaucuugcugcuacuaaaaugucagaguguguacuuggacaaucaaaaagaguugauuuuuguggaaagggcuaucaucuuauguccuucccucagucagcaccucaugguguagucuucuugcaugugacuuaugucccugcacaagaaaagaacuucacaacugcuccugccauuugucaugauggaaaagcacacuuuccucgugaaggugucuuuguuucaaauggcacacacugguuuguaacacaaaggaauuuuuaugaaccacaaaucauuacuacagacaacacauuugugucugguaacugugauguuguaauaggaauugucaacaacacaguuuaugauccuuugcaaccugaauuagacucauucaaggaggaguuagauaaauauuuuaagaaucauacaucaccagauguugauuuaggugacaucucuggcauuaaugcuucaguuguaaacauucaaaaagaaauugaccgccucaaugagguugccaagaauuuaaaugaaucucucaucgaucuccaagaacuuggaaaguaugagcaguauauaaaauggccaugguacauuuggcuagguuuuauagcuggcuugauugccauaguaauggugacaauuaugcuuugcuguaugaccaguugcuguaguugucucaagggcuguuguucuuguggauccugcugcaaauuugaugaagacgacucugagccagugcucaaaggagucaaauuacauuacaca

SEQ ID NO: 136 - RNA, 3822 nt, Artificial Sequence
  SARS-CoV-2/Wuhan/WIV05/2019__EPI_ISL_402128 spike protein CDS gc (1-1273)
auguucguguuccugguccuccugccccuggugagcucccagugcgugaaccucaccacccgcacgcagcugccgcccgccuacaccaacagcuucacccggggcgucuacuaccccgacaagguguuccgcuccagcgugcugcacuccacccaggaccucuuccugcccuucuucagcaacgucacgugguuccacgccauccacguguccgggaccaacggcaccaagcgguucgacaacccggugcugcccuucaacgacggggucuacuucgcgagcaccgagaaguccaacaucauccgcggcuggaucuucgggacgacccucgacagcaagacccagucccugcugaucgugaacaacgccaccaacguggucaucaaggugugcgaguuccaguucugcaacgaccccuuccucggcguguacuaccacaagaacaacaagagcuggauggaguccgaguuccgggucuacagcuccgccaacaacugcacguucgaguacgugagccagcccuuccugauggaccuggagggcaagcaggggaacuucaagaaccuccgcgaguucguguucaagaacaucgacggcuacuucaagaucuacuccaagcacaccccgaucaaccugguccgggaccugccccagggguucagcgcccucgagccccugguggaccugcccaucggcaucaacaucacccgcuuccagacccuccuggcccugcaccgguccuaccucacgccgggggacagcagcuccggcuggaccgcgggcgccgccgccuacuacgugggguaccugcagccccgcaccuuccugcucaaguacaacgagaacggcaccaucacggacgcggucgacugcgcccuggacccccugagcgagaccaagugcacccucaaguccuucaccguggagaaggggaucuaccagacgagcaacuuccgggugcagcccaccgaguccaucguccgcuucccgaacaucaccaaccugugccccuucggcgagguguucaacgccacccgguucgccagcgucuacgccuggaaccgcaagcggaucuccaacugcguggcggacuacagcgugcuguacaacuccgccagcuucuccacguucaagugcuacggcgucagccccaccaagcucaacgaccugugcuucaccaacguguacgccgacuccuucgugauccgcggggacgagguccggcagaucgcccccggccagaccgggaagaucgccgacuacaacuacaagcugccggacgacuucacgggcugcgugaucgcguggaacagcaacaaccucgacuccaaggucgggggcaacuacaacuaccuguaccgccuguuccgcaagagcaaccucaagcccuucgagcgggacaucuccaccgagaucuaccaggccggcagcacccccugcaacgggguggagggcuucaacugcuacuucccccugcaguccuacggguuccagccgaccaacggcgugggguaccagcccuaccggguggucgugcugagcuucgagcuccugcacgcccccgccacggugugcggccccaagaaguccaccaaccuggucaagaacaagugcgugaacuucaacuucaacggccucaccgggaccggcgugcugaccgagagcaacaagaaguuccugccguuccagcaguucgggcgcgacaucgccgacacgaccgacgcgguccgcgacccccagacccuggagauccucgacaucacccccugcagcuucggcgggguguccgugaucacgccgggcaccaacaccagcaaccaggucgccgugcuguaccaggacgugaacugcaccgagguccccguggccauccacgccgaccagcugacgcccaccuggcggguguacuccaccggcagcaacgucuuccagacccgcgccgggugccucaucggcgcggagcacgugaacaacuccuacgagugcgacauccccaucggggccggcaucugcgccagcuaccagacgcagaccaacuccccgcggcgcgcccggagcguggcgucccagagcaucaucgccuacaccaugucccugggcgccgagaacagcgucgccuacuccaacaacagcaucgccauccccaccaacuucacgaucuccgugaccaccgagauccugcccgugagcaugaccaagacgagcgucgacugcaccauguacaucugcggggacuccaccgagugcagcaaccuccugcugcaguacggcuccuucugcacccagcucaaccgcgcgcugacggggaucgccguggagcaggacaagaacacccaggagguguucgcccaggucaagcagaucuacaagacgcccccgaucaaggacuucggcggguucaacuucagccagauccugcccgaccccuccaagcccagcaagcgguccuucaucgaggaccuccuguucaacaaggugacccuggccgacgccggcuucaucaagcaguacggcgacugccucggggacaucgcggcccgcgaccugaucugcgcccagaaguucaacggccugaccgugcucccgccccugcugaccgacgagaugaucgcccaguacaccagcgcccuccuggcggggaccaucacguccggcuggaccuucggggccggcgccgcccugcagauccccuucgcgaugcagauggccuaccgguucaacggcaucggggucacccagaacgugcucuacgagaaccagaagcugaucgccaaccaguucaacagcgccaucggcaagauccaggacucccugagcuccaccgccagcgcgcucgggaagcugcaggacguggucaaccagaacgcccaggcccugaacacgcucgugaagcagcuguccagcaacuucggcgccaucuccagcgugcugaacgacauccucucccgccuggacaaggucgaggccgaggugcagaucgaccggcugaucaccgggcgccuccagagccugcagaccuacgugacccagcagcugauccgggcggccgagauccgcgccagcgccaaccucgccgcgaccaagauguccgagugcguccugggccagagcaagcggguggacuucugcggcaagggguaccaccugauguccuucccccagagcgccccgcacggcguggucuuccuccacgugacguacguccccgcccaggagaagaacuucaccaccgcccccgcgaucugccacgacgggaaggcccacuucccccgcgagggcguguucguguccaacgggacccacugguucgucacgcagcggaacuucuacgagccgcagaucaucaccaccgacaacaccuucgugagcggcaacugcgacguggucaucggcaucgugaacaacacgguguacgacccccugcagcccgagcuggacuccuucaaggaggagcucgacaaguacuucaagaaccacaccagccccgacgucgaccugggggacaucuccggcaucaacgccagcguggugaacauccagaaggagaucgaccgccugaacgaggucgccaagaaccucaacgagucccugaucgaccugcaggagcucgggaaguacgagcaguacaucaaguggccgugguacaucuggcugggcuucaucgccggccugaucgcgaucgugauggugaccaucaugcucugcugcaugaccagcugcugcuccugccugaaggggugcugcagcugcggcuccugcugcaaguucgacgaggacgacagcgagcccguccugaagggggugaagcuccacuacacguga

SEQ ID NO: 137 - RNA, 3822 nt, Artificial Sequence
  SARS-CoV-2/Wuhan/WIV05/2019__EPI_ISL_402128 spike protein CDS gc (1-1273)(K986P_V987P)
auguucguguuccugguccuccugccccuggugagcucccagugcgugaaccucaccacccgcacgcagcugccgcccgccuacaccaacagcuucacccggggcgucuacuaccccgacaagguguuccgcuccagcgugcugcacuccacccaggaccucuuccugcccuucuucagcaacgucacgugguuccacgccauccacguguccgggaccaacggcaccaagcgguucgacaacccggugcugcccuucaacgacggggucuacuucgcgagcaccgagaaguccaacaucauccgcggcuggaucuucgggacgacccucgacagcaagacccagucccugcugaucgugaacaacgccaccaacguggucaucaaggugugcgaguuccaguucugcaacgaccccuuccucggcguguacuaccacaagaacaacaagagcuggauggaguccgaguuccgggucuacagcuccgccaacaacugcacguucgaguacgugagccagcccuuccugauggaccuggagggcaagcaggggaacuucaagaaccuccgcgaguucguguucaagaacaucgacggcuacuucaagaucuacuccaagcacaccccgaucaaccugguccgggaccugccccagggguucagcgcccucgagccccugguggaccugcccaucggcaucaacaucacccgcuuccagacccuccuggcccugcaccgguccuaccucacgccgggggacagcagcuccggcuggaccgcgggcgccgccgccuacuacgugggguaccugcagccccgcaccuuccugcucaaguacaacgagaacggcaccaucacggacgcggucgacugcgcccuggacccccugagcgagaccaagugcacccucaaguccuucaccguggagaaggggaucuaccagacgagcaacuuccgggugcagcccaccgaguccaucguccgcuucccgaacaucaccaaccugugccccuucggcgagguguucaacgccacccgguucgccagcgucuacgccuggaaccgcaagcggaucuccaacugcguggcggacuacagcgugcuguacaacuccgccagcuucuccacguucaagugcuacggcgucagccccaccaagcucaacgaccugugcuucaccaacguguacgccgacuccuucgugauccgcggggacgagguccggcagaucgcccccggccagaccgggaagaucgccgacuacaacuacaagcugccggacgacuucacgggcugcgugaucgcguggaacagcaacaaccucgacuccaaggucgggggcaacuacaacuaccuguaccgccuguuccgcaagagcaaccucaagcccuucgagcgggacaucuccaccgagaucuaccaggccggcagcacccccugcaacgggguggagggcuucaacugcuacuucccccugcaguccuacggguuccagccgaccaacggcgugggguaccagcccuaccggguggucgugcugagcuucgagcuccugcacgcccccgccacggugugcggccccaagaaguccaccaaccuggucaagaacaagugcgugaacuucaacuucaacggccucaccgggaccggcgugcugaccgagagcaacaagaaguuccugccguuccagcaguucgggcgcgacaucgccgacacgaccgacgcgguccgcgacccccagacccuggagauccucgacaucacccccugcagcuucggcgggguguccgugaucacgccgggcaccaacaccagcaaccaggucgccgugcuguaccaggacgugaacugcaccgagguccccguggccauccacgccgaccagcugacgcccaccuggcggguguacuccaccggcagcaacgucuuccagacccgcgccgggugccucaucggcgcggagcacgugaacaacuccuacgagugcgacauccccaucggggccggcaucugcgccagcuaccagacgcagaccaacuccccgcggcgcgcccggagcguggcgucccagagcaucaucgccuacaccaugucccugggcgccgagaacagcgucgccuacuccaacaacagcaucgccauccccaccaacuucacgaucuccgugaccaccgagauccugcccgugagcaugaccaagacgagcgucgacugcaccauguacaucugcggggacuccaccgagugcagcaaccuccugcugcaguacggcuccuucugcacccagcucaaccgcgcgcugacggggaucgccguggagcaggacaagaacacccaggagguguucgcccaggucaagcagaucuacaagacgcccccgaucaaggacuucggcggguucaacuucagccagauccugcccgaccccuccaagcccagcaagcgguccuucaucgaggaccuccuguucaacaaggugacccuggccgacgccggcuucaucaagcaguacggcgacugccucggggacaucgcggcccgcgaccugaucugcgcccagaaguucaacggccugaccgugcucccgccccugcugaccgacgagaugaucgcccaguacaccagcgcccuccuggcggggaccaucacguccggcuggaccuucggggccggcgccgcccugcagauccccuucgcgaugcagauggccuaccgguucaacggcaucggggucacccagaacgugcucuacgagaaccagaagcugaucgccaaccaguucaacagcgccaucggcaagauccaggacucccugagcuccaccgccagcgcgcucgggaagcugcaggacguggucaaccagaacgcccaggcccugaacacgcucgugaagcagcuguccagcaacuucggcgccaucuccagcgugcugaacgacauccucucccgccuggacccgcccgaggccgaggugcagaucgaccggcugaucaccgggcgccuccagagccugcagaccuacgugacccagcagcugauccgggcggccgagauccgcgccagcgccaaccucgccgcgaccaagauguccgagugcguccugggccagagcaagcggguggacuucugcggcaagggguaccaccugauguccuucccccagagcgccccgcacggcguggucuuccuccacgugacguacguccccgcccaggagaagaacuucaccaccgcccccgcgaucugccacgacgggaaggcccacuucccccgcgagggcguguucguguccaacgggacccacugguucgucacgcagcggaacuucuacgagccgcagaucaucaccaccgacaacaccuucgugagcggcaacugcgacguggucaucggcaucgugaacaacacgguguacgacccccugcagcccgagcuggacuccuucaaggaggagcucgacaaguacuucaagaaccacaccagccccgacgucgaccugggggacaucuccggcaucaacgccagcguggugaacauccagaaggagaucgaccgccugaacgaggucgccaagaaccucaacgagucccugaucgaccugcaggagcucgggaaguacgagcaguacaucaaguggccgugguacaucuggcugggcuucaucgccggccugaucgcgaucgugauggugaccaucaugcucugcugcaugaccagcugcugcuccugccugaaggggugcugcagcugcggcuccugcugcaaguucgacgaggacgacagcgagcccguccugaagggggugaagcuccacuacacguga

SEQ ID NO: 138 - RNA, 2046 nt, Artificial Sequence
  SARS-CoV-2/Wuhan/WIV05/2019__EPI_ISL_402128 spike protein CDS gc (1-681)
auguucguguuccugguccuccugccccuggugagcucccagugcgugaaccucaccacccgcacgcagcugccgcccgccuacaccaacagcuucacccggggcgucuacuaccccgacaagguguuccgcuccagcgugcugcacuccacccaggaccucuuccugcccuucuucagcaacgucacgugguuccacgccauccacguguccgggaccaacggcaccaagcgguucgacaacccggugcugcccuucaacgacggggucuacuucgcgagcaccgagaaguccaacaucauccgcggcuggaucuucgggacgacccucgacagcaagacccagucccugcugaucgugaacaacgccaccaacguggucaucaaggugugcgaguuccaguucugcaacgaccccuuccucggcguguacuaccacaagaacaacaagagcuggauggaguccgaguuccgggucuacagcuccgccaacaacugcacguucgaguacgugagccagcccuuccugauggaccuggagggcaagcaggggaacuucaagaaccuccgcgaguucguguucaagaacaucgacggcuacuucaagaucuacuccaagcacaccccgaucaaccugguccgggaccugccccagggguucagcgcccucgagccccugguggaccugcccaucggcaucaacaucacccgcuuccagacccuccuggcccugcaccgguccuaccucacgccgggggacagcagcuccggcuggaccgcgggcgccgccgccuacuacgugggguaccugcagccccgcaccuuccugcucaaguacaacgagaacggcaccaucacggacgcggucgacugcgcccuggacccccugagcgagaccaagugcacccucaaguccuucaccguggagaaggggaucuaccagacgagcaacuuccgggugcagcccaccgaguccaucguccgcuucccgaacaucaccaaccugugccccuucggcgagguguucaacgccacccgguucgccagcgucuacgccuggaaccgcaagcggaucuccaacugcguggcggacuacagcgugcuguacaacuccgccagcuucuccacguucaagugcuacggcgucagccccaccaagcucaacgaccugugcuucaccaacguguacgccgacuccuucgugauccgcggggacgagguccggcagaucgcccccggccagaccgggaagaucgccgacuacaacuacaagcugccggacgacuucacgggcugcgugaucgcguggaacagcaacaaccucgacuccaaggucgggggcaacuacaacuaccuguaccgccuguuccgcaagagcaaccucaagcccuucgagcgggacaucuccaccgagaucuaccaggccggcagcacccccugcaacgggguggagggcuucaacugcuacuucccccugcaguccuacggguuccagccgaccaacggcgugggguaccagcccuaccggguggucgugcugagcuucgagcuccugcacgcccccgccacggugugcggccccaagaaguccaccaaccuggucaagaacaagugcgugaacuucaacuucaacggccucaccgggaccggcgugcugaccgagagcaacaagaaguuccugccguuccagcaguucgggcgcgacaucgccgacacgaccgacgcgguccgcgacccccagacccuggagauccucgacaucacccccugcagcuucggcgggguguccgugaucacgccgggcaccaacaccagcaaccaggucgccgugcuguaccaggacgugaacugcaccgagguccccguggccauccacgccgaccagcugacgcccaccuggcggguguacuccaccggcagcaacgucuuccagacccgcgccgggugccucaucggcgcggagcacgugaacaacuccuacgagugcgacauccccaucggggccggcaucugcgccagcuaccagacgcagaccaacuccccguga

SEQ ID NO: 139 - RNA, 45 nt, Artificial Sequence
  SARS-CoV-2/Wuhan/WIV05/2019__EPI_ISL_402128 spike protein CDS gc (1-15)
auguucguguuccugguccuccugccccuggugagcucccagugc

SEQ ID NO: 140 - RNA, 1998 nt, Artificial Sequence
  SARS-CoV-2/Wuhan/WIV05/2019__EPI_ISL_402128 spike protein CDS gc (16-681)
gugaaccucaccacccgcacgcagcugccgcccgccuacaccaacagcuucacccggggcgucuacuaccccgacaagguguuccgcuccagcgugcugcacuccacccaggaccucuuccugcccuucuucagcaacgucacgugguuccacgccauccacguguccgggaccaacggcaccaagcgguucgacaacccggugcugcccuucaacgacggggucuacuucgcgagcaccgagaaguccaacaucauccgcggcuggaucuucgggacgacccucgacagcaagacccagucccugcugaucgugaacaacgccaccaacguggucaucaaggugugcgaguuccaguucugcaacgaccccuuccucggcguguacuaccacaagaacaacaagagcuggauggaguccgaguuccgggucuacagcuccgccaacaacugcacguucgaguacgugagccagcccuuccugauggaccuggagggcaagcaggggaacuucaagaaccuccgcgaguucguguucaagaacaucgacggcuacuucaagaucuacuccaagcacaccccgaucaaccugguccgggaccugccccagggguucagcgcccucgagccccugguggaccugcccaucggcaucaacaucacccgcuuccagacccuccuggcccugcaccgguccuaccucacgccgggggacagcagcuccggcuggaccgcgggcgccgccgccuacuacgugggguaccugcagccccgcaccuuccugcucaaguacaacgagaacggcaccaucacggacgcggucgacugcgcccuggacccccugagcgagaccaagugcacccucaaguccuucaccguggagaaggggaucuaccagacgagcaacuuccgggugcagcccaccgaguccaucguccgcuucccgaacaucaccaaccugugccccuucggcgagguguucaacgccacccgguucgccagcgucuacgccuggaaccgcaagcggaucuccaacugcguggcggacuacagcgugcuguacaacuccgccagcuucuccacguucaagugcuacggcgucagccccaccaagcucaacgaccugugcuucaccaacguguacgccgacuccuucgugauccgcggggacgagguccggcagaucgcccccggccagaccgggaagaucgccgacuacaacuacaagcugccggacgacuucacgggcugcgugaucgcguggaacagcaacaaccucgacuccaaggucgggggcaacuacaacuaccuguaccgccuguuccgcaagagcaaccucaagcccuucgagcgggacaucuccaccgagaucuaccaggccggcagcacccccugcaacgggguggagggcuucaacugcuacuucccccugcaguccuacggguuccagccgaccaacggcgugggguaccagcccuaccggguggucgugcugagcuucgagcuccugcacgcccccgccacggugugcggccccaagaaguccaccaaccuggucaagaacaagugcgugaacuucaacuucaacggccucaccgggaccggcgugcugaccgagagcaacaagaaguuccugccguuccagcaguucgggcgcgacaucgccgacacgaccgacgcgguccgcgacccccagacccuggagauccucgacaucacccccugcagcuucggcgggguguccgugaucacgccgggcaccaacaccagcaaccaggucgccgugcuguaccaggacgugaacugcaccgagguccccguggccauccacgccgaccagcugacgcccaccuggcggguguacuccaccggcagcaacgucuuccagacccgcgccgggugccucaucggcgcggagcacgugaacaacuccuacgagugcgacauccccaucggggccggcaucugcgccagcuaccagacgcagaccaacuccccg

SEQ ID NO: 141 - RNA, 1776 nt, Artificial Sequence
  SARS-CoV-2/Wuhan/WIV05/2019__EPI_ISL_402128 spike protein CDS gc (682-1273)
cggcgcgcccggagcguggcgucccagagcaucaucgccuacaccaugucccugggcgccgagaacagcgucgccuacuccaacaacagcaucgccauccccaccaacuucacgaucuccgugaccaccgagauccugcccgugagcaugaccaagacgagcgucgacugcaccauguacaucugcggggacuccaccgagugcagcaaccuccugcugcaguacggcuccuucugcacccagcucaaccgcgcgcugacggggaucgccguggagcaggacaagaacacccaggagguguucgcccaggucaagcagaucuacaagacgcccccgaucaaggacuucggcggguucaacuucagccagauccugcccgaccccuccaagcccagcaagcgguccuucaucgaggaccuccuguucaacaaggugacccuggccgacgccggcuucaucaagcaguacggcgacugccucggggacaucgcggcccgcgaccugaucugcgcccagaaguucaacggccugaccgugcucccgccccugcugaccgacgagaugaucgcccaguacaccagcgcccuccuggcggggaccaucacguccggcuggaccuucggggccggcgccgcccugcagauccccuucgcgaugcagauggccuaccgguucaacggcaucggggucacccagaacgugcucuacgagaaccagaagcugaucgccaaccaguucaacagcgccaucggcaagauccaggacucccugagcuccaccgccagcgcgcucgggaagcugcaggacguggucaaccagaacgcccaggcccugaacacgcucgugaagcagcuguccagcaacuucggcgccaucuccagcgugcugaacgacauccucucccgccuggacaaggucgaggccgaggugcagaucgaccggcugaucaccgggcgccuccagagccugcagaccuacgugacccagcagcugauccgggcggccgagauccgcgccagcgccaaccucgccgcgaccaagauguccgagugcguccugggccagagcaagcggguggacuucugcggcaagggguaccaccugauguccuucccccagagcgccccgcacggcguggucuuccuccacgugacguacguccccgcccaggagaagaacuucaccaccgcccccgcgaucugccacgacgggaaggcccacuucccccgcgagggcguguucguguccaacgggacccacugguucgucacgcagcggaacuucuacgagccgcagaucaucaccaccgacaacaccuucgugagcggcaacugcgacguggucaucggcaucgugaacaacacgguguacgacccccugcagcccgagcuggacuccuucaaggaggagcucgacaaguacuucaagaaccacaccagccccgacgucgaccugggggacaucuccggcaucaacgccagcguggugaacauccagaaggagaucgaccgccugaacgaggucgccaagaaccucaacgagucccugaucgaccugcaggagcucgggaaguacgagcaguacaucaaguggccgugguacaucuggcugggcuucaucgccggccugaucgcgaucgugauggugaccaucaugcucugcugcaugaccagcugcugcuccugccugaaggggugcugcagcugcggcuccugcugcaaguucgacgaggacgacagcgagcccguccugaagggggugaagcuccacuacacg

SEQ ID NO: 142 - RNA, 3822 nt, Artificial Sequence
  SARS-CoV-2/Wuhan/WIV05/2019__EPI_ISL_402128 spike protein CDS human (1-1273)(K986P_V987P)
auguucguguuucugguccuccuuccccugguuagcucccagugcgugaacuugaccacaagaacucaauuaccuccagccuacacuaauucuuucaccaggggcguauauuacccggacaagguguuucggucaaguguccugcacagcacacaggaucuauuccuccccuuuuucuccaacgugacuugguuucaugcuauccacguuucugggaccaauggaacaaaacgcuucgacaacccugugcugccauuuaaugauggugucuauuucgcaucgaccgagaagucaaacauuauacgaggcuggaucuuugggacuacacuugacagcaaaacccagagucuguugauugugaauaacgccacgaauguaguuaucaaggugugugaguuccaguuuugcaacgaucccuuccucggagucuacuaucauaaaaauaacaaguccuggauggagucugaguuccguguguacagcuccgcgaauaacuguacuuuugaauaugugucacaaccuuuccugauggaccuggaaggcaagcaggguaauuuuaaaaaccucagagaguucgucuuuaagaacauugauggguacuucaaaaucuacaguaagcacaccccaauaaauuuaguuagggaccugccccagggauuuagcgcucuugagccuuugguggaucugccaaucggcauuaacaucacacgguuccagacucuacucgcccugcaucgcucuuaucuuaccccgggcgacuccucaagcggguggacagcaggagccgcugcauacuauguagguuaccugcaacccagaaccuuuuugcucaaauauaaugaaaacggcacgauuacugaugccguggacugcgcucuggauccuuuaagugagacaaaguguacccugaagucuuucacugucgaaaaagggaucuaccagacauccaauuuuagggugcagccaaccgagagcauaguucgguuccccaacauuacgaaucucugcccuuuuggagagguguucaacgccacccgcuucgcgucggucuaugcauggaaucgaaagagaaucucuaacuguguggccgacuacuccguacuuuacaauucagcuaguuuuagcacauucaaaugcuauggcguuuccccaacuaagcugaacgacuuguguuuuaccaauguguacgccgauucuuucgucauuaggggugacgaagugcggcagaucgcacccgggcaaacaggaaaaaucgcugauuauaacuacaagcuaccggacgauuuuacuggcugcgucauugccuggaauagcaacaaccuggacucaaaagugggcgggaauuauaacuaccucuaucgucuguuccgcaagaguaaucuuaagccuuuugagagagauauauccaccgaaaucuaccaggcgggaagcacacccuguaacgguguugagggcuucaauugcuacuuuccacugcagucuuauggguuccaaccuaccaacggagugggcuaccagcccuauaggguagucguguugucauuugaacuccugcacgccccagcaacuguuugcggucccaaaaagaguacgaauuuagugaaaaacaagugugucaauuucaacuuuaaugggcugacaggcaccggagugcuaacugagagcaacaaaaaguuccucccuuuccagcaguuuggccgggacauugcugauaccacagacgccguacgagauccacaaacccuggagauccuugacauaacuccgugcuccuucgggggagugucuguuauuacacccgguacgaauaccucgaaccaggucgcuguguuguaccaggacgugaauuguacugaagucccuguugccauccacgcagaucagcugacaccaaccuggcgcguguauagcacaggcuccaacguguuucaaacuagagccgggugccucaucggagcugagcauguaaacaauucauacgaaugugacauucccaucggcgcggguauuugcgcaaguuaucagacccagacgaacucuccuaggcgggcccgcagcgucgcuucccagucaauaaucgccuacaccaugagccugggggcagaaaauucuguggccuacuccaacaauaguauugcuaucccaacaaacuucacuaucagcguuaccacagaaauucuucccgugucuaugacuaagaccuccgucgauuguacgauguauauaugcggcgacucaacagaguguaguaaucuguugcuccaauacggcagcuuuugcacccagcugaacagagccuuaacuggaaucgcaguggagcaggauaaaaauacacaggaaguuuucgcgcaagugaagcagauuuauaaaaccccgccuaucaaggacuuugggggauucaacuuuucgcagauucugccagaucccuccaaaccuucuaagaggagcuucaucgaggaccuacucuuuaauaagguaacucuggcugaugccgguuucauaaaacaauacggcgacugucuuggggauaucgcagcccgugacuugauuugcgcucagaaguucaacggacugaccguccugcccccacucuuaacagaugaaaugaucgcccaguauacgucagcacugcuugcuggcaccauuacgagugguuggacauuuggggccggcgcggccuugcagaucccuuucgcuaugcaaauggcauaccgguuuaauggaauaggcgugacccagaacgugcucuaugagaaucagaaacugauugccaaccaguucaacuccgcuaucgggaagauucaagacucucuaagcuccacagccucagcacugggaaaacuccaggacgucguuaaucagaacgcgcaggcccugaauacucuugugaagcaauugagcaguaacuuuggcgcuaucucuuccguacugaaugauauauuaagccgacucgacccgcccgaagccgagguccagaucgauagacugauuaccgguaggcuucagucgcugcaaacguacgugacacagcaguugauccgcgcagcugagauucgggccucagcaaaccucgccgcuaccaaaaugucugaaugcguucuggggcagaguaagagaguggacuucuguggaaaaggcuaccaccuaauguccuuuccccaaagcgcgccacauggugucguguuccugcacguuacuuaugugccggcccaggagaagaauuuuaccacagcuccugcaaucugccacgauggcaaagcccauuuccccagggaaggggucuuuguaucuaacggaacucacugguucgugacccagcgcaauuuuuacgagccacagauaauuacaacggacaacaccuucguuagcggcaauugugauguggucaucgggaucgugaacaauacuguauaugacccccuccaaccugagcuggauuccuucaaggaggaacuugacaaauacuuuaagaaccauacaucaccagauguggacuugggagauauuaguggcaucaaugccagcgucguuaacauucagaaggaaauagaccgacugaaugagguggcuaaaaacuuaaacgaaucucucaucgaccugcaggagcuugguaaguaugagcaguacauuaaauggcccugguauaucuggcugggguucauugcaggacuaaucgccauagugauggucaccaucaugcucugcuguaugacuuccugcuguucaugccugaagggcuguugcaguugugguagcugcugcaaauuugaugaagacgauuccgagccuguguugaagggcguuaagcugcacuacacauga

SEQ ID NO: 143 - RNA, 2046 nt, Artificial Sequence
  SARS-CoV-2/Wuhan/WIV05/2019__EPI_ISL_402128 spike protein CDS human (1-681)
auguucguguuucugguccuccuuccccugguuagcucccagugcgugaacuugaccacaagaacucaauuaccuccagccuacacuaauucuuucaccaggggcguauauuacccggacaagguguuucggucaaguguccugcacagcacacaggaucuauuccuccccuuuuucuccaacgugacuugguuucaugcuauccacguuucugggaccaauggaacaaaacgcuucgacaacccugugcugccauuuaaugauggugucuauuucgcaucgaccgagaagucaaacauuauacgaggcuggaucuuugggacuacacuugacagcaaaacccagagucuguugauugugaauaacgccacgaauguaguuaucaaggugugugaguuccaguuuugcaacgaucccuuccucggagucuacuaucauaaaaauaacaaguccuggauggagucugaguuccguguguacagcuccgcgaauaacuguacuuuugaauaugugucacaaccuuuccugauggaccuggaaggcaagcaggguaauuuuaaaaaccucagagaguucgucuuuaagaacauugauggguacuucaaaaucuacaguaagcacaccccaauaaauuuaguuagggaccugccccagggauuuagcgcucuugagccuuugguggaucugccaaucggcauuaacaucacacgguuccagacucuacucgcccugcaucgcucuuaucuuaccccgggcgacuccucaagcggguggacagcaggagccgcugcauacuauguagguuaccugcaacccagaaccuuuuugcucaaauauaaugaaaacggcacgauuacugaugccguggacugcgcucuggauccuuuaagugagacaaaguguacccugaagucuuucacugucgaaaaagggaucuaccagacauccaauuuuagggugcagccaaccgagagcauaguucgguuccccaacauuacgaaucucugcccuuuuggagagguguucaacgccacccgcuucgcgucggucuaugcauggaaucgaaagagaaucucuaacuguguggccgacuacuccguacuuuacaauucagcuaguuuuagcacauucaaaugcuauggcguuuccccaacuaagcugaacgacuuguguuuuaccaauguguacgccgauucuuucgucauuaggggugacgaagugcggcagaucgcacccgggcaaacaggaaaaaucgcugauuauaacuacaagcuaccggacgauuuuacuggcugcgucauugccuggaauagcaacaaccuggacucaaaagugggcgggaauuauaacuaccucuaucgucuguuccgcaagaguaaucuuaagccuuuugagagagauauauccaccgaaaucuaccaggcgggaagcacacccuguaacgguguugagggcuucaauugcuacuuuccacugcagucuuauggguuccaaccuaccaacggagugggcuaccagcccuauaggguagucguguugucauuugaacuccugcacgccccagcaacuguuugcggucccaaaaagaguacgaauuuagugaaaaacaagugugucaauuucaacuuuaaugggcugacaggcaccggagugcuaacugagagcaacaaaaaguuccucccuuuccagcaguuuggccgggacauugcugauaccacagacgccguacgagauccacaaacccuggagauccuugacauaacuccgugcuccuucgggggagugucuguuauuacacccgguacgaauaccucgaaccaggucgcuguguuguaccaggacgugaauuguacugaagucccuguugccauccacgcagaucagcugacaccaaccuggcgcguguauagcacaggcuccaacguguuucaaacuagagccgggugccucaucggagcugagcauguaaacaauucauacgaaugugacauucccaucggcgcggguauuugcgcaaguuaucagacccagacgaacucuccuuga

SEQ ID NO: 144 - RNA, 45 nt, Artificial Sequence
  SARS-CoV-2/Wuhan/WIV05/2019__EPI_ISL_402128 spike protein CDS human (1-15)
auguucguguuucugguccuccuuccccugguuagcucccagugc

SEQ ID NO: 145 - RNA, 1998 nt, Artificial Sequence
  SARS-CoV-2/Wuhan/WIV05/2019__EPI_ISL_402128 spike protein CDS human (16-681)
gugaacuugaccacaagaacucaauuaccuccagccuacacuaauucuuucaccaggggcguauauuacccggacaagguguuucggucaaguguccugcacagcacacaggaucuauuccuccccuuuuucuccaacgugacuugguuucaugcuauccacguuucugggaccaauggaacaaaacgcuucgacaacccugugcugccauuuaaugauggugucuauuucgcaucgaccgagaagucaaacauuauacgaggcuggaucuuugggacuacacuugacagcaaaacccagagucuguugauugugaauaacgccacgaauguaguuaucaaggugugugaguuccaguuuugcaacgaucccuuccucggagucuacuaucauaaaaauaacaaguccuggauggagucugaguuccguguguacagcuccgcgaauaacuguacuuuugaauaugugucacaaccuuuccugauggaccuggaaggcaagcaggguaauuuuaaaaaccucagagaguucgucuuuaagaacauugauggguacuucaaaaucuacaguaagcacaccccaauaaauuuaguuagggaccugccccagggauuuagcgcucuugagccuuugguggaucugccaaucggcauuaacaucacacgguuccagacucuacucgcccugcaucgcucuuaucuuaccccgggcgacuccucaagcggguggacagcaggagccgcugcauacuauguagguuaccugcaacccagaaccuuuuugcucaaauauaaugaaaacggcacgauuacugaugccguggacugcgcucuggauccuuuaagugagacaaaguguacccugaagucuuucacugucgaaaaagggaucuaccagacauccaauuuuagggugcagccaaccgagagcauaguucgguuccccaacauuacgaaucucugcccuuuuggagagguguucaacgccacccgcuucgcgucggucuaugcauggaaucgaaagagaaucucuaacuguguggccgacuacuccguacuuuacaauucagcuaguuuuagcacauucaaaugcuauggcguuuccccaacuaagcugaacgacuuguguuuuaccaauguguacgccgauucuuucgucauuaggggugacgaagugcggcagaucgcacccgggcaaacaggaaaaaucgcugauuauaacuacaagcuaccggacgauuuuacuggcugcgucauugccuggaauagcaacaaccuggacucaaaagugggcgggaauuauaacuaccucuaucgucuguuccgcaagaguaaucuuaagccuuuugagagagauauauccaccgaaaucuaccaggcgggaagcacacccuguaacgguguugagggcuucaauugcuacuuuccacugcagucuuauggguuccaaccuaccaacggagugggcuaccagcccuauaggguagucguguugucauuugaacuccugcacgccccagcaacuguuugcggucccaaaaagaguacgaauuuagugaaaaacaagugugucaauuucaacuuuaaugggcugacaggcaccggagugcuaacugagagcaacaaaaaguuccucccuuuccagcaguuuggccgggacauugcugauaccacagacgccguacgagauccacaaacccuggagauccuugacauaacuccgugcuccuucgggggagugucuguuauuacacccgguacgaauaccucgaaccaggucgcuguguuguaccaggacgugaauuguacugaagucccuguugccauccacgcagaucagcugacaccaaccuggcgcguguauagcacaggcuccaacguguuucaaacuagagccgggugccucaucggagcugagcauguaaacaauucauacgaaugugacauucccaucggcgcggguauuugcgcaaguuaucagacccagacgaacucuccu

SEQ ID NO: 146 - RNA, 3822 nt, Artificial Sequence
  SARS-CoV-2/Wuhan/WIV05/2019__EPI_ISL_402128 spike protein CDS gc mod (1-1273)(K986P_V987P)
auguucguguuucuggugcugcugccccugguguccagccagugugugaaccugaccaccagaacacagcugccuccagccuacaccaacagcuucaccagaggcguguacuaccccgacaagguguucagauccagcgugcugcacucuacccaggaccuguuccugccuuucuucagcaacgugaccugguuccacgccauccacguguccggcaccaauggcaccaagagauucgacaaccccgugcugcccuucaacgacgggguguacuuugccagcaccgagaaguccaacaucaucagaggcuggaucuucggcaccacacuggacagcaagacccagagccugcugaucgugaacaacgccaccaacguggucaucaaagugugcgaguuccaguucugcaacgaccccuuccugggcgucuacuaccacaagaacaacaagagcuggauggaaagcgaguuccggguguacagcagcgccaacaacugcaccuucgaguacgugucccagccuuuccugauggaccuggaaggcaagcagggcaacuucaagaaccugcgcgaguucguguucaagaacaucgacggcuacuucaaaaucuacagcaagcacaccccuaucaaccucgugcgggaucugccucagggcuucucugcucuggaaccccugguggaucugcccaucggcaucaacaucacccgguuucagacacugcuggcccugcacagaagcuaccugacaccuggcgauagcagcagcggauggacagcuggugccgccgcuuacuaugugggcuaccugcagccuagaaccuuccugcugaaguacaacgagaacggcaccaucaccgacgccguggauugugcucuggauccucugagcgagacaaagugcacccugaaguccuucaccguggaaaagggcaucuaccagaccagcaacuuccgggugcagcccaccgaauccaucgugcgguuccccaauaucaccaaucugugccccuucggcgagguguucaaugccaccagauucgccucuguguacgccuggaaccggaagcggaucagcaauugcguggccgacuacuccgugcuguacaacuccgccagcuucagcaccuucaagugcuacggcguguccccuaccaagcugaacgaccugugcuucacaaacguguacgccgacagcuucgugauccggggagaugaagugcggcagauugccccuggacagacaggcaagaucgccgacuacaacuacaagcugcccgacgacuucaccggcugugugauugccuggaacagcaacaaccuggacuccaaagucggcggcaacuacaauuaccuguaccggcuguuccggaaguccaaucugaagcccuucgagcgggacaucagcaccgaaaucuaucaggccggcagcaccccuugcaacggcguggaaggcuucaacugcuacuucccacugcaguccuacggcuuucagcccacaaauggcgugggcuaucagcccuacagagugguggugcugagcuucgaacugcugcaugcuccugccacagugugcggcccuaagaaaagcaccaaucucgugaagaacaaaugcgugaacuucaacuucaacggccugaccggcaccggcgugcugacagagagcaacaagaaguuccugccauuccagcaguuuggccgggauaucgccgauaccacagacgccguuagagauccccagacacuggaaauccuggacaucaccccaugcagcuucggcggagugucugugaucaccccuggcaccaacaccagcaaucagguggcagugcuguaccaggacgugaacuguaccgaagugcccguggccauucacgccgaucagcugacaccuacauggcggguguacuccaccggcagcaauguguuucagaccagagccggcugucugaucggagccgagcacgugaacaauagcuacgagugcgacauccccaucggcgcuggcaucugugccagcuaccagacacagacaaacagccccagacgggcuagaagcguggccagccagagcaucauugccuacacaaugucucugggcgccgagaacagcguggccuacuccaacaacucuaucgcuauccccaccaacuucaccaucagcgugaccaccgagauccugccuguguccaugaccaagaccagcguggacugcaccauguacaucugcggcgauuccaccgagugcuccaaccugcugcugcaguacggcagcuucugcacccagcugaauagagcccugacagggaucgccguggaacaggacaagaacacccaagagguguucgcccaagugaagcaaaucuacaagaccccuccuaucaaggacuucggcggcuucaauuucagccagauucugcccgauccuagcaagcccagcaagcggagcuucaucgaggaccugcuguucaacaaagugacacuggccgacgccggcuucaucaagcaguauggcgauugucugggcgacauugccgccagggaucugauuugcgcccagaaguuuaacggacugacagugcugccuccucugcugaccgaugagaugaucgcccaguacacaucugcccugcuggccggcacaaucacaagcggcuggacauuuggagcuggcgccgcucugcagauccccuuugcuaugcagauggccuaccgguucaacggcaucggagugacccagaaugugcuguacgagaaccagaagcugaucgccaaccaguucaacagcgccaucggcaagauccaggacagccugagcagcacagcaagcgcccugggaaagcugcaggacguggucaaccagaaugcccaggcacugaacacccuggucaagcagcuguccuccaacuucggcgccaucagcucugugcugaacgauauccugagcagacuggacccuccugaggccgaggugcagaucgacagacugaucacaggcagacugcagagccuccagacauacgugacccagcagcugaucagagccgccgagauuagagccucugccaaucuggccgccaccaagaugucugagugugugcugggccagagcaagagaguggacuuuugcggcaagggcuaccaccugaugagcuucccucagucugccccucacggcgugguguuucugcacgugacauaugugcccgcucaagagaagaauuucaccaccgcuccagccaucugccacgacggcaaagcccacuuuccuagagaaggcguguucguguccaacggcacccauugguucgugacacagcggaacuucuacgagccccagaucaucaccaccgacaacaccuucgugucuggcaacugcgacguugugaucggcauugugaacaauaccguguacgacccucugcagcccgagcuggacagcuucaaagaggaacuggacaaguacuuuaagaaccacacaagccccgacguggaccugggcgauaucagcggaaucaaugccagcgucgugaacauccagaaagagaucgaccggcugaacgagguggccaagaaucugaacgagagccugaucgaccugcaagaacuggggaaguacgagcaguacaucaaguggcccugguacaucuggcugggcuuuaucgccggacugauugccaucgugauggucacaaucaugcuguguugcaugaccagcugcuguagcugccugaagggcuguuguagcuguggcagcugcugcaaguucgacgaggacgauucugagcccgugcugaagggcgugaaacugcacuacaccuga

SEQ ID NO: 147 - RNA, 2046 nt, Artificial Sequence
  SARS-CoV-2/Wuhan/WIV05/2019__EPI_ISL_402128 spike protein CDS gc mod (1-681)
auguucguguuucuggugcugcugccccugguguccagccagugugugaaccugaccaccagaacacagcugccuccagccuacaccaacagcuucaccagaggcguguacuaccccgacaagguguucagauccagcgugcugcacucuacccaggaccuguuccugccuuucuucagcaacgugaccugguuccacgccauccacguguccggcaccaauggcaccaagagauucgacaaccccgugcugcccuucaacgacgggguguacuuugccagcaccgagaaguccaacaucaucagaggcuggaucuucggcaccacacuggacagcaagacccagagccugcugaucgugaacaacgccaccaacguggucaucaaagugugcgaguuccaguucugcaacgaccccuuccugggcgucuacuaccacaagaacaacaagagcuggauggaaagcgaguuccggguguacagcagcgccaacaacugcaccuucgaguacgugucccagccuuuccugauggaccuggaaggcaagcagggcaacuucaagaaccugcgcgaguucguguucaagaacaucgacggcuacuucaaaaucuacagcaagcacaccccuaucaaccucgugcgggaucugccucagggcuucucugcucuggaaccccugguggaucugcccaucggcaucaacaucacccgguuucagacacugcuggcccugcacagaagcuaccugacaccuggcgauagcagcagcggauggacagcuggugccgccgcuuacuaugugggcuaccugcagccuagaaccuuccugcugaaguacaacgagaacggcaccaucaccgacgccguggauugugcucuggauccucugagcgagacaaagugcacccugaaguccuucaccguggaaaagggcaucuaccagaccagcaacuuccgggugcagcccaccgaauccaucgugcgguuccccaauaucaccaaucugugccccuucggcgagguguucaaugccaccagauucgccucuguguacgccuggaaccggaagcggaucagcaauugcguggccgacuacuccgugcuguacaacuccgccagcuucagcaccuucaagugcuacggcguguccccuaccaagcugaacgaccugugcuucacaaacguguacgccgacagcuucgugauccggggagaugaagugcggcagauugccccuggacagacaggcaagaucgccgacuacaacuacaagcugcccgacgacuucaccggcugugugauugccuggaacagcaacaaccuggacuccaaagucggcggcaacuacaauuaccuguaccggcuguuccggaaguccaaucugaagcccuucgagcgggacaucagcaccgaaaucuaucaggccggcagcaccccuugcaacggcguggaaggcuucaacugcuacuucccacugcaguccuacggcuuucagcccacaaauggcgugggcuaucagcccuacagagugguggugcugagcuucgaacugcugcaugcuccugccacagugugcggcccuaagaaaagcaccaaucucgugaagaacaaaugcgugaacuucaacuucaacggccugaccggcaccggcgugcugacagagagcaacaagaaguuccugccauuccagcaguuuggccgggauaucgccgauaccacagacgccguuagagauccccagacacuggaaauccuggacaucaccccaugcagcuucggcggagugucugugaucaccccuggcaccaacaccagcaaucagguggcagugcuguaccaggacgugaacuguaccgaagugcccguggccauucacgccgaucagcugacaccuacauggcggguguacuccaccggcagcaauguguuucagaccagagccggcugucugaucggagccgagcacgugaacaauagcuacgagugcgacauccccaucggcgcuggcaucugugccagcuaccagacacagacaaacagccccuga

SEQ ID NO: 148 - RNA, 4094 nt, Artificial Sequence
  SARS-CoV-2/Wuhan/WIV05/2019__EPI_ISL_402128 spike protein mRNA gc (1-1273) R9488, R9492, R10161
aggagagucccgcagucggcguccagcggcucugcuuguucgugugugugucguugcaggccuuauucaagcuuaccauguucguguuccugguccuccugccccuggugagcucccagugcgugaaccucaccacccgcacgcagcugccgcccgccuacaccaacagcuucacccggggcgucuacuaccccgacaagguguuccgcuccagcgugcugcacuccacccaggaccucuuccugcccuucuucagcaacgucacgugguuccacgccauccacguguccgggaccaacggcaccaagcgguucgacaacccggugcugcccuucaacgacggggucuacuucgcgagcaccgagaaguccaacaucauccgcggcuggaucuucgggacgacccucgacagcaagacccagucccugcugaucgugaacaacgccaccaacguggucaucaaggugugcgaguuccaguucugcaacgaccccuuccucggcguguacuaccacaagaacaacaagagcuggauggaguccgaguuccgggucuacagcuccgccaacaacugcacguucgaguacgugagccagcccuuccugauggaccuggagggcaagcaggggaacuucaagaaccuccgcgaguucguguucaagaacaucgacggcuacuucaagaucuacuccaagcacaccccgaucaaccugguccgggaccugccccagggguucagcgcccucgagccccugguggaccugcccaucggcaucaacaucacccgcuuccagacccuccuggcccugcaccgguccuaccucacgccgggggacagcagcuccggcuggaccgcgggcgccgccgccuacuacgugggguaccugcagccccgcaccuuccugcucaaguacaacgagaacggcaccaucacggacgcggucgacugcgcccuggacccccugagcgagaccaagugcacccucaaguccuucaccguggagaaggggaucuaccagacgagcaacuuccgggugcagcccaccgaguccaucguccgcuucccgaacaucaccaaccugugccccuucggcgagguguucaacgccacccgguucgccagcgucuacgccuggaaccgcaagcggaucuccaacugcguggcggacuacagcgugcuguacaacuccgccagcuucuccacguucaagugcuacggcgucagccccaccaagcucaacgaccugugcuucaccaacguguacgccgacuccuucgugauccgcggggacgagguccggcagaucgcccccggccagaccgggaagaucgccgacuacaacuacaagcugccggacgacuucacgggcugcgugaucgcguggaacagcaacaaccucgacuccaaggucgggggcaacuacaacuaccuguaccgccuguuccgcaagagcaaccucaagcccuucgagcgggacaucuccaccgagaucuaccaggccggcagcacccccugcaacgggguggagggcuucaacugcuacuucccccugcaguccuacggguuccagccgaccaacggcgugggguaccagcccuaccggguggucgugcugagcuucgagcuccugcacgcccccgccacggugugcggccccaagaaguccaccaaccuggucaagaacaagugcgugaacuucaacuucaacggccucaccgggaccggcgugcugaccgagagcaacaagaaguuccugccguuccagcaguucgggcgcgacaucgccgacacgaccgacgcgguccgcgacccccagacccuggagauccucgacaucacccccugcagcuucggcgggguguccgugaucacgccgggcaccaacaccagcaaccaggucgccgugcuguaccaggacgugaacugcaccgagguccccguggccauccacgccgaccagcugacgcccaccuggcggguguacuccaccggcagcaacgucuuccagacccgcgccgggugccucaucggcgcggagcacgugaacaacuccuacgagugcgacauccccaucggggccggcaucugcgccagcuaccagacgcagaccaacuccccgcggcgcgcccggagcguggcgucccagagcaucaucgccuacaccaugucccugggcgccgagaacagcgucgccuacuccaacaacagcaucgccauccccaccaacuucacgaucuccgugaccaccgagauccugcccgugagcaugaccaagacgagcgucgacugcaccauguacaucugcggggacuccaccgagugcagcaaccuccugcugcaguacggcuccuucugcacccagcucaaccgcgcgcugacggggaucgccguggagcaggacaagaacacccaggagguguucgcccaggucaagcagaucuacaagacgcccccgaucaaggacuucggcggguucaacuucagccagauccugcccgaccccuccaagcccagcaagcgguccuucaucgaggaccuccuguucaacaaggugacccuggccgacgccggcuucaucaagcaguacggcgacugccucggggacaucgcggcccgcgaccugaucugcgcccagaaguucaacggccugaccgugcucccgccccugcugaccgacgagaugaucgcccaguacaccagcgcccuccuggcggggaccaucacguccggcuggaccuucggggccggcgccgcccugcagauccccuucgcgaugcagauggccuaccgguucaacggcaucggggucacccagaacgugcucuacgagaaccagaagcugaucgccaaccaguucaacagcgccaucggcaagauccaggacucccugagcuccaccgccagcgcgcucgggaagcugcaggacguggucaaccagaacgcccaggcccugaacacgcucgugaagcagcuguccagcaacuucggcgccaucuccagcgugcugaacgacauccucucccgccuggacaaggucgaggccgaggugcagaucgaccggcugaucaccgggcgccuccagagccugcagaccuacgugacccagcagcugauccgggcggccgagauccgcgccagcgccaaccucgccgcgaccaagauguccgagugcguccugggccagagcaagcggguggacuucugcggcaagggguaccaccugauguccuucccccagagcgccccgcacggcguggucuuccuccacgugacguacguccccgcccaggagaagaacuucaccaccgcccccgcgaucugccacgacgggaaggcccacuucccccgcgagggcguguucguguccaacgggacccacugguucgucacgcagcggaacuucuacgagccgcagaucaucaccaccgacaacaccuucgugagcggcaacugcgacguggucaucggcaucgugaacaacacgguguacgacccccugcagcccgagcuggacuccuucaaggaggagcucgacaaguacuucaagaaccacaccagccccgacgucgaccugggggacaucuccggcaucaacgccagcguggugaacauccagaaggagaucgaccgccugaacgaggucgccaagaaccucaacgagucccugaucgaccugcaggagcucgggaaguacgagcaguacaucaaguggccgugguacaucuggcugggcuucaucgccggccugaucgcgaucgugauggugaccaucaugcucugcugcaugaccagcugcugcuccugccugaaggggugcugcagcugcggcuccugcugcaaguucgacgaggacgacagcgagcccguccugaagggggugaagcuccacuacacgugaggacuagucccuguucccagagcccacuuuuuuuucuuuuuuugaaauaaaauagccugucuuucagaucucaaaggcucuuuucagagccaccaaaaaaaaaaaaaaaaaaaaaaaaaaaaaaaaaaaaaaaaaaaaaaaaaaaaaaaaaaaaaaaaaaaaaaaaaaaaaaaaaaaaaaaaaaaaaaaaaaaaa

SEQ ID NO: 149 - RNA, 4094 nt, Artificial Sequence
  SARS-CoV-2/Wuhan/WIV05/2019__EPI_ISL_402128 spike protein mRNA gc (1-1273)(K986P_V987P) R9487, R9491, R9709, R10159, R10160
aggagagucccgcagucggcguccagcggcucugcuuguucgugugugugucguugcaggccuuauucaagcuuaccauguucguguuccugguccuccugccccuggugagcucccagugcgugaaccucaccacccgcacgcagcugccgcccgccuacaccaacagcuucacccggggcgucuacuaccccgacaagguguuccgcuccagcgugcugcacuccacccaggaccucuuccugcccuucuucagcaacgucacgugguuccacgccauccacguguccgggaccaacggcaccaagcgguucgacaacccggugcugcccuucaacgacggggucuacuucgcgagcaccgagaaguccaacaucauccgcggcuggaucuucgggacgacccucgacagcaagacccagucccugcugaucgugaacaacgccaccaacguggucaucaaggugugcgaguuccaguucugcaacgaccccuuccucggcguguacuaccacaagaacaacaagagcuggauggaguccgaguuccgggucuacagcuccgccaacaacugcacguucgaguacgugagccagcccuuccugauggaccuggagggcaagcaggggaacuucaagaaccuccgcgaguucguguucaagaacaucgacggcuacuucaagaucuacuccaagcacaccccgaucaaccugguccgggaccugccccagggguucagcgcccucgagccccugguggaccugcccaucggcaucaacaucacccgcuuccagacccuccuggcccugcaccgguccuaccucacgccgggggacagcagcuccggcuggaccgcgggcgccgccgccuacuacgugggguaccugcagccccgcaccuuccugcucaaguacaacgagaacggcaccaucacggacgcggucgacugcgcccuggacccccugagcgagaccaagugcacccucaaguccuucaccguggagaaggggaucuaccagacgagcaacuuccgggugcagcccaccgaguccaucguccgcuucccgaacaucaccaaccugugccccuucggcgagguguucaacgccacccgguucgccagcgucuacgccuggaaccgcaagcggaucuccaacugcguggcggacuacagcgugcuguacaacuccgccagcuucuccacguucaagugcuacggcgucagccccaccaagcucaacgaccugugcuucaccaacguguacgccgacuccuucgugauccgcggggacgagguccggcagaucgcccccggccagaccgggaagaucgccgacuacaacuacaagcugccggacgacuucacgggcugcgugaucgcguggaacagcaacaaccucgacuccaaggucgggggcaacuacaacuaccuguaccgccuguuccgcaagagcaaccucaagcccuucgagcgggacaucuccaccgagaucuaccaggccggcagcacccccugcaacgggguggagggcuucaacugcuacuucccccugcaguccuacggguuccagccgaccaacggcgugggguaccagcccuaccggguggucgugcugagcuucgagcuccugcacgcccccgccacggugugcggccccaagaaguccaccaaccuggucaagaacaagugcgugaacuucaacuucaacggccucaccgggaccggcgugcugaccgagagcaacaagaaguuccugccguuccagcaguucgggcgcgacaucgccgacacgaccgacgcgguccgcgacccccagacccuggagauccucgacaucacccccugcagcuucggcgggguguccgugaucacgccgggcaccaacaccagcaaccaggucgccgugcuguaccaggacgugaacugcaccgagguccccguggccauccacgccgaccagcugacgcccaccuggcggguguacuccaccggcagcaacgucuuccagacccgcgccgggugccucaucggcgcggagcacgugaacaacuccuacgagugcgacauccccaucggggccggcaucugcgccagcuaccagacgcagaccaacuccccgcggcgcgcccggagcguggcgucccagagcaucaucgccuacaccaugucccugggcgccgagaacagcgucgccuacuccaacaacagcaucgccauccccaccaacuucacgaucuccgugaccaccgagauccugcccgugagcaugaccaagacgagcgucgacugcaccauguacaucugcggggacuccaccgagugcagcaaccuccugcugcaguacggcuccuucugcacccagcucaaccgcgcgcugacggggaucgccguggagcaggacaagaacacccaggagguguucgcccaggucaagcagaucuacaagacgcccccgaucaaggacuucggcggguucaacuucagccagauccugcccgaccccuccaagcccagcaagcgguccuucaucgaggaccuccuguucaacaaggugacccuggccgacgccggcuucaucaagcaguacggcgacugccucggggacaucgcggcccgcgaccugaucugcgcccagaaguucaacggccugaccgugcucccgccccugcugaccgacgagaugaucgcccaguacaccagcgcccuccuggcggggaccaucacguccggcuggaccuucggggccggcgccgcccugcagauccccuucgcgaugcagauggccuaccgguucaacggcaucggggucacccagaacgugcucuacgagaaccagaagcugaucgccaaccaguucaacagcgccaucggcaagauccaggacucccugagcuccaccgccagcgcgcucgggaagcugcaggacguggucaaccagaacgcccaggcccugaacacgcucgugaagcagcuguccagcaacuucggcgccaucuccagcgugcugaacgacauccucucccgccuggacccgcccgaggccgaggugcagaucgaccggcugaucaccgggcgccuccagagccugcagaccuacgugacccagcagcugauccgggcggccgagauccgcgccagcgccaaccucgccgcgaccaagauguccgagugcguccugggccagagcaagcggguggacuucugcggcaagggguaccaccugauguccuucccccagagcgccccgcacggcguggucuuccuccacgugacguacguccccgcccaggagaagaacuucaccaccgcccccgcgaucugccacgacgggaaggcccacuucccccgcgagggcguguucguguccaacgggacccacugguucgucacgcagcggaacuucuacgagccgcagaucaucaccaccgacaacaccuucgugagcggcaacugcgacguggucaucggcaucgugaacaacacgguguacgacccccugcagcccgagcuggacuccuucaaggaggagcucgacaaguacuucaagaaccacaccagccccgacgucgaccugggggacaucuccggcaucaacgccagcguggugaacauccagaaggagaucgaccgccugaacgaggucgccaagaaccucaacgagucccugaucgaccugcaggagcucgggaaguacgagcaguacaucaaguggccgugguacaucuggcugggcuucaucgccggccugaucgcgaucgugauggugaccaucaugcucugcugcaugaccagcugcugcuccugccugaaggggugcugcagcugcggcuccugcugcaaguucgacgaggacgacagcgagcccguccugaagggggugaagcuccacuacacgugaggacuagucccuguucccagagcccacuuuuuuuucuuuuuuugaaauaaaauagccugucuuucagaucucaaaggcucuuuucagagccaccaaaaaaaaaaaaaaaaaaaaaaaaaaaaaaaaaaaaaaaaaaaaaaaaaaaaaaaaaaaaaaaaaaaaaaaaaaaaaaaaaaaaaaaaaaaaaaaaaaaaa

SEQ ID NO: 150 - RNA, 4094 nt, Artificial Sequence
  SARS-CoV-2/Wuhan/WIV05/2019__EPI_ISL_402128 spike protein mRNA human (1-1273)(K986P_V987P) R9486, R9490
aggagagucccgcagucggcguccagcggcucugcuuguucgugugugugucguugcaggccuuauucaagcuuaccauguucguguuucugguccuccuuccccugguuagcucccagugcgugaacuugaccacaagaacucaauuaccuccagccuacacuaauucuuucaccaggggcguauauuacccggacaagguguuucggucaaguguccugcacagcacacaggaucuauuccuccccuuuuucuccaacgugacuugguuucaugcuauccacguuucugggaccaauggaacaaaacgcuucgacaacccugugcugccauuuaaugauggugucuauuucgcaucgaccgagaagucaaacauuauacgaggcuggaucuuugggacuacacuugacagcaaaacccagagucuguugauugugaauaacgccacgaauguaguuaucaaggugugugaguuccaguuuugcaacgaucccuuccucggagucuacuaucauaaaaauaacaaguccuggauggagucugaguuccguguguacagcuccgcgaauaacuguacuuuugaauaugugucacaaccuuuccugauggaccuggaaggcaagcaggguaauuuuaaaaaccucagagaguucgucuuuaagaacauugauggguacuucaaaaucuacaguaagcacaccccaauaaauuuaguuagggaccugccccagggauuuagcgcucuugagccuuugguggaucugccaaucggcauuaacaucacacgguuccagacucuacucgcccugcaucgcucuuaucuuaccccgggcgacuccucaagcggguggacagcaggagccgcugcauacuauguagguuaccugcaacccagaaccuuuuugcucaaauauaaugaaaacggcacgauuacugaugccguggacugcgcucuggauccuuuaagugagacaaaguguacccugaagucuuucacugucgaaaaagggaucuaccagacauccaauuuuagggugcagccaaccgagagcauaguucgguuccccaacauuacgaaucucugcccuuuuggagagguguucaacgccacccgcuucgcgucggucuaugcauggaaucgaaagagaaucucuaacuguguggccgacuacuccguacuuuacaauucagcuaguuuuagcacauucaaaugcuauggcguuuccccaacuaagcugaacgacuuguguuuuaccaauguguacgccgauucuuucgucauuaggggugacgaagugcggcagaucgcacccgggcaaacaggaaaaaucgcugauuauaacuacaagcuaccggacgauuuuacuggcugcgucauugccuggaauagcaacaaccuggacucaaaagugggcgggaauuauaacuaccucuaucgucuguuccgcaagaguaaucuuaagccuuuugagagagauauauccaccgaaaucuaccaggcgggaagcacacccuguaacgguguugagggcuucaauugcuacuuuccacugcagucuuauggguuccaaccuaccaacggagugggcuaccagcccuauaggguagucguguugucauuugaacuccugcacgccccagcaacuguuugcggucccaaaaagaguacgaauuuagugaaaaacaagugugucaauuucaacuuuaaugggcugacaggcaccggagugcuaacugagagcaacaaaaaguuccucccuuuccagcaguuuggccgggacauugcugauaccacagacgccguacgagauccacaaacccuggagauccuugacauaacuccgugcuccuucgggggagugucuguuauuacacccgguacgaauaccucgaaccaggucgcuguguuguaccaggacgugaauuguacugaagucccuguugccauccacgcagaucagcugacaccaaccuggcgcguguauagcacaggcuccaacguguuucaaacuagagccgggugccucaucggagcugagcauguaaacaauucauacgaaugugacauucccaucggcgcggguauuugcgcaaguuaucagacccagacgaacucuccuaggcgggcccgcagcgucgcuucccagucaauaaucgccuacaccaugagccugggggcagaaaauucuguggccuacuccaacaauaguauugcuaucccaacaaacuucacuaucagcguuaccacagaaauucuucccgugucuaugacuaagaccuccgucgauuguacgauguauauaugcggcgacucaacagaguguaguaaucuguugcuccaauacggcagcuuuugcacccagcugaacagagccuuaacuggaaucgcaguggagcaggauaaaaauacacaggaaguuuucgcgcaagugaagcagauuuauaaaaccccgccuaucaaggacuuugggggauucaacuuuucgcagauucugccagaucccuccaaaccuucuaagaggagcuucaucgaggaccuacucuuuaauaagguaacucuggcugaugccgguuucauaaaacaauacggcgacugucuuggggauaucgcagcccgugacuugauuugcgcucagaaguucaacggacugaccguccugcccccacucuuaacagaugaaaugaucgcccaguauacgucagcacugcuugcuggcaccauuacgagugguuggacauuuggggccggcgcggccuugcagaucccuuucgcuaugcaaauggcauaccgguuuaauggaauaggcgugacccagaacgugcucuaugagaaucagaaacugauugccaaccaguucaacuccgcuaucgggaagauucaagacucucuaagcuccacagccucagcacugggaaaacuccaggacgucguuaaucagaacgcgcaggcccugaauacucuugugaagcaauugagcaguaacuuuggcgcuaucucuuccguacugaaugauauauuaagccgacucgacccgcccgaagccgagguccagaucgauagacugauuaccgguaggcuucagucgcugcaaacguacgugacacagcaguugauccgcgcagcugagauucgggccucagcaaaccucgccgcuaccaaaaugucugaaugcguucuggggcagaguaagagaguggacuucuguggaaaaggcuaccaccuaauguccuuuccccaaagcgcgccacauggugucguguuccugcacguuacuuaugugccggcccaggagaagaauuuuaccacagcuccugcaaucugccacgauggcaaagcccauuuccccagggaaggggucuuuguaucuaacggaacucacugguucgugacccagcgcaauuuuuacgagccacagauaauuacaacggacaacaccuucguuagcggcaauugugauguggucaucgggaucgugaacaauacuguauaugacccccuccaaccugagcuggauuccuucaaggaggaacuugacaaauacuuuaagaaccauacaucaccagauguggacuugggagauauuaguggcaucaaugccagcgucguuaacauucagaaggaaauagaccgacugaaugagguggcuaaaaacuuaaacgaaucucucaucgaccugcaggagcuugguaaguaugagcaguacauuaaauggcccugguauaucuggcugggguucauugcaggacuaaucgccauagugauggucaccaucaugcucugcuguaugacuuccugcuguucaugccugaagggcuguugcaguugugguagcugcugcaaauuugaugaagacgauuccgagccuguguugaagggcguuaagcugcacuacacaugaggacuagucccuguucccagagcccacuuuuuuuucuuuuuuugaaauaaaauagccugucuuucagaucucaaaggcucuuuucagagccaccaaaaaaaaaaaaaaaaaaaaaaaaaaaaaaaaaaaaaaaaaaaaaaaaaaaaaaaaaaaaaaaaaaaaaaaaaaaaaaaaaaaaaaaaaaaaaaaaaaaaa

SEQ ID NO: 151 - RNA, 4094 nt, Artificial Sequence
  SARS-CoV-2/Wuhan/WIV05/2019__EPI_ISL_402128 spike protein mRNA gc mod (1-1273)(K986P_V987P) R10162
aggagagucccgcagucggcguccagcggcucugcuuguucgugugugugucguugcaggccuuauucaagcuuaccauguucguguuucuggugcugcugccccugguguccagccagugugugaaccugaccaccagaacacagcugccuccagccuacaccaacagcuucaccagaggcguguacuaccccgacaagguguucagauccagcgugcugcacucuacccaggaccuguuccugccuuucuucagcaacgugaccugguuccacgccauccacguguccggcaccaauggcaccaagagauucgacaaccccgugcugcccuucaacgacgggguguacuuugccagcaccgagaaguccaacaucaucagaggcuggaucuucggcaccacacuggacagcaagacccagagccugcugaucgugaacaacgccaccaacguggucaucaaagugugcgaguuccaguucugcaacgaccccuuccugggcgucuacuaccacaagaacaacaagagcuggauggaaagcgaguuccggguguacagcagcgccaacaacugcaccuucgaguacgugucccagccuuuccugauggaccuggaaggcaagcagggcaacuucaagaaccugcgcgaguucguguucaagaacaucgacggcuacuucaaaaucuacagcaagcacaccccuaucaaccucgugcgggaucugccucagggcuucucugcucuggaaccccugguggaucugcccaucggcaucaacaucacccgguuucagacacugcuggcccugcacagaagcuaccugacaccuggcgauagcagcagcggauggacagcuggugccgccgcuuacuaugugggcuaccugcagccuagaaccuuccugcugaaguacaacgagaacggcaccaucaccgacgccguggauugugcucuggauccucugagcgagacaaagugcacccugaaguccuucaccguggaaaagggcaucuaccagaccagcaacuuccgggugcagcccaccgaauccaucgugcgguuccccaauaucaccaaucugugccccuucggcgagguguucaaugccaccagauucgccucuguguacgccuggaaccggaagcggaucagcaauugcguggccgacuacuccgugcuguacaacuccgccagcuucagcaccuucaagugcuacggcguguccccuaccaagcugaacgaccugugcuucacaaacguguacgccgacagcuucgugauccggggagaugaagugcggcagauugccccuggacagacaggcaagaucgccgacuacaacuacaagcugcccgacgacuucaccggcugugugauugccuggaacagcaacaaccuggacuccaaagucggcggcaacuacaauuaccuguaccggcuguuccggaaguccaaucugaagcccuucgagcgggacaucagcaccgaaaucuaucaggccggcagcaccccuugcaacggcguggaaggcuucaacugcuacuucccacugcaguccuacggcuuucagcccacaaauggcgugggcuaucagcccuacagagugguggugcugagcuucgaacugcugcaugcuccugccacagugugcggcccuaagaaaagcaccaaucucgugaagaacaaaugcgugaacuucaacuucaacggccugaccggcaccggcgugcugacagagagcaacaagaaguuccugccauuccagcaguuuggccgggauaucgccgauaccacagacgccguuagagauccccagacacuggaaauccuggacaucaccccaugcagcuucggcggagugucugugaucaccccuggcaccaacaccagcaaucagguggcagugcuguaccaggacgugaacuguaccgaagugcccguggccauucacgccgaucagcugacaccuacauggcggguguacuccaccggcagcaauguguuucagaccagagccggcugucugaucggagccgagcacgugaacaauagcuacgagugcgacauccccaucggcgcuggcaucugugccagcuaccagacacagacaaacagccccagacgggcuagaagcguggccagccagagcaucauugccuacacaaugucucugggcgccgagaacagcguggccuacuccaacaacucuaucgcuauccccaccaacuucaccaucagcgugaccaccgagauccugccuguguccaugaccaagaccagcguggacugcaccauguacaucugcggcgauuccaccgagugcuccaaccugcugcugcaguacggcagcuucugcacccagcugaauagagcccugacagggaucgccguggaacaggacaagaacacccaagagguguucgcccaagugaagcaaaucuacaagaccccuccuaucaaggacuucggcggcuucaauuucagccagauucugcccgauccuagcaagcccagcaagcggagcuucaucgaggaccugcuguucaacaaagugacacuggccgacgccggcuucaucaagcaguauggcgauugucugggcgacauugccgccagggaucugauuugcgcccagaaguuuaacggacugacagugcugccuccucugcugaccgaugagaugaucgcccaguacacaucugcccugcuggccggcacaaucacaagcggcuggacauuuggagcuggcgccgcucugcagauccccuuugcuaugcagauggccuaccgguucaacggcaucggagugacccagaaugugcuguacgagaaccagaagcugaucgccaaccaguucaacagcgccaucggcaagauccaggacagccugagcagcacagcaagcgcccugggaaagcugcaggacguggucaaccagaaugcccaggcacugaacacccuggucaagcagcuguccuccaacuucggcgccaucagcucugugcugaacgauauccugagcagacuggacccuccugaggccgaggugcagaucgacagacugaucacaggcagacugcagagccuccagacauacgugacccagcagcugaucagagccgccgagauuagagccucugccaaucuggccgccaccaagaugucugagugugugcugggccagagcaagagaguggacuuuugcggcaagggcuaccaccugaugagcuucccucagucugccccucacggcgugguguuucugcacgugacauaugugcccgcucaagagaagaauuucaccaccgcuccagccaucugccacgacggcaaagcccacuuuccuagagaaggcguguucguguccaacggcacccauugguucgugacacagcggaacuucuacgagccccagaucaucaccaccgacaacaccuucgugucuggcaacugcgacguugugaucggcauugugaacaauaccguguacgacccucugcagcccgagcuggacagcuucaaagaggaacuggacaaguacuuuaagaaccacacaagccccgacguggaccugggcgauaucagcggaaucaaugccagcgucgugaacauccagaaagagaucgaccggcugaacgagguggccaagaaucugaacgagagccugaucgaccugcaagaacuggggaaguacgagcaguacaucaaguggcccugguacaucuggcugggcuuuaucgccggacugauugccaucgugauggucacaaucaugcuguguugcaugaccagcugcuguagcugccugaagggcuguuguagcuguggcagcugcugcaaguucgacgaggacgauucugagcccgugcugaagggcgugaaacugcacuacaccugaggacuagucccuguucccagagcccacuuuuuuuucuuuuuuugaaauaaaauagccugucuuucagaucucaaaggcucuuuucagagccaccaaaaaaaaaaaaaaaaaaaaaaaaaaaaaaaaaaaaaaaaaaaaaaaaaaaaaaaaaaaaaaaaaaaaaaaaaaaaaaaaaaaaaaaaaaaaaaaaaaaaa

SEQ ID NO: 152 - RNA, 2318 nt, Artificial Sequence
  SARS-CoV-2/Wuhan/WIV05/2019__EPI_ISL_402128 spike protein mRNA gc (1-681) R9489, R9493
aggagagucccgcagucggcguccagcggcucugcuuguucgugugugugucguugcaggccuuauucaagcuuaccauguucguguuccugguccuccugccccuggugagcucccagugcgugaaccucaccacccgcacgcagcugccgcccgccuacaccaacagcuucacccggggcgucuacuaccccgacaagguguuccgcuccagcgugcugcacuccacccaggaccucuuccugcccuucuucagcaacgucacgugguuccacgccauccacguguccgggaccaacggcaccaagcgguucgacaacccggugcugcccuucaacgacggggucuacuucgcgagcaccgagaaguccaacaucauccgcggcuggaucuucgggacgacccucgacagcaagacccagucccugcugaucgugaacaacgccaccaacguggucaucaaggugugcgaguuccaguucugcaacgaccccuuccucggcguguacuaccacaagaacaacaagagcuggauggaguccgaguuccgggucuacagcuccgccaacaacugcacguucgaguacgugagccagcccuuccugauggaccuggagggcaagcaggggaacuucaagaaccuccgcgaguucguguucaagaacaucgacggcuacuucaagaucuacuccaagcacaccccgaucaaccugguccgggaccugccccagggguucagcgcccucgagccccugguggaccugcccaucggcaucaacaucacccgcuuccagacccuccuggcccugcaccgguccuaccucacgccgggggacagcagcuccggcuggaccgcgggcgccgccgccuacuacgugggguaccugcagccccgcaccuuccugcucaaguacaacgagaacggcaccaucacggacgcggucgacugcgcccuggacccccugagcgagaccaagugcacccucaaguccuucaccguggagaaggggaucuaccagacgagcaacuuccgggugcagcccaccgaguccaucguccgcuucccgaacaucaccaaccugugccccuucggcgagguguucaacgccacccgguucgccagcgucuacgccuggaaccgcaagcggaucuccaacugcguggcggacuacagcgugcuguacaacuccgccagcuucuccacguucaagugcuacggcgucagccccaccaagcucaacgaccugugcuucaccaacguguacgccgacuccuucgugauccgcggggacgagguccggcagaucgcccccggccagaccgggaagaucgccgacuacaacuacaagcugccggacgacuucacgggcugcgugaucgcguggaacagcaacaaccucgacuccaaggucgggggcaacuacaacuaccuguaccgccuguuccgcaagagcaaccucaagcccuucgagcgggacaucuccaccgagaucuaccaggccggcagcacccccugcaacgggguggagggcuucaacugcuacuucccccugcaguccuacggguuccagccgaccaacggcgugggguaccagcccuaccggguggucgugcugagcuucgagcuccugcacgcccccgccacggugugcggccccaagaaguccaccaaccuggucaagaacaagugcgugaacuucaacuucaacggccucaccgggaccggcgugcugaccgagagcaacaagaaguuccugccguuccagcaguucgggcgcgacaucgccgacacgaccgacgcgguccgcgacccccagacccuggagauccucgacaucacccccugcagcuucggcgggguguccgugaucacgccgggcaccaacaccagcaaccaggucgccgugcuguaccaggacgugaacugcaccgagguccccguggccauccacgccgaccagcugacgcccaccuggcggguguacuccaccggcagcaacgucuuccagacccgcgccgggugccucaucggcgcggagcacgugaacaacuccuacgagugcgacauccccaucggggccggcaucugcgccagcuaccagacgcagaccaacuccccgugaggacuagucccuguucccagagcccacuuuuuuuucuuuuuuugaaauaaaauagccugucuuucagaucucaaaggcucuuuucagagccaccaaaaaaaaaaaaaaaaaaaaaaaaaaaaaaaaaaaaaaaaaaaaaaaaaaaaaaaaaaaaaaaaaaaaaaaaaaaaaaaaaaaaaaaaaaaaaaaaaaaaa

SEQ ID NO: 153 - RNA, 2318 nt, Artificial Sequence
  SARS-CoV-2/Wuhan/WIV05/2019__EPI_ISL_402128 spike protein mRNA human (1-681)
aggagagucccgcagucggcguccagcggcucugcuuguucgugugugugucguugcaggccuuauucaagcuuaccauguucguguuucugguccuccuuccccugguuagcucccagugcgugaacuugaccacaagaacucaauuaccuccagccuacacuaauucuuucaccaggggcguauauuacccggacaagguguuucggucaaguguccugcacagcacacaggaucuauuccuccccuuuuucuccaacgugacuugguuucaugcuauccacguuucugggaccaauggaacaaaacgcuucgacaacccugugcugccauuuaaugauggugucuauuucgcaucgaccgagaagucaaacauuauacgaggcuggaucuuugggacuacacuugacagcaaaacccagagucuguugauugugaauaacgccacgaauguaguuaucaaggugugugaguuccaguuuugcaacgaucccuuccucggagucuacuaucauaaaaauaacaaguccuggauggagucugaguuccguguguacagcuccgcgaauaacuguacuuuugaauaugugucacaaccuuuccugauggaccuggaaggcaagcaggguaauuuuaaaaaccucagagaguucgucuuuaagaacauugauggguacuucaaaaucuacaguaagcacaccccaauaaauuuaguuagggaccugccccagggauuuagcgcucuugagccuuugguggaucugccaaucggcauuaacaucacacgguuccagacucuacucgcccugcaucgcucuuaucuuaccccgggcgacuccucaagcggguggacagcaggagccgcugcauacuauguagguuaccugcaacccagaaccuuuuugcucaaauauaaugaaaacggcacgauuacugaugccguggacugcgcucuggauccuuuaagugagacaaaguguacccugaagucuuucacugucgaaaaagggaucuaccagacauccaauuuuagggugcagccaaccgagagcauaguucgguuccccaacauuacgaaucucugcccuuuuggagagguguucaacgccacccgcuucgcgucggucuaugcauggaaucgaaagagaaucucuaacuguguggccgacuacuccguacuuuacaauucagcuaguuuuagcacauucaaaugcuauggcguuuccccaacuaagcugaacgacuuguguuuuaccaauguguacgccgauucuuucgucauuaggggugacgaagugcggcagaucgcacccgggcaaacaggaaaaaucgcugauuauaacuacaagcuaccggacgauuuuacuggcugcgucauugccuggaauagcaacaaccuggacucaaaagugggcgggaauuauaacuaccucuaucgucuguuccgcaagaguaaucuuaagccuuuugagagagauauauccaccgaaaucuaccaggcgggaagcacacccuguaacgguguugagggcuucaauugcuacuuuccacugcagucuuauggguuccaaccuaccaacggagugggcuaccagcccuauaggguagucguguugucauuugaacuccugcacgccccagcaacuguuugcggucccaaaaagaguacgaauuuagugaaaaacaagugugucaauuucaacuuuaaugggcugacaggcaccggagugcuaacugagagcaacaaaaaguuccucccuuuccagcaguuuggccgggacauugcugauaccacagacgccguacgagauccacaaacccuggagauccuugacauaacuccgugcuccuucgggggagugucuguuauuacacccgguacgaauaccucgaaccaggucgcuguguuguaccaggacgugaauuguacugaagucccuguugccauccacgcagaucagcugacaccaaccuggcgcguguauagcacaggcuccaacguguuucaaacuagagccgggugccucaucggagcugagcauguaaacaauucauacgaaugugacauucccaucggcgcggguauuugcgcaaguuaucagacccagacgaacucuccuugaggacuagucccuguucccagagcccacuuuuuuuucuuuuuuugaaauaaaauagccugucuuucagaucucaaaggcucuuuucagagccaccaaaaaaaaaaaaaaaaaaaaaaaaaaaaaaaaaaaaaaaaaaaaaaaaaaaaaaaaaaaaaaaaaaaaaaaaaaaaaaaaaaaaaaaaaaaaaaaaaaaaa

SEQ ID NO: 154 - RNA, 2318 nt, Artificial Sequence
  SARS-CoV-2/Wuhan/WIV05/2019__EPI_ISL_402128 spike protein mRNA gc mod (1-681)
aggagagucccgcagucggcguccagcggcucugcuuguucgugugugugucguugcaggccuuauucaagcuuaccauguucguguuucuggugcugcugccccugguguccagccagugugugaaccugaccaccagaacacagcugccuccagccuacaccaacagcuucaccagaggcguguacuaccccgacaagguguucagauccagcgugcugcacucuacccaggaccuguuccugccuuucuucagcaacgugaccugguuccacgccauccacguguccggcaccaauggcaccaagagauucgacaaccccgugcugcccuucaacgacgggguguacuuugccagcaccgagaaguccaacaucaucagaggcuggaucuucggcaccacacuggacagcaagacccagagccugcugaucgugaacaacgccaccaacguggucaucaaagugugcgaguuccaguucugcaacgaccccuuccugggcgucuacuaccacaagaacaacaagagcuggauggaaagcgaguuccggguguacagcagcgccaacaacugcaccuucgaguacgugucccagccuuuccugauggaccuggaaggcaagcagggcaacuucaagaaccugcgcgaguucguguucaagaacaucgacggcuacuucaaaaucuacagcaagcacaccccuaucaaccucgugcgggaucugccucagggcuucucugcucuggaaccccugguggaucugcccaucggcaucaacaucacccgguuucagacacugcuggcccugcacagaagcuaccugacaccuggcgauagcagcagcggauggacagcuggugccgccgcuuacuaugugggcuaccugcagccuagaaccuuccugcugaaguacaacgagaacggcaccaucaccgacgccguggauugugcucuggauccucugagcgagacaaagugcacccugaaguccuucaccguggaaaagggcaucuaccagaccagcaacuuccgggugcagcccaccgaauccaucgugcgguuccccaauaucaccaaucugugccccuucggcgagguguucaaugccaccagauucgccucuguguacgccuggaaccggaagcggaucagcaauugcguggccgacuacuccgugcuguacaacuccgccagcuucagcaccuucaagugcuacggcguguccccuaccaagcugaacgaccugugcuucacaaacguguacgccgacagcuucgugauccggggagaugaagugcggcagauugccccuggacagacaggcaagaucgccgacuacaacuacaagcugcccgacgacuucaccggcugugugauugccuggaacagcaacaaccuggacuccaaagucggcggcaacuacaauuaccuguaccggcuguuccggaaguccaaucugaagcccuucgagcgggacaucagcaccgaaaucuaucaggccggcagcaccccuugcaacggcguggaaggcuucaacugcuacuucccacugcaguccuacggcuuucagcccacaaauggcgugggcuaucagcccuacagagugguggugcugagcuucgaacugcugcaugcuccugccacagugugcggcccuaagaaaagcaccaaucucgugaagaacaaaugcgugaacuucaacuucaacggccugaccggcaccggcgugcugacagagagcaacaagaaguuccugccauuccagcaguuuggccgggauaucgccgauaccacagacgccguuagagauccccagacacuggaaauccuggacaucaccccaugcagcuucggcggagugucugugaucaccccuggcaccaacaccagcaaucagguggcagugcuguaccaggacgugaacuguaccgaagugcccguggccauucacgccgaucagcugacaccuacauggcggguguacuccaccggcagcaauguguuucagaccagagccggcugucugaucggagccgagcacgugaacaauagcuacgagugcgacauccccaucggcgcuggcaucugugccagcuaccagacacagacaaacagccccugaggacuagucccuguucccagagcccacuuuuuuuucuuuuuuugaaauaaaauagccugucuuucagaucucaaaggcucuuuucagagccaccaaaaaaaaaaaaaaaaaaaaaaaaaaaaaaaaaaaaaaaaaaaaaaaaaaaaaaaaaaaaaaaaaaaaaaaaaaaaaaaaaaaaaaaaaaaaaaaaaaaaa

SEQ ID NO: 155 - RNA, 4094 nt, Artificial Sequence
  SARS-CoV-2/Wuhan/WIV05/2019__EPI_ISL_402128 spike protein mRNA gc (1-1273)
gggagagucccgcagucggcguccagcggcucugcuuguucgugugugugucguugcaggccuuauucaagcuuaccauguucguguuccugguccuccugccccuggugagcucccagugcgugaaccucaccacccgcacgcagcugccgcccgccuacaccaacagcuucacccggggcgucuacuaccccgacaagguguuccgcuccagcgugcugcacuccacccaggaccucuuccugcccuucuucagcaacgucacgugguuccacgccauccacguguccgggaccaacggcaccaagcgguucgacaacccggugcugcccuucaacgacggggucuacuucgcgagcaccgagaaguccaacaucauccgcggcuggaucuucgggacgacccucgacagcaagacccagucccugcugaucgugaacaacgccaccaacguggucaucaaggugugcgaguuccaguucugcaacgaccccuuccucggcguguacuaccacaagaacaacaagagcuggauggaguccgaguuccgggucuacagcuccgccaacaacugcacguucgaguacgugagccagcccuuccugauggaccuggagggcaagcaggggaacuucaagaaccuccgcgaguucguguucaagaacaucgacggcuacuucaagaucuacuccaagcacaccccgaucaaccugguccgggaccugccccagggguucagcgcccucgagccccugguggaccugcccaucggcaucaacaucacccgcuuccagacccuccuggcccugcaccgguccuaccucacgccgggggacagcagcuccggcuggaccgcgggcgccgccgccuacuacgugggguaccugcagccccgcaccuuccugcucaaguacaacgagaacggcaccaucacggacgcggucgacugcgcccuggacccccugagcgagaccaagugcacccucaaguccuucaccguggagaaggggaucuaccagacgagcaacuuccgggugcagcccaccgaguccaucguccgcuucccgaacaucaccaaccugugccccuucggcgagguguucaacgccacccgguucgccagcgucuacgccuggaaccgcaagcggaucuccaacugcguggcggacuacagcgugcuguacaacuccgccagcuucuccacguucaagugcuacggcgucagccccaccaagcucaacgaccugugcuucaccaacguguacgccgacuccuucgugauccgcggggacgagguccggcagaucgcccccggccagaccgggaagaucgccgacuacaacuacaagcugccggacgacuucacgggcugcgugaucgcguggaacagcaacaaccucgacuccaaggucgggggcaacuacaacuaccuguaccgccuguuccgcaagagcaaccucaagcccuucgagcgggacaucuccaccgagaucuaccaggccggcagcacccccugcaacgggguggagggcuucaacugcuacuucccccugcaguccuacggguuccagccgaccaacggcgugggguaccagcccuaccggguggucgugcugagcuucgagcuccugcacgcccccgccacggugugcggccccaagaaguccaccaaccuggucaagaacaagugcgugaacuucaacuucaacggccucaccgggaccggcgugcugaccgagagcaacaagaaguuccugccguuccagcaguucgggcgcgacaucgccgacacgaccgacgcgguccgcgacccccagacccuggagauccucgacaucacccccugcagcuucggcgggguguccgugaucacgccgggcaccaacaccagcaaccaggucgccgugcuguaccaggacgugaacugcaccgagguccccguggccauccacgccgaccagcugacgcccaccuggcggguguacuccaccggcagcaacgucuuccagacccgcgccgggugccucaucggcgcggagcacgugaacaacuccuacgagugcgacauccccaucggggccggcaucugcgccagcuaccagacgcagaccaacuccccgcggcgcgcccggagcguggcgucccagagcaucaucgccuacaccaugucccugggcgccgagaacagcgucgccuacuccaacaacagcaucgccauccccaccaacuucacgaucuccgugaccaccgagauccugcccgugagcaugaccaagacgagcgucgacugcaccauguacaucugcggggacuccaccgagugcagcaaccuccugcugcaguacggcuccuucugcacccagcucaaccgcgcgcugacggggaucgccguggagcaggacaagaacacccaggagguguucgcccaggucaagcagaucuacaagacgcccccgaucaaggacuucggcggguucaacuucagccagauccugcccgaccccuccaagcccagcaagcgguccuucaucgaggaccuccuguucaacaaggugacccuggccgacgccggcuucaucaagcaguacggcgacugccucggggacaucgcggcccgcgaccugaucugcgcccagaaguucaacggccugaccgugcucccgccccugcugaccgacgagaugaucgcccaguacaccagcgcccuccuggcggggaccaucacguccggcuggaccuucggggccggcgccgcccugcagauccccuucgcgaugcagauggccuaccgguucaacggcaucggggucacccagaacgugcucuacgagaaccagaagcugaucgccaaccaguucaacagcgccaucggcaagauccaggacucccugagcuccaccgccagcgcgcucgggaagcugcaggacguggucaaccagaacgcccaggcccugaacacgcucgugaagcagcuguccagcaacuucggcgccaucuccagcgugcugaacgacauccucucccgccuggacaaggucgaggccgaggugcagaucgaccggcugaucaccgggcgccuccagagccugcagaccuacgugacccagcagcugauccgggcggccgagauccgcgccagcgccaaccucgccgcgaccaagauguccgagugcguccugggccagagcaagcggguggacuucugcggcaagggguaccaccugauguccuucccccagagcgccccgcacggcguggucuuccuccacgugacguacguccccgcccaggagaagaacuucaccaccgcccccgcgaucugccacgacgggaaggcccacuucccccgcgagggcguguucguguccaacgggacccacugguucgucacgcagcggaacuucuacgagccgcagaucaucaccaccgacaacaccuucgugagcggcaacugcgacguggucaucggcaucgugaacaacacgguguacgacccccugcagcccgagcuggacuccuucaaggaggagcucgacaaguacuucaagaaccacaccagccccgacgucgaccugggggacaucuccggcaucaacgccagcguggugaacauccagaaggagaucgaccgccugaacgaggucgccaagaaccucaacgagucccugaucgaccugcaggagcucgggaaguacgagcaguacaucaaguggccgugguacaucuggcugggcuucaucgccggccugaucgcgaucgugauggugaccaucaugcucugcugcaugaccagcugcugcuccugccugaaggggugcugcagcugcggcuccugcugcaaguucgacgaggacgacagcgagcccguccugaagggggugaagcuccacuacacgugaggacuagucccuguucccagagcccacuuuuuuuucuuuuuuugaaauaaaauagccugucuuucagaucucaaaggcucuuuucagagccaccaaaaaaaaaaaaaaaaaaaaaaaaaaaaaaaaaaaaaaaaaaaaaaaaaaaaaaaaaaaaaaaaaaaaaaaaaaaaaaaaaaaaaaaaaaaaaaaaaaaaa

SEQ ID NO: 156 - RNA, 4094 nt, Artificial Sequence
  SARS-CoV-2/Wuhan/WIV05/2019__EPI_ISL_402128 spike protein mRNA gc (1-1273)(K986P_V987P)
gggagagucccgcagucggcguccagcggcucugcuuguucgugugugugucguugcaggccuuauucaagcuuaccauguucguguuccugguccuccugccccuggugagcucccagugcgugaaccucaccacccgcacgcagcugccgcccgccuacaccaacagcuucacccggggcgucuacuaccccgacaagguguuccgcuccagcgugcugcacuccacccaggaccucuuccugcccuucuucagcaacgucacgugguuccacgccauccacguguccgggaccaacggcaccaagcgguucgacaacccggugcugcccuucaacgacggggucuacuucgcgagcaccgagaaguccaacaucauccgcggcuggaucuucgggacgacccucgacagcaagacccagucccugcugaucgugaacaacgccaccaacguggucaucaaggugugcgaguuccaguucugcaacgaccccuuccucggcguguacuaccacaagaacaacaagagcuggauggaguccgaguuccgggucuacagcuccgccaacaacugcacguucgaguacgugagccagcccuuccugauggaccuggagggcaagcaggggaacuucaagaaccuccgcgaguucguguucaagaacaucgacggcuacuucaagaucuacuccaagcacaccccgaucaaccugguccgggaccugccccagggguucagcgcccucgagccccugguggaccugcccaucggcaucaacaucacccgcuuccagacccuccuggcccugcaccgguccuaccucacgccgggggacagcagcuccggcuggaccgcgggcgccgccgccuacuacgugggguaccugcagccccgcaccuuccugcucaaguacaacgagaacggcaccaucacggacgcggucgacugcgcccuggacccccugagcgagaccaagugcacccucaaguccuucaccguggagaaggggaucuaccagacgagcaacuuccgggugcagcccaccgaguccaucguccgcuucccgaacaucaccaaccugugccccuucggcgagguguucaacgccacccgguucgccagcgucuacgccuggaaccgcaagcggaucuccaacugcguggcggacuacagcgugcuguacaacuccgccagcuucuccacguucaagugcuacggcgucagccccaccaagcucaacgaccugugcuucaccaacguguacgccgacuccuucgugauccgcggggacgagguccggcagaucgcccccggccagaccgggaagaucgccgacuacaacuacaagcugccggacgacuucacgggcugcgugaucgcguggaacagcaacaaccucgacuccaaggucgggggcaacuacaacuaccuguaccgccuguuccgcaagagcaaccucaagcccuucgagcgggacaucuccaccgagaucuaccaggccggcagcacccccugcaacgggguggagggcuucaacugcuacuucccccugcaguccuacggguuccagccgaccaacggcgugggguaccagcccuaccggguggucgugcugagcuucgagcuccugcacgcccccgccacggugugcggccccaagaaguccaccaaccuggucaagaacaagugcgugaacuucaacuucaacggccucaccgggaccggcgugcugaccgagagcaacaagaaguuccugccguuccagcaguucgggcgcgacaucgccgacacgaccgacgcgguccgcgacccccagacccuggagauccucgacaucacccccugcagcuucggcgggguguccgugaucacgccgggcaccaacaccagcaaccaggucgccgugcuguaccaggacgugaacugcaccgagguccccguggccauccacgccgaccagcugacgcccaccuggcggguguacuccaccggcagcaacgucuuccagacccgcgccgggugccucaucggcgcggagcacgugaacaacuccuacgagugcgacauccccaucggggccggcaucugcgccagcuaccagacgcagaccaacuccccgcggcgcgcccggagcguggcgucccagagcaucaucgccuacaccaugucccugggcgccgagaacagcgucgccuacuccaacaacagcaucgccauccccaccaacuucacgaucuccgugaccaccgagauccugcccgugagcaugaccaagacgagcgucgacugcaccauguacaucugcggggacuccaccgagugcagcaaccuccugcugcaguacggcuccuucugcacccagcucaaccgcgcgcugacggggaucgccguggagcaggacaagaacacccaggagguguucgcccaggucaagcagaucuacaagacgcccccgaucaaggacuucggcggguucaacuucagccagauccugcccgaccccuccaagcccagcaagcgguccuucaucgaggaccuccuguucaacaaggugacccuggccgacgccggcuucaucaagcaguacggcgacugccucggggacaucgcggcccgcgaccugaucugcgcccagaaguucaacggccugaccgugcucccgccccugcugaccgacgagaugaucgcccaguacaccagcgcccuccuggcggggaccaucacguccggcuggaccuucggggccggcgccgcccugcagauccccuucgcgaugcagauggccuaccgguucaacggcaucggggucacccagaacgugcucuacgagaaccagaagcugaucgccaaccaguucaacagcgccaucggcaagauccaggacucccugagcuccaccgccagcgcgcucgggaagcugcaggacguggucaaccagaacgcccaggcccugaacacgcucgugaagcagcuguccagcaacuucggcgccaucuccagcgugcugaacgacauccucucccgccuggacccgcccgaggccgaggugcagaucgaccggcugaucaccgggcgccuccagagccugcagaccuacgugacccagcagcugauccgggcggccgagauccgcgccagcgccaaccucgccgcgaccaagauguccgagugcguccugggccagagcaagcggguggacuucugcggcaagggguaccaccugauguccuucccccagagcgccccgcacggcguggucuuccuccacgugacguacguccccgcccaggagaagaacuucaccaccgcccccgcgaucugccacgacgggaaggcccacuucccccgcgagggcguguucguguccaacgggacccacugguucgucacgcagcggaacuucuacgagccgcagaucaucaccaccgacaacaccuucgugagcggcaacugcgacguggucaucggcaucgugaacaacacgguguacgacccccugcagcccgagcuggacuccuucaaggaggagcucgacaaguacuucaagaaccacaccagccccgacgucgaccugggggacaucuccggcaucaacgccagcguggugaacauccagaaggagaucgaccgccugaacgaggucgccaagaaccucaacgagucccugaucgaccugcaggagcucgggaaguacgagcaguacaucaaguggccgugguacaucuggcugggcuucaucgccggccugaucgcgaucgugauggugaccaucaugcucugcugcaugaccagcugcugcuccugccugaaggggugcugcagcugcggcuccugcugcaaguucgacgaggacgacagcgagcccguccugaagggggugaagcuccacuacacgugaggacuagucccuguucccagagcccacuuuuuuuucuuuuuuugaaauaaaauagccugucuuucagaucucaaaggcucuuuucagagccaccaaaaaaaaaaaaaaaaaaaaaaaaaaaaaaaaaaaaaaaaaaaaaaaaaaaaaaaaaaaaaaaaaaaaaaaaaaaaaaaaaaaaaaaaaaaaaaaaaaaaa

SEQ ID NO: 157 - RNA, 4094 nt, Artificial Sequence
  SARS-CoV-2/Wuhan/WIV05/2019__EPI_ISL_402128 spike protein mRNA human (1-1273)(K986P_V987P)
gggagagucccgcagucggcguccagcggcucugcuuguucgugugugugucguugcaggccuuauucaagcuuaccauguucguguuucugguccuccuuccccugguuagcucccagugcgugaacuugaccacaagaacucaauuaccuccagccuacacuaauucuuucaccaggggcguauauuacccggacaagguguuucggucaaguguccugcacagcacacaggaucuauuccuccccuuuuucuccaacgugacuugguuucaugcuauccacguuucugggaccaauggaacaaaacgcuucgacaacccugugcugccauuuaaugauggugucuauuucgcaucgaccgagaagucaaacauuauacgaggcuggaucuuugggacuacacuugacagcaaaacccagagucuguugauugugaauaacgccacgaauguaguuaucaaggugugugaguuccaguuuugcaacgaucccuuccucggagucuacuaucauaaaaauaacaaguccuggauggagucugaguuccguguguacagcuccgcgaauaacuguacuuuugaauaugugucacaaccuuuccugauggaccuggaaggcaagcaggguaauuuuaaaaaccucagagaguucgucuuuaagaacauugauggguacuucaaaaucuacaguaagcacaccccaauaaauuuaguuagggaccugccccagggauuuagcgcucuugagccuuugguggaucugccaaucggcauuaacaucacacgguuccagacucuacucgcccugcaucgcucuuaucuuaccccgggcgacuccucaagcggguggacagcaggagccgcugcauacuauguagguuaccugcaacccagaaccuuuuugcucaaauauaaugaaaacggcacgauuacugaugccguggacugcgcucuggauccuuuaagugagacaaaguguacccugaagucuuucacugucgaaaaagggaucuaccagacauccaauuuuagggugcagccaaccgagagcauaguucgguuccccaacauuacgaaucucugcccuuuuggagagguguucaacgccacccgcuucgcgucggucuaugcauggaaucgaaagagaaucucuaacuguguggccgacuacuccguacuuuacaauucagcuaguuuuagcacauucaaaugcuauggcguuuccccaacuaagcugaacgacuuguguuuuaccaauguguacgccgauucuuucgucauuaggggugacgaagugcggcagaucgcacccgggcaaacaggaaaaaucgcugauuauaacuacaagcuaccggacgauuuuacuggcugcgucauugccuggaauagcaacaaccuggacucaaaagugggcgggaauuauaacuaccucuaucgucuguuccgcaagaguaaucuuaagccuuuugagagagauauauccaccgaaaucuaccaggcgggaagcacacccuguaacgguguugagggcuucaauugcuacuuuccacugcagucuuauggguuccaaccuaccaacggagugggcuaccagcccuauaggguagucguguugucauuugaacuccugcacgccccagcaacuguuugcggucccaaaaagaguacgaauuuagugaaaaacaagugugucaauuucaacuuuaaugggcugacaggcaccggagugcuaacugagagcaacaaaaaguuccucccuuuccagcaguuuggccgggacauugcugauaccacagacgccguacgagauccacaaacccuggagauccuugacauaacuccgugcuccuucgggggagugucuguuauuacacccgguacgaauaccucgaaccaggucgcuguguuguaccaggacgugaauuguacugaagucccuguugccauccacgcagaucagcugacaccaaccuggcgcguguauagcacaggcuccaacguguuucaaacuagagccgggugccucaucggagcugagcauguaaacaauucauacgaaugugacauucccaucggcgcggguauuugcgcaaguuaucagacccagacgaacucuccuaggcgggcccgcagcgucgcuucccagucaauaaucgccuacaccaugagccugggggcagaaaauucuguggccuacuccaacaauaguauugcuaucccaacaaacuucacuaucagcguuaccacagaaauucuucccgugucuaugacuaagaccuccgucgauuguacgauguauauaugcggcgacucaacagaguguaguaaucuguugcuccaauacggcagcuuuugcacccagcugaacagagccuuaacuggaaucgcaguggagcaggauaaaaauacacaggaaguuuucgcgcaagugaagcagauuuauaaaaccccgccuaucaaggacuuugggggauucaacuuuucgcagauucugccagaucccuccaaaccuucuaagaggagcuucaucgaggaccuacucuuuaauaagguaacucuggcugaugccgguuucauaaaacaauacggcgacugucuuggggauaucgcagcccgugacuugauuugcgcucagaaguucaacggacugaccguccugcccccacucuuaacagaugaaaugaucgcccaguauacgucagcacugcuugcuggcaccauuacgagugguuggacauuuggggccggcgcggccuugcagaucccuuucgcuaugcaaauggcauaccgguuuaauggaauaggcgugacccagaacgugcucuaugagaaucagaaacugauugccaaccaguucaacuccgcuaucgggaagauucaagacucucuaagcuccacagccucagcacugggaaaacuccaggacgucguuaaucagaacgcgcaggcccugaauacucuugugaagcaauugagcaguaacuuuggcgcuaucucuuccguacugaaugauauauuaagccgacucgacccgcccgaagccgagguccagaucgauagacugauuaccgguaggcuucagucgcugcaaacguacgugacacagcaguugauccgcgcagcugagauucgggccucagcaaaccucgccgcuaccaaaaugucugaaugcguucuggggcagaguaagagaguggacuucuguggaaaaggcuaccaccuaauguccuuuccccaaagcgcgccacauggugucguguuccugcacguuacuuaugugccggcccaggagaagaauuuuaccacagcuccugcaaucugccacgauggcaaagcccauuuccccagggaaggggucuuuguaucuaacggaacucacugguucgugacccagcgcaauuuuuacgagccacagauaauuacaacggacaacaccuucguuagcggcaauugugauguggucaucgggaucgugaacaauacuguauaugacccccuccaaccugagcuggauuccuucaaggaggaacuugacaaauacuuuaagaaccauacaucaccagauguggacuugggagauauuaguggcaucaaugccagcgucguuaacauucagaaggaaauagaccgacugaaugagguggcuaaaaacuuaaacgaaucucucaucgaccugcaggagcuugguaaguaugagcaguacauuaaauggcccugguauaucuggcugggguucauugcaggacuaaucgccauagugauggucaccaucaugcucugcuguaugacuuccugcuguucaugccugaagggcuguugcaguugugguagcugcugcaaauuugaugaagacgauuccgagccuguguugaagggcguuaagcugcacuacacaugaggacuagucccuguucccagagcccacuuuuuuuucuuuuuuugaaauaaaauagccugucuuucagaucucaaaggcucuuuucagagccaccaaaaaaaaaaaaaaaaaaaaaaaaaaaaaaaaaaaaaaaaaaaaaaaaaaaaaaaaaaaaaaaaaaaaaaaaaaaaaaaaaaaaaaaaaaaaaaaaaaaaa

SEQ ID NO: 158 - RNA, 4094 nt, Artificial Sequence
  SARS-CoV-2/Wuhan/WIV05/2019__EPI_ISL_402128 spike protein mRNA gc mod (1-1273)(K986P_V987P)
gggagagucccgcagucggcguccagcggcucugcuuguucgugugugugucguugcaggccuuauucaagcuuaccauguucguguuucuggugcugcugccccugguguccagccagugugugaaccugaccaccagaacacagcugccuccagccuacaccaacagcuucaccagaggcguguacuaccccgacaagguguucagauccagcgugcugcacucuacccaggaccuguuccugccuuucuucagcaacgugaccugguuccacgccauccacguguccggcaccaauggcaccaagagauucgacaaccccgugcugcccuucaacgacgggguguacuuugccagcaccgagaaguccaacaucaucagaggcuggaucuucggcaccacacuggacagcaagacccagagccugcugaucgugaacaacgccaccaacguggucaucaaagugugcgaguuccaguucugcaacgaccccuuccugggcgucuacuaccacaagaacaacaagagcuggauggaaagcgaguuccggguguacagcagcgccaacaacugcaccuucgaguacgugucccagccuuuccugauggaccuggaaggcaagcagggcaacuucaagaaccugcgcgaguucguguucaagaacaucgacggcuacuucaaaaucuacagcaagcacaccccuaucaaccucgugcgggaucugccucagggcuucucugcucuggaaccccugguggaucugcccaucggcaucaacaucacccgguuucagacacugcuggcccugcacagaagcuaccugacaccuggcgauagcagcagcggauggacagcuggugccgccgcuuacuaugugggcuaccugcagccuagaaccuuccugcugaaguacaacgagaacggcaccaucaccgacgccguggauugugcucuggauccucugagcgagacaaagugcacccugaaguccuucaccguggaaaagggcaucuaccagaccagcaacuuccgggugcagcccaccgaauccaucgugcgguuccccaauaucaccaaucugugccccuucggcgagguguucaaugccaccagauucgccucuguguacgccuggaaccggaagcggaucagcaauugcguggccgacuacuccgugcuguacaacuccgccagcuucagcaccuucaagugcuacggcguguccccuaccaagcugaacgaccugugcuucacaaacguguacgccgacagcuucgugauccggggagaugaagugcggcagauugccccuggacagacaggcaagaucgccgacuacaacuacaagcugcccgacgacuucaccggcugugugauugccuggaacagcaacaaccuggacuccaaagucggcggcaacuacaauuaccuguaccggcuguuccggaaguccaaucugaagcccuucgagcgggacaucagcaccgaaaucuaucaggccggcagcaccccuugcaacggcguggaaggcuucaacugcuacuucccacugcaguccuacggcuuucagcccacaaauggcgugggcuaucagcccuacagagugguggugcugagcuucgaacugcugcaugcuccugccacagugugcggcccuaagaaaagcaccaaucucgugaagaacaaaugcgugaacuucaacuucaacggccugaccggcaccggcgugcugacagagagcaacaagaaguuccugccauuccagcaguuuggccgggauaucgccgauaccacagacgccguuagagauccccagacacuggaaauccuggacaucaccccaugcagcuucggcggagugucugugaucaccccuggcaccaacaccagcaaucagguggcagugcuguaccaggacgugaacuguaccgaagugcccguggccauucacgccgaucagcugacaccuacauggcggguguacuccaccggcagcaauguguuucagaccagagccggcugucugaucggagccgagcacgugaacaauagcuacgagugcgacauccccaucggcgcuggcaucugugccagcuaccagacacagacaaacagccccagacgggcuagaagcguggccagccagagcaucauugccuacacaaugucucugggcgccgagaacagcguggccuacuccaacaacucuaucgcuauccccaccaacuucaccaucagcgugaccaccgagauccugccuguguccaugaccaagaccagcguggacugcaccauguacaucugcggcgauuccaccgagugcuccaaccugcugcugcaguacggcagcuucugcacccagcugaauagagcccugacagggaucgccguggaacaggacaagaacacccaagagguguucgcccaagugaagcaaaucuacaagaccccuccuaucaaggacuucggcggcuucaauuucagccagauucugcccgauccuagcaagcccagcaagcggagcuucaucgaggaccugcuguucaacaaagugacacuggccgacgccggcuucaucaagcaguauggcgauugucugggcgacauugccgccagggaucugauuugcgcccagaaguuuaacggacugacagugcugccuccucugcugaccgaugagaugaucgcccaguacacaucugcccugcuggccggcacaaucacaagcggcuggacauuuggagcuggcgccgcucugcagauccccuuugcuaugcagauggccuaccgguucaacggcaucggagugacccagaaugugcuguacgagaaccagaagcugaucgccaaccaguucaacagcgccaucggcaagauccaggacagccugagcagcacagcaagcgcccugggaaagcugcaggacguggucaaccagaaugcccaggcacugaacacccuggucaagcagcuguccuccaacuucggcgccaucagcucugugcugaacgauauccugagcagacuggacccuccugaggccgaggugcagaucgacagacugaucacaggcagacugcagagccuccagacauacgugacccagcagcugaucagagccgccgagauuagagccucugccaaucuggccgccaccaagaugucugagugugugcugggccagagcaagagaguggacuuuugcggcaagggcuaccaccugaugagcuucccucagucugccccucacggcgugguguuucugcacgugacauaugugcccgcucaagagaagaauuucaccaccgcuccagccaucugccacgacggcaaagcccacuuuccuagagaaggcguguucguguccaacggcacccauugguucgugacacagcggaacuucuacgagccccagaucaucaccaccgacaacaccuucgugucuggcaacugcgacguugugaucggcauugugaacaauaccguguacgacccucugcagcccgagcuggacagcuucaaagaggaacuggacaaguacuuuaagaaccacacaagccccgacguggaccugggcgauaucagcggaaucaaugccagcgucgugaacauccagaaagagaucgaccggcugaacgagguggccaagaaucugaacgagagccugaucgaccugcaagaacuggggaaguacgagcaguacaucaaguggcccugguacaucuggcugggcuuuaucgccggacugauugccaucgugauggucacaaucaugcuguguugcaugaccagcugcuguagcugccugaagggcuguuguagcuguggcagcugcugcaaguucgacgaggacgauucugagcccgugcugaagggcgugaaacugcacuacaccugaggacuagucccuguucccagagcccacuuuuuuuucuuuuuuugaaauaaaauagccugucuuucagaucucaaaggcucuuuucagagccaccaaaaaaaaaaaaaaaaaaaaaaaaaaaaaaaaaaaaaaaaaaaaaaaaaaaaaaaaaaaaaaaaaaaaaaaaaaaaaaaaaaaaaaaaaaaaaaaaaaaaa

SEQ ID NO: 159 - RNA, 2318 nt, Artificial Sequence
  SARS-CoV-2/Wuhan/WIV05/2019__EPI_ISL_402128 spike protein mRNA gc (1-681)
gggagagucccgcagucggcguccagcggcucugcuuguucgugugugugucguugcaggccuuauucaagcuuaccauguucguguuccugguccuccugccccuggugagcucccagugcgugaaccucaccacccgcacgcagcugccgcccgccuacaccaacagcuucacccggggcgucuacuaccccgacaagguguuccgcuccagcgugcugcacuccacccaggaccucuuccugcccuucuucagcaacgucacgugguuccacgccauccacguguccgggaccaacggcaccaagcgguucgacaacccggugcugcccuucaacgacggggucuacuucgcgagcaccgagaaguccaacaucauccgcggcuggaucuucgggacgacccucgacagcaagacccagucccugcugaucgugaacaacgccaccaacguggucaucaaggugugcgaguuccaguucugcaacgaccccuuccucggcguguacuaccacaagaacaacaagagcuggauggaguccgaguuccgggucuacagcuccgccaacaacugcacguucgaguacgugagccagcccuuccugauggaccuggagggcaagcaggggaacuucaagaaccuccgcgaguucguguucaagaacaucgacggcuacuucaagaucuacuccaagcacaccccgaucaaccugguccgggaccugccccagggguucagcgcccucgagccccugguggaccugcccaucggcaucaacaucacccgcuuccagacccuccuggcccugcaccgguccuaccucacgccgggggacagcagcuccggcuggaccgcgggcgccgccgccuacuacgugggguaccugcagccccgcaccuuccugcucaaguacaacgagaacggcaccaucacggacgcggucgacugcgcccuggacccccugagcgagaccaagugcacccucaaguccuucaccguggagaaggggaucuaccagacgagcaacuuccgggugcagcccaccgaguccaucguccgcuucccgaacaucaccaaccugugccccuucggcgagguguucaacgccacccgguucgccagcgucuacgccuggaaccgcaagcggaucuccaacugcguggcggacuacagcgugcuguacaacuccgccagcuucuccacguucaagugcuacggcgucagccccaccaagcucaacgaccugugcuucaccaacguguacgccgacuccuucgugauccgcggggacgagguccggcagaucgcccccggccagaccgggaagaucgccgacuacaacuacaagcugccggacgacuucacgggcugcgugaucgcguggaacagcaacaaccucgacuccaaggucgggggcaacuacaacuaccuguaccgccuguuccgcaagagcaaccucaagcccuucgagcgggacaucuccaccgagaucuaccaggccggcagcacccccugcaacgggguggagggcuucaacugcuacuucccccugcaguccuacggguuccagccgaccaacggcgugggguaccagcccuaccggguggucgugcugagcuucgagcuccugcacgcccccgccacggugugcggccccaagaaguccaccaaccuggucaagaacaagugcgugaacuucaacuucaacggccucaccgggaccggcgugcugaccgagagcaacaagaaguuccugccguuccagcaguucgggcgcgacaucgccgacacgaccgacgcgguccgcgacccccagacccuggagauccucgacaucacccccugcagcuucggcgggguguccgugaucacgccgggcaccaacaccagcaaccaggucgccgugcuguaccaggacgugaacugcaccgagguccccguggccauccacgccgaccagcugacgcccaccuggcggguguacuccaccggcagcaacgucuuccagacccgcgccgggugccucaucggcgcggagcacgugaacaacuccuacgagugcgacauccccaucggggccggcaucugcgccagcuaccagacgcagaccaacuccccgugaggacuagucccuguucccagagcccacuuuuuuuucuuuuuuugaaauaaaauagccugucuuucagaucucaaaggcucuuuucagagccaccaaaaaaaaaaaaaaaaaaaaaaaaaaaaaaaaaaaaaaaaaaaaaaaaaaaaaaaaaaaaaaaaaaaaaaaaaaaaaaaaaaaaaaaaaaaaaaaaaaaaa

SEQ ID NO: 160 - RNA, 2318 nt, Artificial Sequence
  SARS-CoV-2/Wuhan/WIV05/2019__EPI_ISL_402128 spike protein mRNA human (1-681)
gggagagucccgcagucggcguccagcggcucugcuuguucgugugugugucguugcaggccuuauucaagcuuaccauguucguguuucugguccuccuuccccugguuagcucccagugcgugaacuugaccacaagaacucaauuaccuccagccuacacuaauucuuucaccaggggcguauauuacccggacaagguguuucggucaaguguccugcacagcacacaggaucuauuccuccccuuuuucuccaacgugacuugguuucaugcuauccacguuucugggaccaauggaacaaaacgcuucgacaacccugugcugccauuuaaugauggugucuauuucgcaucgaccgagaagucaaacauuauacgaggcuggaucuuugggacuacacuugacagcaaaacccagagucuguugauugugaauaacgccacgaauguaguuaucaaggugugugaguuccaguuuugcaacgaucccuuccucggagucuacuaucauaaaaauaacaaguccuggauggagucugaguuccguguguacagcuccgcgaauaacuguacuuuugaauaugugucacaaccuuuccugauggaccuggaaggcaagcaggguaauuuuaaaaaccucagagaguucgucuuuaagaacauugauggguacuucaaaaucuacaguaagcacaccccaauaaauuuaguuagggaccugccccagggauuuagcgcucuugagccuuugguggaucugccaaucggcauuaacaucacacgguuccagacucuacucgcccugcaucgcucuuaucuuaccccgggcgacuccucaagcggguggacagcaggagccgcugcauacuauguagguuaccugcaacccagaaccuuuuugcucaaauauaaugaaaacggcacgauuacugaugccguggacugcgcucuggauccuuuaagugagacaaaguguacccugaagucuuucacugucgaaaaagggaucuaccagacauccaauuuuagggugcagccaaccgagagcauaguucgguuccccaacauuacgaaucucugcccuuuuggagagguguucaacgccacccgcuucgcgucggucuaugcauggaaucgaaagagaaucucuaacuguguggccgacuacuccguacuuuacaauucagcuaguuuuagcacauucaaaugcuauggcguuuccccaacuaagcugaacgacuuguguuuuaccaauguguacgccgauucuuucgucauuaggggugacgaagugcggcagaucgcacccgggcaaacaggaaaaaucgcugauuauaacuacaagcuaccggacgauuuuacuggcugcgucauugccuggaauagcaacaaccuggacucaaaagugggcgggaauuauaacuaccucuaucgucuguuccgcaagaguaaucuuaagccuuuugagagagauauauccaccgaaaucuaccaggcgggaagcacacccuguaacgguguugagggcuucaauugcuacuuuccacugcagucuuauggguuccaaccuaccaacggagugggcuaccagcccuauaggguagucguguugucauuugaacuccugcacgccccagcaacuguuugcggucccaaaaagaguacgaauuuagugaaaaacaagugugucaauuucaacuuuaaugggcugacaggcaccggagugcuaacugagagcaacaaaaaguuccucccuuuccagcaguuuggccgggacauugcugauaccacagacgccguacgagauccacaaacccuggagauccuugacauaacuccgugcuccuucgggggagugucuguuauuacacccgguacgaauaccucgaaccaggucgcuguguuguaccaggacgugaauuguacugaagucccuguugccauccacgcagaucagcugacaccaaccuggcgcguguauagcacaggcuccaacguguuucaaacuagagccgggugccucaucggagcugagcauguaaacaauucauacgaaugugacauucccaucggcgcggguauuugcgcaaguuaucagacccagacgaacucuccuugaggacuagucccuguucccagagcccacuuuuuuuucuuuuuuugaaauaaaauagccugucuuucagaucucaaaggcucuuuucagagccaccaaaaaaaaaaaaaaaaaaaaaaaaaaaaaaaaaaaaaaaaaaaaaaaaaaaaaaaaaaaaaaaaaaaaaaaaaaaaaaaaaaaaaaaaaaaaaaaaaaaaa

SEQ ID NO: 161 - RNA, 2318 nt, Artificial Sequence
  SARS-CoV-2/Wuhan/WIV05/2019__EPI_ISL_402128 spike protein mRNA gc mod (1-681)
gggagagucccgcagucggcguccagcggcucugcuuguucgugugugugucguugcaggccuuauucaagcuuaccauguucguguuucuggugcugcugccccugguguccagccagugugugaaccugaccaccagaacacagcugccuccagccuacaccaacagcuucaccagaggcguguacuaccccgacaagguguucagauccagcgugcugcacucuacccaggaccuguuccugccuuucuucagcaacgugaccugguuccacgccauccacguguccggcaccaauggcaccaagagauucgacaaccccgugcugcccuucaacgacgggguguacuuugccagcaccgagaaguccaacaucaucagaggcuggaucuucggcaccacacuggacagcaagacccagagccugcugaucgugaacaacgccaccaacguggucaucaaagugugcgaguuccaguucugcaacgaccccuuccugggcgucuacuaccacaagaacaacaagagcuggauggaaagcgaguuccggguguacagcagcgccaacaacugcaccuucgaguacgugucccagccuuuccugauggaccuggaaggcaagcagggcaacuucaagaaccugcgcgaguucguguucaagaacaucgacggcuacuucaaaaucuacagcaagcacaccccuaucaaccucgugcgggaucugccucagggcuucucugcucuggaaccccugguggaucugcccaucggcaucaacaucacccgguuucagacacugcuggcccugcacagaagcuaccugacaccuggcgauagcagcagcggauggacagcuggugccgccgcuuacuaugugggcuaccugcagccuagaaccuuccugcugaaguacaacgagaacggcaccaucaccgacgccguggauugugcucuggauccucugagcgagacaaagugcacccugaaguccuucaccguggaaaagggcaucuaccagaccagcaacuuccgggugcagcccaccgaauccaucgugcgguuccccaauaucaccaaucugugccccuucggcgagguguucaaugccaccagauucgccucuguguacgccuggaaccggaagcggaucagcaauugcguggccgacuacuccgugcuguacaacuccgccagcuucagcaccuucaagugcuacggcguguccccuaccaagcugaacgaccugugcuucacaaacguguacgccgacagcuucgugauccggggagaugaagugcggcagauugccccuggacagacaggcaagaucgccgacuacaacuacaagcugcccgacgacuucaccggcugugugauugccuggaacagcaacaaccuggacuccaaagucggcggcaacuacaauuaccuguaccggcuguuccggaaguccaaucugaagcccuucgagcgggacaucagcaccgaaaucuaucaggccggcagcaccccuugcaacggcguggaaggcuucaacugcuacuucccacugcaguccuacggcuuucagcccacaaauggcgugggcuaucagcccuacagagugguggugcugagcuucgaacugcugcaugcuccugccacagugugcggcccuaagaaaagcaccaaucucgugaagaacaaaugcgugaacuucaacuucaacggccugaccggcaccggcgugcugacagagagcaacaagaaguuccugccauuccagcaguuuggccgggauaucgccgauaccacagacgccguuagagauccccagacacuggaaauccuggacaucaccccaugcagcuucggcggagugucugugaucaccccuggcaccaacaccagcaaucagguggcagugcuguaccaggacgugaacuguaccgaagugcccguggccauucacgccgaucagcugacaccuacauggcggguguacuccaccggcagcaauguguuucagaccagagccggcugucugaucggagccgagcacgugaacaauagcuacgagugcgacauccccaucggcgcuggcaucugugccagcuaccagacacagacaaacagccccugaggacuagucccuguucccagagcccacuuuuuuuucuuuuuuugaaauaaaauagccugucuuucagaucucaaaggcucuuuucagagccaccaaaaaaaaaaaaaaaaaaaaaaaaaaaaaaaaaaaaaaaaaaaaaaaaaaaaaaaaaaaaaaaaaaaaaaaaaaaaaaaaaaaaaaaaaaaaaaaaaaaaa

SEQ ID NO: 162 - RNA, 4039 nt, Artificial Sequence
  SARS-CoV-2/Wuhan/WIV05/2019__EPI_ISL_402128 spike protein mRNA gc (1-1273) R9514
aggagaaagcuuaccauguucguguuccugguccuccugccccuggugagcucccagugcgugaaccucaccacccgcacgcagcugccgcccgccuacaccaacagcuucacccggggcgucuacuaccccgacaagguguuccgcuccagcgugcugcacuccacccaggaccucuuccugcccuucuucagcaacgucacgugguuccacgccauccacguguccgggaccaacggcaccaagcgguucgacaacccggugcugcccuucaacgacggggucuacuucgcgagcaccgagaaguccaacaucauccgcggcuggaucuucgggacgacccucgacagcaagacccagucccugcugaucgugaacaacgccaccaacguggucaucaaggugugcgaguuccaguucugcaacgaccccuuccucggcguguacuaccacaagaacaacaagagcuggauggaguccgaguuccgggucuacagcuccgccaacaacugcacguucgaguacgugagccagcccuuccugauggaccuggagggcaagcaggggaacuucaagaaccuccgcgaguucguguucaagaacaucgacggcuacuucaagaucuacuccaagcacaccccgaucaaccugguccgggaccugccccagggguucagcgcccucgagccccugguggaccugcccaucggcaucaacaucacccgcuuccagacccuccuggcccugcaccgguccuaccucacgccgggggacagcagcuccggcuggaccgcgggcgccgccgccuacuacgugggguaccugcagccccgcaccuuccugcucaaguacaacgagaacggcaccaucacggacgcggucgacugcgcccuggacccccugagcgagaccaagugcacccucaaguccuucaccguggagaaggggaucuaccagacgagcaacuuccgggugcagcccaccgaguccaucguccgcuucccgaacaucaccaaccugugccccuucggcgagguguucaacgccacccgguucgccagcgucuacgccuggaaccgcaagcggaucuccaacugcguggcggacuacagcgugcuguacaacuccgccagcuucuccacguucaagugcuacggcgucagccccaccaagcucaacgaccugugcuucaccaacguguacgccgacuccuucgugauccgcggggacgagguccggcagaucgcccccggccagaccgggaagaucgccgacuacaacuacaagcugccggacgacuucacgggcugcgugaucgcguggaacagcaacaaccucgacuccaaggucgggggcaacuacaacuaccuguaccgccuguuccgcaagagcaaccucaagcccuucgagcgggacaucuccaccgagaucuaccaggccggcagcacccccugcaacgggguggagggcuucaacugcuacuucccccugcaguccuacggguuccagccgaccaacggcgugggguaccagcccuaccggguggucgugcugagcuucgagcuccugcacgcccccgccacggugugcggccccaagaaguccaccaaccuggucaagaacaagugcgugaacuucaacuucaacggccucaccgggaccggcgugcugaccgagagcaacaagaaguuccugccguuccagcaguucgggcgcgacaucgccgacacgaccgacgcgguccgcgacccccagacccuggagauccucgacaucacccccugcagcuucggcgggguguccgugaucacgccgggcaccaacaccagcaaccaggucgccgugcuguaccaggacgugaacugcaccgagguccccguggccauccacgccgaccagcugacgcccaccuggcggguguacuccaccggcagcaacgucuuccagacccgcgccgggugccucaucggcgcggagcacgugaacaacuccuacgagugcgacauccccaucggggccggcaucugcgccagcuaccagacgcagaccaacuccccgcggcgcgcccggagcguggcgucccagagcaucaucgccuacaccaugucccugggcgccgagaacagcgucgccuacuccaacaacagcaucgccauccccaccaacuucacgaucuccgugaccaccgagauccugcccgugagcaugaccaagacgagcgucgacugcaccauguacaucugcggggacuccaccgagugcagcaaccuccugcugcaguacggcuccuucugcacccagcucaaccgcgcgcugacggggaucgccguggagcaggacaagaacacccaggagguguucgcccaggucaagcagaucuacaagacgcccccgaucaaggacuucggcggguucaacuucagccagauccugcccgaccccuccaagcccagcaagcgguccuucaucgaggaccuccuguucaacaaggugacccuggccgacgccggcuucaucaagcaguacggcgacugccucggggacaucgcggcccgcgaccugaucugcgcccagaaguucaacggccugaccgugcucccgccccugcugaccgacgagaugaucgcccaguacaccagcgcccuccuggcggggaccaucacguccggcuggaccuucggggccggcgccgcccugcagauccccuucgcgaugcagauggccuaccgguucaacggcaucggggucacccagaacgugcucuacgagaaccagaagcugaucgccaaccaguucaacagcgccaucggcaagauccaggacucccugagcuccaccgccagcgcgcucgggaagcugcaggacguggucaaccagaacgcccaggcccugaacacgcucgugaagcagcuguccagcaacuucggcgccaucuccagcgugcugaacgacauccucucccgccuggacaaggucgaggccgaggugcagaucgaccggcugaucaccgggcgccuccagagccugcagaccuacgugacccagcagcugauccgggcggccgagauccgcgccagcgccaaccucgccgcgaccaagauguccgagugcguccugggccagagcaagcggguggacuucugcggcaagggguaccaccugauguccuucccccagagcgccccgcacggcguggucuuccuccacgugacguacguccccgcccaggagaagaacuucaccaccgcccccgcgaucugccacgacgggaaggcccacuucccccgcgagggcguguucguguccaacgggacccacugguucgucacgcagcggaacuucuacgagccgcagaucaucaccaccgacaacaccuucgugagcggcaacugcgacguggucaucggcaucgugaacaacacgguguacgacccccugcagcccgagcuggacuccuucaaggaggagcucgacaaguacuucaagaaccacaccagccccgacgucgaccugggggacaucuccggcaucaacgccagcguggugaacauccagaaggagaucgaccgccugaacgaggucgccaagaaccucaacgagucccugaucgaccugcaggagcucgggaaguacgagcaguacaucaaguggccgugguacaucuggcugggcuucaucgccggccugaucgcgaucgugauggugaccaucaugcucugcugcaugaccagcugcugcuccugccugaaggggugcugcagcugcggcuccugcugcaaguucgacgaggacgacagcgagcccguccugaagggggugaagcuccacuacacgugaggacuaguuauaagacugacuagcccgaugggccucccaacgggcccuccuccccuccuugcaccgagauuaauaaaaaaaaaaaaaaaaaaaaaaaaaaaaaaaaaaaaaaaaaaaaaaaaaaaaaaaaaaaaaaaaugcaucccccccccccccccccccccccccccccccaaaggcucuuuucagagccaccagaauu

SEQ ID NO: 163 - RNA, 4039 nt, Artificial Sequence
  SARS-CoV-2/Wuhan/WIV05/2019__EPI_ISL_402128 spike protein mRNA gc (1-1273)(K986P_V987P) R9515, R10157
aggagaaagcuuaccauguucguguuccugguccuccugccccuggugagcucccagugcgugaaccucaccacccgcacgcagcugccgcccgccuacaccaacagcuucacccggggcgucuacuaccccgacaagguguuccgcuccagcgugcugcacuccacccaggaccucuuccugcccuucuucagcaacgucacgugguuccacgccauccacguguccgggaccaacggcaccaagcgguucgacaacccggugcugcccuucaacgacggggucuacuucgcgagcaccgagaaguccaacaucauccgcggcuggaucuucgggacgacccucgacagcaagacccagucccugcugaucgugaacaacgccaccaacguggucaucaaggugugcgaguuccaguucugcaacgaccccuuccucggcguguacuaccacaagaacaacaagagcuggauggaguccgaguuccgggucuacagcuccgccaacaacugcacguucgaguacgugagccagcccuuccugauggaccuggagggcaagcaggggaacuucaagaaccuccgcgaguucguguucaagaacaucgacggcuacuucaagaucuacuccaagcacaccccgaucaaccugguccgggaccugccccagggguucagcgcccucgagccccugguggaccugcccaucggcaucaacaucacccgcuuccagacccuccuggcccugcaccgguccuaccucacgccgggggacagcagcuccggcuggaccgcgggcgccgccgccuacuacgugggguaccugcagccccgcaccuuccugcucaaguacaacgagaacggcaccaucacggacgcggucgacugcgcccuggacccccugagcgagaccaagugcacccucaaguccuucaccguggagaaggggaucuaccagacgagcaacuuccgggugcagcccaccgaguccaucguccgcuucccgaacaucaccaaccugugccccuucggcgagguguucaacgccacccgguucgccagcgucuacgccuggaaccgcaagcggaucuccaacugcguggcggacuacagcgugcuguacaacuccgccagcuucuccacguucaagugcuacggcgucagccccaccaagcucaacgaccugugcuucaccaacguguacgccgacuccuucgugauccgcggggacgagguccggcagaucgcccccggccagaccgggaagaucgccgacuacaacuacaagcugccggacgacuucacgggcugcgugaucgcguggaacagcaacaaccucgacuccaaggucgggggcaacuacaacuaccuguaccgccuguuccgcaagagcaaccucaagcccuucgagcgggacaucuccaccgagaucuaccaggccggcagcacccccugcaacgggguggagggcuucaacugcuacuucccccugcaguccuacggguuccagccgaccaacggcgugggguaccagcccuaccggguggucgugcugagcuucgagcuccugcacgcccccgccacggugugcggccccaagaaguccaccaaccuggucaagaacaagugcgugaacuucaacuucaacggccucaccgggaccggcgugcugaccgagagcaacaagaaguuccugccguuccagcaguucgggcgcgacaucgccgacacgaccgacgcgguccgcgacccccagacccuggagauccucgacaucacccccugcagcuucggcgggguguccgugaucacgccgggcaccaacaccagcaaccaggucgccgugcuguaccaggacgugaacugcaccgagguccccguggccauccacgccgaccagcugacgcccaccuggcggguguacuccaccggcagcaacgucuuccagacccgcgccgggugccucaucggcgcggagcacgugaacaacuccuacgagugcgacauccccaucggggccggcaucugcgccagcuaccagacgcagaccaacuccccgcggcgcgcccggagcguggcgucccagagcaucaucgccuacaccaugucccugggcgccgagaacagcgucgccuacuccaacaacagcaucgccauccccaccaacuucacgaucuccgugaccaccgagauccugcccgugagcaugaccaagacgagcgucgacugcaccauguacaucugcggggacuccaccgagugcagcaaccuccugcugcaguacggcuccuucugcacccagcucaaccgcgcgcugacggggaucgccguggagcaggacaagaacacccaggagguguucgcccaggucaagcagaucuacaagacgcccccgaucaaggacuucggcggguucaacuucagccagauccugcccgaccccuccaagcccagcaagcgguccuucaucgaggaccuccuguucaacaaggugacccuggccgacgccggcuucaucaagcaguacggcgacugccucggggacaucgcggcccgcgaccugaucugcgcccagaaguucaacggccugaccgugcucccgccccugcugaccgacgagaugaucgcccaguacaccagcgcccuccuggcggggaccaucacguccggcuggaccuucggggccggcgccgcccugcagauccccuucgcgaugcagauggccuaccgguucaacggcaucggggucacccagaacgugcucuacgagaaccagaagcugaucgccaaccaguucaacagcgccaucggcaagauccaggacucccugagcuccaccgccagcgcgcucgggaagcugcaggacguggucaaccagaacgcccaggcccugaacacgcucgugaagcagcuguccagcaacuucggcgccaucuccagcgugcugaacgacauccucucccgccuggacccgcccgaggccgaggugcagaucgaccggcugaucaccgggcgccuccagagccugcagaccuacgugacccagcagcugauccgggcggccgagauccgcgccagcgccaaccucgccgcgaccaagauguccgagugcguccugggccagagcaagcggguggacuucugcggcaagggguaccaccugauguccuucccccagagcgccccgcacggcguggucuuccuccacgugacguacguccccgcccaggagaagaacuucaccaccgcccccgcgaucugccacgacgggaaggcccacuucccccgcgagggcguguucguguccaacgggacccacugguucgucacgcagcggaacuucuacgagccgcagaucaucaccaccgacaacaccuucgugagcggcaacugcgacguggucaucggcaucgugaacaacacgguguacgacccccugcagcccgagcuggacuccuucaaggaggagcucgacaaguacuucaagaaccacaccagccccgacgucgaccugggggacaucuccggcaucaacgccagcguggugaacauccagaaggagaucgaccgccugaacgaggucgccaagaaccucaacgagucccugaucgaccugcaggagcucgggaaguacgagcaguacaucaaguggccgugguacaucuggcugggcuucaucgccggccugaucgcgaucgugauggugaccaucaugcucugcugcaugaccagcugcugcuccugccugaaggggugcugcagcugcggcuccugcugcaaguucgacgaggacgacagcgagcccguccugaagggggugaagcuccacuacacgugaggacuaguuauaagacugacuagcccgaugggccucccaacgggcccuccuccccuccuugcaccgagauuaauaaaaaaaaaaaaaaaaaaaaaaaaaaaaaaaaaaaaaaaaaaaaaaaaaaaaaaaaaaaaaaaaugcaucccccccccccccccccccccccccccccccaaaggcucuuuucagagccaccagaauu

SEQ ID NO: 164 - RNA, 4039 nt, Artificial Sequence
  SARS-CoV-2/Wuhan/WIV05/2019__EPI_ISL_402128 spike protein mRNA human (1-1273)(K986P_V987P) R9517
aggagaaagcuuaccauguucguguuucugguccuccuuccccugguuagcucccagugcgugaacuugaccacaagaacucaauuaccuccagccuacacuaauucuuucaccaggggcguauauuacccggacaagguguuucggucaaguguccugcacagcacacaggaucuauuccuccccuuuuucuccaacgugacuugguuucaugcuauccacguuucugggaccaauggaacaaaacgcuucgacaacccugugcugccauuuaaugauggugucuauuucgcaucgaccgagaagucaaacauuauacgaggcuggaucuuugggacuacacuugacagcaaaacccagagucuguugauugugaauaacgccacgaauguaguuaucaaggugugugaguuccaguuuugcaacgaucccuuccucggagucuacuaucauaaaaauaacaaguccuggauggagucugaguuccguguguacagcuccgcgaauaacuguacuuuugaauaugugucacaaccuuuccugauggaccuggaaggcaagcaggguaauuuuaaaaaccucagagaguucgucuuuaagaacauugauggguacuucaaaaucuacaguaagcacaccccaauaaauuuaguuagggaccugccccagggauuuagcgcucuugagccuuugguggaucugccaaucggcauuaacaucacacgguuccagacucuacucgcccugcaucgcucuuaucuuaccccgggcgacuccucaagcggguggacagcaggagccgcugcauacuauguagguuaccugcaacccagaaccuuuuugcucaaauauaaugaaaacggcacgauuacugaugccguggacugcgcucuggauccuuuaagugagacaaaguguacccugaagucuuucacugucgaaaaagggaucuaccagacauccaauuuuagggugcagccaaccgagagcauaguucgguuccccaacauuacgaaucucugcccuuuuggagagguguucaacgccacccgcuucgcgucggucuaugcauggaaucgaaagagaaucucuaacuguguggccgacuacuccguacuuuacaauucagcuaguuuuagcacauucaaaugcuauggcguuuccccaacuaagcugaacgacuuguguuuuaccaauguguacgccgauucuuucgucauuaggggugacgaagugcggcagaucgcacccgggcaaacaggaaaaaucgcugauuauaacuacaagcuaccggacgauuuuacuggcugcgucauugccuggaauagcaacaaccuggacucaaaagugggcgggaauuauaacuaccucuaucgucuguuccgcaagaguaaucuuaagccuuuugagagagauauauccaccgaaaucuaccaggcgggaagcacacccuguaacgguguugagggcuucaauugcuacuuuccacugcagucuuauggguuccaaccuaccaacggagugggcuaccagcccuauaggguagucguguugucauuugaacuccugcacgccccagcaacuguuugcggucccaaaaagaguacgaauuuagugaaaaacaagugugucaauuucaacuuuaaugggcugacaggcaccggagugcuaacugagagcaacaaaaaguuccucccuuuccagcaguuuggccgggacauugcugauaccacagacgccguacgagauccacaaacccuggagauccuugacauaacuccgugcuccuucgggggagugucuguuauuacacccgguacgaauaccucgaaccaggucgcuguguuguaccaggacgugaauuguacugaagucccuguugccauccacgcagaucagcugacaccaaccuggcgcguguauagcacaggcuccaacguguuucaaacuagagccgggugccucaucggagcugagcauguaaacaauucauacgaaugugacauucccaucggcgcggguauuugcgcaaguuaucagacccagacgaacucuccuaggcgggcccgcagcgucgcuucccagucaauaaucgccuacaccaugagccugggggcagaaaauucuguggccuacuccaacaauaguauugcuaucccaacaaacuucacuaucagcguuaccacagaaauucuucccgugucuaugacuaagaccuccgucgauuguacgauguauauaugcggcgacucaacagaguguaguaaucuguugcuccaauacggcagcuuuugcacccagcugaacagagccuuaacuggaaucgcaguggagcaggauaaaaauacacaggaaguuuucgcgcaagugaagcagauuuauaaaaccccgccuaucaaggacuuugggggauucaacuuuucgcagauucugccagaucccuccaaaccuucuaagaggagcuucaucgaggaccuacucuuuaauaagguaacucuggcugaugccgguuucauaaaacaauacggcgacugucuuggggauaucgcagcccgugacuugauuugcgcucagaaguucaacggacugaccguccugcccccacucuuaacagaugaaaugaucgcccaguauacgucagcacugcuugcuggcaccauuacgagugguuggacauuuggggccggcgcggccuugcagaucccuuucgcuaugcaaauggcauaccgguuuaauggaauaggcgugacccagaacgugcucuaugagaaucagaaacugauugccaaccaguucaacuccgcuaucgggaagauucaagacucucuaagcuccacagccucagcacugggaaaacuccaggacgucguuaaucagaacgcgcaggcccugaauacucuugugaagcaauugagcaguaacuuuggcgcuaucucuuccguacugaaugauauauuaagccgacucgacccgcccgaagccgagguccagaucgauagacugauuaccgguaggcuucagucgcugcaaacguacgugacacagcaguugauccgcgcagcugagauucgggccucagcaaaccucgccgcuaccaaaaugucugaaugcguucuggggcagaguaagagaguggacuucuguggaaaaggcuaccaccuaauguccuuuccccaaagcgcgccacauggugucguguuccugcacguuacuuaugugccggcccaggagaagaauuuuaccacagcuccugcaaucugccacgauggcaaagcccauuuccccagggaaggggucuuuguaucuaacggaacucacugguucgugacccagcgcaauuuuuacgagccacagauaauuacaacggacaacaccuucguuagcggcaauugugauguggucaucgggaucgugaacaauacuguauaugacccccuccaaccugagcuggauuccuucaaggaggaacuugacaaauacuuuaagaaccauacaucaccagauguggacuugggagauauuaguggcaucaaugccagcgucguuaacauucagaaggaaauagaccgacugaaugagguggcuaaaaacuuaaacgaaucucucaucgaccugcaggagcuugguaaguaugagcaguacauuaaauggcccugguauaucuggcugggguucauugcaggacuaaucgccauagugauggucaccaucaugcucugcuguaugacuuccugcuguucaugccugaagggcuguugcaguugugguagcugcugcaaauuugaugaagacgauuccgagccuguguugaagggcguuaagcugcacuacacaugaggacuaguuauaagacugacuagcccgaugggccucccaacgggcccuccuccccuccuugcaccgagauuaauaaaaaaaaaaaaaaaaaaaaaaaaaaaaaaaaaaaaaaaaaaaaaaaaaaaaaaaaaaaaaaaaugcaucccccccccccccccccccccccccccccccaaaggcucuuuucagagccaccagaauu

SEQ ID NO: 165 - RNA, 4039 nt, Artificial Sequence
  SARS-CoV-2/Wuhan/WIV05/2019__EPI_ISL_402128 spike protein mRNA gc mod (1-1273)(K986P_V987P) R9519
aggagaaagcuuaccauguucguguuucuggugcugcugccccugguguccagccagugugugaaccugaccaccagaacacagcugccuccagccuacaccaacagcuucaccagaggcguguacuaccccgacaagguguucagauccagcgugcugcacucuacccaggaccuguuccugccuuucuucagcaacgugaccugguuccacgccauccacguguccggcaccaauggcaccaagagauucgacaaccccgugcugcccuucaacgacgggguguacuuugccagcaccgagaaguccaacaucaucagaggcuggaucuucggcaccacacuggacagcaagacccagagccugcugaucgugaacaacgccaccaacguggucaucaaagugugcgaguuccaguucugcaacgaccccuuccugggcgucuacuaccacaagaacaacaagagcuggauggaaagcgaguuccggguguacagcagcgccaacaacugcaccuucgaguacgugucccagccuuuccugauggaccuggaaggcaagcagggcaacuucaagaaccugcgcgaguucguguucaagaacaucgacggcuacuucaaaaucuacagcaagcacaccccuaucaaccucgugcgggaucugccucagggcuucucugcucuggaaccccugguggaucugcccaucggcaucaacaucacccgguuucagacacugcuggcccugcacagaagcuaccugacaccuggcgauagcagcagcggauggacagcuggugccgccgcuuacuaugugggcuaccugcagccuagaaccuuccugcugaaguacaacgagaacggcaccaucaccgacgccguggauugugcucuggauccucugagcgagacaaagugcacccugaaguccuucaccguggaaaagggcaucuaccagaccagcaacuuccgggugcagcccaccgaauccaucgugcgguuccccaauaucaccaaucugugccccuucggcgagguguucaaugccaccagauucgccucuguguacgccuggaaccggaagcggaucagcaauugcguggccgacuacuccgugcuguacaacuccgccagcuucagcaccuucaagugcuacggcguguccccuaccaagcugaacgaccugugcuucacaaacguguacgccgacagcuucgugauccggggagaugaagugcggcagauugccccuggacagacaggcaagaucgccgacuacaacuacaagcugcccgacgacuucaccggcugugugauugccuggaacagcaacaaccuggacuccaaagucggcggcaacuacaauuaccuguaccggcuguuccggaaguccaaucugaagcccuucgagcgggacaucagcaccgaaaucuaucaggccggcagcaccccuugcaacggcguggaaggcuucaacugcuacuucccacugcaguccuacggcuuucagcccacaaauggcgugggcuaucagcccuacagagugguggugcugagcuucgaacugcugcaugcuccugccacagugugcggcccuaagaaaagcaccaaucucgugaagaacaaaugcgugaacuucaacuucaacggccugaccggcaccggcgugcugacagagagcaacaagaaguuccugccauuccagcaguuuggccgggauaucgccgauaccacagacgccguuagagauccccagacacuggaaauccuggacaucaccccaugcagcuucggcggagugucugugaucaccccuggcaccaacaccagcaaucagguggcagugcuguaccaggacgugaacuguaccgaagugcccguggccauucacgccgaucagcugacaccuacauggcggguguacuccaccggcagcaauguguuucagaccagagccggcugucugaucggagccgagcacgugaacaauagcuacgagugcgacauccccaucggcgcuggcaucugugccagcuaccagacacagacaaacagccccagacgggcuagaagcguggccagccagagcaucauugccuacacaaugucucugggcgccgagaacagcguggccuacuccaacaacucuaucgcuauccccaccaacuucaccaucagcgugaccaccgagauccugccuguguccaugaccaagaccagcguggacugcaccauguacaucugcggcgauuccaccgagugcuccaaccugcugcugcaguacggcagcuucugcacccagcugaauagagcccugacagggaucgccguggaacaggacaagaacacccaagagguguucgcccaagugaagcaaaucuacaagaccccuccuaucaaggacuucggcggcuucaauuucagccagauucugcccgauccuagcaagcccagcaagcggagcuucaucgaggaccugcuguucaacaaagugacacuggccgacgccggcuucaucaagcaguauggcgauugucugggcgacauugccgccagggaucugauuugcgcccagaaguuuaacggacugacagugcugccuccucugcugaccgaugagaugaucgcccaguacacaucugcccugcuggccggcacaaucacaagcggcuggacauuuggagcuggcgccgcucugcagauccccuuugcuaugcagauggccuaccgguucaacggcaucggagugacccagaaugugcuguacgagaaccagaagcugaucgccaaccaguucaacagcgccaucggcaagauccaggacagccugagcagcacagcaagcgcccugggaaagcugcaggacguggucaaccagaaugcccaggcacugaacacccuggucaagcagcuguccuccaacuucggcgccaucagcucugugcugaacgauauccugagcagacuggacccuccugaggccgaggugcagaucgacagacugaucacaggcagacugcagagccuccagacauacgugacccagcagcugaucagagccgccgagauuagagccucugccaaucuggccgccaccaagaugucugagugugugcugggccagagcaagagaguggacuuuugcggcaagggcuaccaccugaugagcuucccucagucugccccucacggcgugguguuucugcacgugacauaugugcccgcucaagagaagaauuucaccaccgcuccagccaucugccacgacggcaaagcccacuuuccuagagaaggcguguucguguccaacggcacccauugguucgugacacagcggaacuucuacgagccccagaucaucaccaccgacaacaccuucgugucuggcaacugcgacguugugaucggcauugugaacaauaccguguacgacccucugcagcccgagcuggacagcuucaaagaggaacuggacaaguacuuuaagaaccacacaagccccgacguggaccugggcgauaucagcggaaucaaugccagcgucgugaacauccagaaagagaucgaccggcugaacgagguggccaagaaucugaacgagagccugaucgaccugcaagaacuggggaaguacgagcaguacaucaaguggcccugguacaucuggcugggcuuuaucgccggacugauugccaucgugauggucacaaucaugcuguguugcaugaccagcugcuguagcugccugaagggcuguuguagcuguggcagcugcugcaaguucgacgaggacgauucugagcccgugcugaagggcgugaaacugcacuacaccugaggacuaguuauaagacugacuagcccgaugggccucccaacgggcccuccuccccuccuugcaccgagauuaauaaaaaaaaaaaaaaaaaaaaaaaaaaaaaaaaaaaaaaaaaaaaaaaaaaaaaaaaaaaaaaaaugcaucccccccccccccccccccccccccccccccaaaggcucuuuucagagccaccagaauu

SEQ ID NO: 166 - RNA, 2263 nt, Artificial Sequence
  SARS-CoV-2/Wuhan/WIV05/2019__EPI_ISL_402128 spike protein mRNA gc (1-681) R9506, R9513
aggagaaagcuuaccauguucguguuccugguccuccugccccuggugagcucccagugcgugaaccucaccacccgcacgcagcugccgcccgccuacaccaacagcuucacccggggcgucuacuaccccgacaagguguuccgcuccagcgugcugcacuccacccaggaccucuuccugcccuucuucagcaacgucacgugguuccacgccauccacguguccgggaccaacggcaccaagcgguucgacaacccggugcugcccuucaacgacggggucuacuucgcgagcaccgagaaguccaacaucauccgcggcuggaucuucgggacgacccucgacagcaagacccagucccugcugaucgugaacaacgccaccaacguggucaucaaggugugcgaguuccaguucugcaacgaccccuuccucggcguguacuaccacaagaacaacaagagcuggauggaguccgaguuccgggucuacagcuccgccaacaacugcacguucgaguacgugagccagcccuuccugauggaccuggagggcaagcaggggaacuucaagaaccuccgcgaguucguguucaagaacaucgacggcuacuucaagaucuacuccaagcacaccccgaucaaccugguccgggaccugccccagggguucagcgcccucgagccccugguggaccugcccaucggcaucaacaucacccgcuuccagacccuccuggcccugcaccgguccuaccucacgccgggggacagcagcuccggcuggaccgcgggcgccgccgccuacuacgugggguaccugcagccccgcaccuuccugcucaaguacaacgagaacggcaccaucacggacgcggucgacugcgcccuggacccccugagcgagaccaagugcacccucaaguccuucaccguggagaaggggaucuaccagacgagcaacuuccgggugcagcccaccgaguccaucguccgcuucccgaacaucaccaaccugugccccuucggcgagguguucaacgccacccgguucgccagcgucuacgccuggaaccgcaagcggaucuccaacugcguggcggacuacagcgugcuguacaacuccgccagcuucuccacguucaagugcuacggcgucagccccaccaagcucaacgaccugugcuucaccaacguguacgccgacuccuucgugauccgcggggacgagguccggcagaucgcccccggccagaccgggaagaucgccgacuacaacuacaagcugccggacgacuucacgggcugcgugaucgcguggaacagcaacaaccucgacuccaaggucgggggcaacuacaacuaccuguaccgccuguuccgcaagagcaaccucaagcccuucgagcgggacaucuccaccgagaucuaccaggccggcagcacccccugcaacgggguggagggcuucaacugcuacuucccccugcaguccuacggguuccagccgaccaacggcgugggguaccagcccuaccggguggucgugcugagcuucgagcuccugcacgcccccgccacggugugcggccccaagaaguccaccaaccuggucaagaacaagugcgugaacuucaacuucaacggccucaccgggaccggcgugcugaccgagagcaacaagaaguuccugccguuccagcaguucgggcgcgacaucgccgacacgaccgacgcgguccgcgacccccagacccuggagauccucgacaucacccccugcagcuucggcgggguguccgugaucacgccgggcaccaacaccagcaaccaggucgccgugcuguaccaggacgugaacugcaccgagguccccguggccauccacgccgaccagcugacgcccaccuggcggguguacuccaccggcagcaacgucuuccagacccgcgccgggugccucaucggcgcggagcacgugaacaacuccuacgagugcgacauccccaucggggccggcaucugcgccagcuaccagacgcagaccaacuccccgugaggacuaguuauaagacugacuagcccgaugggccucccaacgggcccuccuccccuccuugcaccgagauuaauaaaaaaaaaaaaaaaaaaaaaaaaaaaaaaaaaaaaaaaaaaaaaaaaaaaaaaaaaaaaaaaaugcaucccccccccccccccccccccccccccccccaaaggcucuuuucagagccaccagaauu

SEQ ID NO: 167 - RNA, 2263 nt, Artificial Sequence
  SARS-CoV-2/Wuhan/WIV05/2019__EPI_ISL_402128 spike protein mRNA human (1-681) R9516
aggagaaagcuuaccauguucguguuucugguccuccuuccccugguuagcucccagugcgugaacuugaccacaagaacucaauuaccuccagccuacacuaauucuuucaccaggggcguauauuacccggacaagguguuucggucaaguguccugcacagcacacaggaucuauuccuccccuuuuucuccaacgugacuugguuucaugcuauccacguuucugggaccaauggaacaaaacgcuucgacaacccugugcugccauuuaaugauggugucuauuucgcaucgaccgagaagucaaacauuauacgaggcuggaucuuugggacuacacuugacagcaaaacccagagucuguugauugugaauaacgccacgaauguaguuaucaaggugugugaguuccaguuuugcaacgaucccuuccucggagucuacuaucauaaaaauaacaaguccuggauggagucugaguuccguguguacagcuccgcgaauaacuguacuuuugaauaugugucacaaccuuuccugauggaccuggaaggcaagcaggguaauuuuaaaaaccucagagaguucgucuuuaagaacauugauggguacuucaaaaucuacaguaagcacaccccaauaaauuuaguuagggaccugccccagggauuuagcgcucuugagccuuugguggaucugccaaucggcauuaacaucacacgguuccagacucuacucgcccugcaucgcucuuaucuuaccccgggcgacuccucaagcggguggacagcaggagccgcugcauacuauguagguuaccugcaacccagaaccuuuuugcucaaauauaaugaaaacggcacgauuacugaugccguggacugcgcucuggauccuuuaagugagacaaaguguacccugaagucuuucacugucgaaaaagggaucuaccagacauccaauuuuagggugcagccaaccgagagcauaguucgguuccccaacauuacgaaucucugcccuuuuggagagguguucaacgccacccgcuucgcgucggucuaugcauggaaucgaaagagaaucucuaacuguguggccgacuacuccguacuuuacaauucagcuaguuuuagcacauucaaaugcuauggcguuuccccaacuaagcugaacgacuuguguuuuaccaauguguacgccgauucuuucgucauuaggggugacgaagugcggcagaucgcacccgggcaaacaggaaaaaucgcugauuauaacuacaagcuaccggacgauuuuacuggcugcgucauugccuggaauagcaacaaccuggacucaaaagugggcgggaauuauaacuaccucuaucgucuguuccgcaagaguaaucuuaagccuuuugagagagauauauccaccgaaaucuaccaggcgggaagcacacccuguaacgguguugagggcuucaauugcuacuuuccacugcagucuuauggguuccaaccuaccaacggagugggcuaccagcccuauaggguagucguguugucauuugaacuccugcacgccccagcaacuguuugcggucccaaaaagaguacgaauuuagugaaaaacaagugugucaauuucaacuuuaaugggcugacaggcaccggagugcuaacugagagcaacaaaaaguuccucccuuuccagcaguuuggccgggacauugcugauaccacagacgccguacgagauccacaaacccuggagauccuugacauaacuccgugcuccuucgggggagugucuguuauuacacccgguacgaauaccucgaaccaggucgcuguguuguaccaggacgugaauuguacugaagucccuguugccauccacgcagaucagcugacaccaaccuggcgcguguauagcacaggcuccaacguguuucaaacuagagccgggugccucaucggagcugagcauguaaacaauucauacgaaugugacauucccaucggcgcggguauuugcgcaaguuaucagacccagacgaacucuccuugaggacuaguuauaagacugacuagcccgaugggccucccaacgggcccuccuccccuccuugcaccgagauuaauaaaaaaaaaaaaaaaaaaaaaaaaaaaaaaaaaaaaaaaaaaaaaaaaaaaaaaaaaaaaaaaaugcaucccccccccccccccccccccccccccccccaaaggcucuuuucagagccaccagaauu

SEQ ID NO: 168 - RNA, 2263 nt, Artificial Sequence
  SARS-CoV-2/Wuhan/WIV05/2019__EPI_ISL_402128 spike protein mRNA gc mod (1-681) R9518
aggagaaagcuuaccauguucguguuucuggugcugcugccccugguguccagccagugugugaaccugaccaccagaacacagcugccuccagccuacaccaacagcuucaccagaggcguguacuaccccgacaagguguucagauccagcgugcugcacucuacccaggaccuguuccugccuuucuucagcaacgugaccugguuccacgccauccacguguccggcaccaauggcaccaagagauucgacaaccccgugcugcccuucaacgacgggguguacuuugccagcaccgagaaguccaacaucaucagaggcuggaucuucggcaccacacuggacagcaagacccagagccugcugaucgugaacaacgccaccaacguggucaucaaagugugcgaguuccaguucugcaacgaccccuuccugggcgucuacuaccacaagaacaacaagagcuggauggaaagcgaguuccggguguacagcagcgccaacaacugcaccuucgaguacgugucccagccuuuccugauggaccuggaaggcaagcagggcaacuucaagaaccugcgcgaguucguguucaagaacaucgacggcuacuucaaaaucuacagcaagcacaccccuaucaaccucgugcgggaucugccucagggcuucucugcucuggaaccccugguggaucugcccaucggcaucaacaucacccgguuucagacacugcuggcccugcacagaagcuaccugacaccuggcgauagcagcagcggauggacagcuggugccgccgcuuacuaugugggcuaccugcagccuagaaccuuccugcugaaguacaacgagaacggcaccaucaccgacgccguggauugugcucuggauccucugagcgagacaaagugcacccugaaguccuucaccguggaaaagggcaucuaccagaccagcaacuuccgggugcagcccaccgaauccaucgugcgguuccccaauaucaccaaucugugccccuucggcgagguguucaaugccaccagauucgccucuguguacgccuggaaccggaagcggaucagcaauugcguggccgacuacuccgugcuguacaacuccgccagcuucagcaccuucaagugcuacggcguguccccuaccaagcugaacgaccugugcuucacaaacguguacgccgacagcuucgugauccggggagaugaagugcggcagauugccccuggacagacaggcaagaucgccgacuacaacuacaagcugcccgacgacuucaccggcugugugauugccuggaacagcaacaaccuggacuccaaagucggcggcaacuacaauuaccuguaccggcuguuccggaaguccaaucugaagcccuucgagcgggacaucagcaccgaaaucuaucaggccggcagcaccccuugcaacggcguggaaggcuucaacugcuacuucccacugcaguccuacggcuuucagcccacaaauggcgugggcuaucagcccuacagagugguggugcugagcuucgaacugcugcaugcuccugccacagugugcggcccuaagaaaagcaccaaucucgugaagaacaaaugcgugaacuucaacuucaacggccugaccggcaccggcgugcugacagagagcaacaagaaguuccugccauuccagcaguuuggccgggauaucgccgauaccacagacgccguuagagauccccagacacuggaaauccuggacaucaccccaugcagcuucggcggagugucugugaucaccccuggcaccaacaccagcaaucagguggcagugcuguaccaggacgugaacuguaccgaagugcccguggccauucacgccgaucagcugacaccuacauggcggguguacuccaccggcagcaauguguuucagaccagagccggcugucugaucggagccgagcacgugaacaauagcuacgagugcgacauccccaucggcgcuggcaucugugccagcuaccagacacagacaaacagccccugaggacuaguuauaagacugacuagcccgaugggccucccaacgggcccuccuccccuccuugcaccgagauuaauaaaaaaaaaaaaaaaaaaaaaaaaaaaaaaaaaaaaaaaaaaaaaaaaaaaaaaaaaaaaaaaaugcaucccccccccccccccccccccccccccccccaaaggcucuuuucagagccaccagaauu

SEQ ID NO: 169 - RNA, 4039 nt, Artificial Sequence
  SARS-CoV-2/Wuhan/WIV05/2019__EPI_ISL_402128 spike protein mRNA gc (1-1273)
gggagaaagcuuaccauguucguguuccugguccuccugccccuggugagcucccagugcgugaaccucaccacccgcacgcagcugccgcccgccuacaccaacagcuucacccggggcgucuacuaccccgacaagguguuccgcuccagcgugcugcacuccacccaggaccucuuccugcccuucuucagcaacgucacgugguuccacgccauccacguguccgggaccaacggcaccaagcgguucgacaacccggugcugcccuucaacgacggggucuacuucgcgagcaccgagaaguccaacaucauccgcggcuggaucuucgggacgacccucgacagcaagacccagucccugcugaucgugaacaacgccaccaacguggucaucaaggugugcgaguuccaguucugcaacgaccccuuccucggcguguacuaccacaagaacaacaagagcuggauggaguccgaguuccgggucuacagcuccgccaacaacugcacguucgaguacgugagccagcccuuccugauggaccuggagggcaagcaggggaacuucaagaaccuccgcgaguucguguucaagaacaucgacggcuacuucaagaucuacuccaagcacaccccgaucaaccugguccgggaccugccccagggguucagcgcccucgagccccugguggaccugcccaucggcaucaacaucacccgcuuccagacccuccuggcccugcaccgguccuaccucacgccgggggacagcagcuccggcuggaccgcgggcgccgccgccuacuacgugggguaccugcagccccgcaccuuccugcucaaguacaacgagaacggcaccaucacggacgcggucgacugcgcccuggacccccugagcgagaccaagugcacccucaaguccuucaccguggagaaggggaucuaccagacgagcaacuuccgggugcagcccaccgaguccaucguccgcuucccgaacaucaccaaccugugccccuucggcgagguguucaacgccacccgguucgccagcgucuacgccuggaaccgcaagcggaucuccaacugcguggcggacuacagcgugcuguacaacuccgccagcuucuccacguucaagugcuacggcgucagccccaccaagcucaacgaccugugcuucaccaacguguacgccgacuccuucgugauccgcggggacgagguccggcagaucgcccccggccagaccgggaagaucgccgacuacaacuacaagcugccggacgacuucacgggcugcgugaucgcguggaacagcaacaaccucgacuccaaggucgggggcaacuacaacuaccuguaccgccuguuccgcaagagcaaccucaagcccuucgagcgggacaucuccaccgagaucuaccaggccggcagcacccccugcaacgggguggagggcuucaacugcuacuucccccugcaguccuacggguuccagccgaccaacggcgugggguaccagcccuaccggguggucgugcugagcuucgagcuccugcacgcccccgccacggugugcggccccaagaaguccaccaaccuggucaagaacaagugcgugaacuucaacuucaacggccucaccgggaccggcgugcugaccgagagcaacaagaaguuccugccguuccagcaguucgggcgcgacaucgccgacacgaccgacgcgguccgcgacccccagacccuggagauccucgacaucacccccugcagcuucggcgggguguccgugaucacgccgggcaccaacaccagcaaccaggucgccgugcuguaccaggacgugaacugcaccgagguccccguggccauccacgccgaccagcugacgcccaccuggcggguguacuccaccggcagcaacgucuuccagacccgcgccgggugccucaucggcgcggagcacgugaacaacuccuacgagugcgacauccccaucggggccggcaucugcgccagcuaccagacgcagaccaacuccccgcggcgcgcccggagcguggcgucccagagcaucaucgccuacaccaugucccugggcgccgagaacagcgucgccuacuccaacaacagcaucgccauccccaccaacuucacgaucuccgugaccaccgagauccugcccgugagcaugaccaagacgagcgucgacugcaccauguacaucugcggggacuccaccgagugcagcaaccuccugcugcaguacggcuccuucugcacccagcucaaccgcgcgcugacggggaucgccguggagcaggacaagaacacccaggagguguucgcccaggucaagcagaucuacaagacgcccccgaucaaggacuucggcggguucaacuucagccagauccugcccgaccccuccaagcccagcaagcgguccuucaucgaggaccuccuguucaacaaggugacccuggccgacgccggcuucaucaagcaguacggcgacugccucggggacaucgcggcccgcgaccugaucugcgcccagaaguucaacggccugaccgugcucccgccccugcugaccgacgagaugaucgcccaguacaccagcgcccuccuggcggggaccaucacguccggcuggaccuucggggccggcgccgcccugcagauccccuucgcgaugcagauggccuaccgguucaacggcaucggggucacccagaacgugcucuacgagaaccagaagcugaucgccaaccaguucaacagcgccaucggcaagauccaggacucccugagcuccaccgccagcgcgcucgggaagcugcaggacguggucaaccagaacgcccaggcccugaacacgcucgugaagcagcuguccagcaacuucggcgccaucuccagcgugcugaacgacauccucucccgccuggacaaggucgaggccgaggugcagaucgaccggcugaucaccgggcgccuccagagccugcagaccuacgugacccagcagcugauccgggcggccgagauccgcgccagcgccaaccucgccgcgaccaagauguccgagugcguccugggccagagcaagcggguggacuucugcggcaagggguaccaccugauguccuucccccagagcgccccgcacggcguggucuuccuccacgugacguacguccccgcccaggagaagaacuucaccaccgcccccgcgaucugccacgacgggaaggcccacuucccccgcgagggcguguucguguccaacgggacccacugguucgucacgcagcggaacuucuacgagccgcagaucaucaccaccgacaacaccuucgugagcggcaacugcgacguggucaucggcaucgugaacaacacgguguacgacccccugcagcccgagcuggacuccuucaaggaggagcucgacaaguacuucaagaaccacaccagccccgacgucgaccugggggacaucuccggcaucaacgccagcguggugaacauccagaaggagaucgaccgccugaacgaggucgccaagaaccucaacgagucccugaucgaccugcaggagcucgggaaguacgagcaguacaucaaguggccgugguacaucuggcugggcuucaucgccggccugaucgcgaucgugauggugaccaucaugcucugcugcaugaccagcugcugcuccugccugaaggggugcugcagcugcggcuccugcugcaaguucgacgaggacgacagcgagcccguccugaagggggugaagcuccacuacacgugaggacuaguuauaagacugacuagcccgaugggccucccaacgggcccuccuccccuccuugcaccgagauuaauaaaaaaaaaaaaaaaaaaaaaaaaaaaaaaaaaaaaaaaaaaaaaaaaaaaaaaaaaaaaaaaaugcaucccccccccccccccccccccccccccccccaaaggcucuuuucagagccaccagaauu

SEQ ID NO: 170 - RNA, 4039 nt, Artificial Sequence
  SARS-CoV-2/Wuhan/WIV05/2019__EPI_ISL_402128 spike protein mRNA gc (1-1273)(K986P_V987P)
gggagaaagcuuaccauguucguguuccugguccuccugccccuggugagcucccagugcgugaaccucaccacccgcacgcagcugccgcccgccuacaccaacagcuucacccggggcgucuacuaccccgacaagguguuccgcuccagcgugcugcacuccacccaggaccucuuccugcccuucuucagcaacgucacgugguuccacgccauccacguguccgggaccaacggcaccaagcgguucgacaacccggugcugcccuucaacgacggggucuacuucgcgagcaccgagaaguccaacaucauccgcggcuggaucuucgggacgacccucgacagcaagacccagucccugcugaucgugaacaacgccaccaacguggucaucaaggugugcgaguuccaguucugcaacgaccccuuccucggcguguacuaccacaagaacaacaagagcuggauggaguccgaguuccgggucuacagcuccgccaacaacugcacguucgaguacgugagccagcccuuccugauggaccuggagggcaagcaggggaacuucaagaaccuccgcgaguucguguucaagaacaucgacggcuacuucaagaucuacuccaagcacaccccgaucaaccugguccgggaccugccccagggguucagcgcccucgagccccugguggaccugcccaucggcaucaacaucacccgcuuccagacccuccuggcccugcaccgguccuaccucacgccgggggacagcagcuccggcuggaccgcgggcgccgccgccuacuacgugggguaccugcagccccgcaccuuccugcucaaguacaacgagaacggcaccaucacggacgcggucgacugcgcccuggacccccugagcgagaccaagugcacccucaaguccuucaccguggagaaggggaucuaccagacgagcaacuuccgggugcagcccaccgaguccaucguccgcuucccgaacaucaccaaccugugccccuucggcgagguguucaacgccacccgguucgccagcgucuacgccuggaaccgcaagcggaucuccaacugcguggcggacuacagcgugcuguacaacuccgccagcuucuccacguucaagugcuacggcgucagccccaccaagcucaacgaccugugcuucaccaacguguacgccgacuccuucgugauccgcggggacgagguccggcagaucgcccccggccagaccgggaagaucgccgacuacaacuacaagcugccggacgacuucacgggcugcgugaucgcguggaacagcaacaaccucgacuccaaggucgggggcaacuacaacuaccuguaccgccuguuccgcaagagcaaccucaagcccuucgagcgggacaucuccaccgagaucuaccaggccggcagcacccccugcaacgggguggagggcuucaacugcuacuucccccugcaguccuacggguuccagccgaccaacggcgugggguaccagcccuaccggguggucgugcugagcuucgagcuccugcacgcccccgccacggugugcggccccaagaaguccaccaaccuggucaagaacaagugcgugaacuucaacuucaacggccucaccgggaccggcgugcugaccgagagcaacaagaaguuccugccguuccagcaguucgggcgcgacaucgccgacacgaccgacgcgguccgcgacccccagacccuggagauccucgacaucacccccugcagcuucggcgggguguccgugaucacgccgggcaccaacaccagcaaccaggucgccgugcuguaccaggacgugaacugcaccgagguccccguggccauccacgccgaccagcugacgcccaccuggcggguguacuccaccggcagcaacgucuuccagacccgcgccgggugccucaucggcgcggagcacgugaacaacuccuacgagugcgacauccccaucggggccggcaucugcgccagcuaccagacgcagaccaacuccccgcggcgcgcccggagcguggcgucccagagcaucaucgccuacaccaugucccugggcgccgagaacagcgucgccuacuccaacaacagcaucgccauccccaccaacuucacgaucuccgugaccaccgagauccugcccgugagcaugaccaagacgagcgucgacugcaccauguacaucugcggggacuccaccgagugcagcaaccuccugcugcaguacggcuccuucugcacccagcucaaccgcgcgcugacggggaucgccguggagcaggacaagaacacccaggagguguucgcccaggucaagcagaucuacaagacgcccccgaucaaggacuucggcggguucaacuucagccagauccugcccgaccccuccaagcccagcaagcgguccuucaucgaggaccuccuguucaacaaggugacccuggccgacgccggcuucaucaagcaguacggcgacugccucggggacaucgcggcccgcgaccugaucugcgcccagaaguucaacggccugaccgugcucccgccccugcugaccgacgagaugaucgcccaguacaccagcgcccuccuggcggggaccaucacguccggcuggaccuucggggccggcgccgcccugcagauccccuucgcgaugcagauggccuaccgguucaacggcaucggggucacccagaacgugcucuacgagaaccagaagcugaucgccaaccaguucaacagcgccaucggcaagauccaggacucccugagcuccaccgccagcgcgcucgggaagcugcaggacguggucaaccagaacgcccaggcccugaacacgcucgugaagcagcuguccagcaacuucggcgccaucuccagcgugcugaacgacauccucucccgccuggacccgcccgaggccgaggugcagaucgaccggcugaucaccgggcgccuccagagccugcagaccuacgugacccagcagcugauccgggcggccgagauccgcgccagcgccaaccucgccgcgaccaagauguccgagugcguccugggccagagcaagcggguggacuucugcggcaagggguaccaccugauguccuucccccagagcgccccgcacggcguggucuuccuccacgugacguacguccccgcccaggagaagaacuucaccaccgcccccgcgaucugccacgacgggaaggcccacuucccccgcgagggcguguucguguccaacgggacccacugguucgucacgcagcggaacuucuacgagccgcagaucaucaccaccgacaacaccuucgugagcggcaacugcgacguggucaucggcaucgugaacaacacgguguacgacccccugcagcccgagcuggacuccuucaaggaggagcucgacaaguacuucaagaaccacaccagccccgacgucgaccugggggacaucuccggcaucaacgccagcguggugaacauccagaaggagaucgaccgccugaacgaggucgccaagaaccucaacgagucccugaucgaccugcaggagcucgggaaguacgagcaguacaucaaguggccgugguacaucuggcugggcuucaucgccggccugaucgcgaucgugauggugaccaucaugcucugcugcaugaccagcugcugcuccugccugaaggggugcugcagcugcggcuccugcugcaaguucgacgaggacgacagcgagcccguccugaagggggugaagcuccacuacacgugaggacuaguuauaagacugacuagcccgaugggccucccaacgggcccuccuccccuccuugcaccgagauuaauaaaaaaaaaaaaaaaaaaaaaaaaaaaaaaaaaaaaaaaaaaaaaaaaaaaaaaaaaaaaaaaaugcaucccccccccccccccccccccccccccccccaaaggcucuuuucagagccaccagaauu

SEQ ID NO: 171 - RNA, 4039 nt, Artificial Sequence
  SARS-CoV-2/Wuhan/WIV05/2019__EPI_ISL_402128 spike protein mRNA human (1-1273)(K986P_V987P)
gggagaaagcuuaccauguucguguuucugguccuccuuccccugguuagcucccagugcgugaacuugaccacaagaacucaauuaccuccagccuacacuaauucuuucaccaggggcguauauuacccggacaagguguuucggucaaguguccugcacagcacacaggaucuauuccuccccuuuuucuccaacgugacuugguuucaugcuauccacguuucugggaccaauggaacaaaacgcuucgacaacccugugcugccauuuaaugauggugucuauuucgcaucgaccgagaagucaaacauuauacgaggcuggaucuuugggacuacacuugacagcaaaacccagagucuguugauugugaauaacgccacgaauguaguuaucaaggugugugaguuccaguuuugcaacgaucccuuccucggagucuacuaucauaaaaauaacaaguccuggauggagucugaguuccguguguacagcuccgcgaauaacuguacuuuugaauaugugucacaaccuuuccugauggaccuggaaggcaagcaggguaauuuuaaaaaccucagagaguucgucuuuaagaacauugauggguacuucaaaaucuacaguaagcacaccccaauaaauuuaguuagggaccugccccagggauuuagcgcucuugagccuuugguggaucugccaaucggcauuaacaucacacgguuccagacucuacucgcccugcaucgcucuuaucuuaccccgggcgacuccucaagcggguggacagcaggagccgcugcauacuauguagguuaccugcaacccagaaccuuuuugcucaaauauaaugaaaacggcacgauuacugaugccguggacugcgcucuggauccuuuaagugagacaaaguguacccugaagucuuucacugucgaaaaagggaucuaccagacauccaauuuuagggugcagccaaccgagagcauaguucgguuccccaacauuacgaaucucugcccuuuuggagagguguucaacgccacccgcuucgcgucggucuaugcauggaaucgaaagagaaucucuaacuguguggccgacuacuccguacuuuacaauucagcuaguuuuagcacauucaaaugcuauggcguuuccccaacuaagcugaacgacuuguguuuuaccaauguguacgccgauucuuucgucauuaggggugacgaagugcggcagaucgcacccgggcaaacaggaaaaaucgcugauuauaacuacaagcuaccggacgauuuuacuggcugcgucauugccuggaauagcaacaaccuggacucaaaagugggcgggaauuauaacuaccucuaucgucuguuccgcaagaguaaucuuaagccuuuugagagagauauauccaccgaaaucuaccaggcgggaagcacacccuguaacgguguugagggcuucaauugcuacuuuccacugcagucuuauggguuccaaccuaccaacggagugggcuaccagcccuauaggguagucguguugucauuugaacuccugcacgccccagcaacuguuugcggucccaaaaagaguacgaauuuagugaaaaacaagugugucaauuucaacuuuaaugggcugacaggcaccggagugcuaacugagagcaacaaaaaguuccucccuuuccagcaguuuggccgggacauugcugauaccacagacgccguacgagauccacaaacccuggagauccuugacauaacuccgugcuccuucgggggagugucuguuauuacacccgguacgaauaccucgaaccaggucgcuguguuguaccaggacgugaauuguacugaagucccuguugccauccacgcagaucagcugacaccaaccuggcgcguguauagcacaggcuccaacguguuucaaacuagagccgggugccucaucggagcugagcauguaaacaauucauacgaaugugacauucccaucggcgcggguauuugcgcaaguuaucagacccagacgaacucuccuaggcgggcccgcagcgucgcuucccagucaauaaucgccuacaccaugagccugggggcagaaaauucuguggccuacuccaacaauaguauugcuaucccaacaaacuucacuaucagcguuaccacagaaauucuucccgugucuaugacuaagaccuccgucgauuguacgauguauauaugcggcgacucaacagaguguaguaaucuguugcuccaauacggcagcuuuugcacccagcugaacagagccuuaacuggaaucgcaguggagcaggauaaaaauacacaggaaguuuucgcgcaagugaagcagauuuauaaaaccccgccuaucaaggacuuugggggauucaacuuuucgcagauucugccagaucccuccaaaccuucuaagaggagcuucaucgaggaccuacucuuuaauaagguaacucuggcugaugccgguuucauaaaacaauacggcgacugucuuggggauaucgcagcccgugacuugauuugcgcucagaaguucaacggacugaccguccugcccccacucuuaacagaugaaaugaucgcccaguauacgucagcacugcuugcuggcaccauuacgagugguuggacauuuggggccggcgcggccuugcagaucccuuucgcuaugcaaauggcauaccgguuuaauggaauaggcgugacccagaacgugcucuaugagaaucagaaacugauugccaaccaguucaacuccgcuaucgggaagauucaagacucucuaagcuccacagccucagcacugggaaaacuccaggacgucguuaaucagaacgcgcaggcccugaauacucuugugaagcaauugagcaguaacuuuggcgcuaucucuuccguacugaaugauauauuaagccgacucgacccgcccgaagccgagguccagaucgauagacugauuaccgguaggcuucagucgcugcaaacguacgugacacagcaguugauccgcgcagcugagauucgggccucagcaaaccucgccgcuaccaaaaugucugaaugcguucuggggcagaguaagagaguggacuucuguggaaaaggcuaccaccuaauguccuuuccccaaagcgcgccacauggugucguguuccugcacguuacuuaugugccggcccaggagaagaauuuuaccacagcuccugcaaucugccacgauggcaaagcccauuuccccagggaaggggucuuuguaucuaacggaacucacugguucgugacccagcgcaauuuuuacgagccacagauaauuacaacggacaacaccuucguuagcggcaauugugauguggucaucgggaucgugaacaauacuguauaugacccccuccaaccugagcuggauuccuucaaggaggaacuugacaaauacuuuaagaaccauacaucaccagauguggacuugggagauauuaguggcaucaaugccagcgucguuaacauucagaaggaaauagaccgacugaaugagguggcuaaaaacuuaaacgaaucucucaucgaccugcaggagcuugguaaguaugagcaguacauuaaauggcccugguauaucuggcugggguucauugcaggacuaaucgccauagugauggucaccaucaugcucugcuguaugacuuccugcuguucaugccugaagggcuguugcaguugugguagcugcugcaaauuugaugaagacgauuccgagccuguguugaagggcguuaagcugcacuacacaugaggacuaguuauaagacugacuagcccgaugggccucccaacgggcccuccuccccuccuugcaccgagauuaauaaaaaaaaaaaaaaaaaaaaaaaaaaaaaaaaaaaaaaaaaaaaaaaaaaaaaaaaaaaaaaaaugcaucccccccccccccccccccccccccccccccaaaggcucuuuucagagccaccagaauu

SEQ ID NO: 172 - RNA, 4039 nt, Artificial Sequence
  SARS-CoV-2/Wuhan/WIV05/2019__EPI_ISL_402128 spike protein mRNA gc mod (1-1273)(K986P_V987P)
gggagaaagcuuaccauguucguguuucuggugcugcugccccugguguccagccagugugugaaccugaccaccagaacacagcugccuccagccuacaccaacagcuucaccagaggcguguacuaccccgacaagguguucagauccagcgugcugcacucuacccaggaccuguuccugccuuucuucagcaacgugaccugguuccacgccauccacguguccggcaccaauggcaccaagagauucgacaaccccgugcugcccuucaacgacgggguguacuuugccagcaccgagaaguccaacaucaucagaggcuggaucuucggcaccacacuggacagcaagacccagagccugcugaucgugaacaacgccaccaacguggucaucaaagugugcgaguuccaguucugcaacgaccccuuccugggcgucuacuaccacaagaacaacaagagcuggauggaaagcgaguuccggguguacagcagcgccaacaacugcaccuucgaguacgugucccagccuuuccugauggaccuggaaggcaagcagggcaacuucaagaaccugcgcgaguucguguucaagaacaucgacggcuacuucaaaaucuacagcaagcacaccccuaucaaccucgugcgggaucugccucagggcuucucugcucuggaaccccugguggaucugcccaucggcaucaacaucacccgguuucagacacugcuggcccugcacagaagcuaccugacaccuggcgauagcagcagcggauggacagcuggugccgccgcuuacuaugugggcuaccugcagccuagaaccuuccugcugaaguacaacgagaacggcaccaucaccgacgccguggauugugcucuggauccucugagcgagacaaagugcacccugaaguccuucaccguggaaaagggcaucuaccagaccagcaacuuccgggugcagcccaccgaauccaucgugcgguuccccaauaucaccaaucugugccccuucggcgagguguucaaugccaccagauucgccucuguguacgccuggaaccggaagcggaucagcaauugcguggccgacuacuccgugcuguacaacuccgccagcuucagcaccuucaagugcuacggcguguccccuaccaagcugaacgaccugugcuucacaaacguguacgccgacagcuucgugauccggggagaugaagugcggcagauugccccuggacagacaggcaagaucgccgacuacaacuacaagcugcccgacgacuucaccggcugugugauugccuggaacagcaacaaccuggacuccaaagucggcggcaacuacaauuaccuguaccggcuguuccggaaguccaaucugaagcccuucgagcgggacaucagcaccgaaaucuaucaggccggcagcaccccuugcaacggcguggaaggcuucaacugcuacuucccacugcaguccuacggcuuucagcccacaaauggcgugggcuaucagcccuacagagugguggugcugagcuucgaacugcugcaugcuccugccacagugugcggcccuaagaaaagcaccaaucucgugaagaacaaaugcgugaacuucaacuucaacggccugaccggcaccggcgugcugacagagagcaacaagaaguuccugccauuccagcaguuuggccgggauaucgccgauaccacagacgccguuagagauccccagacacuggaaauccuggacaucaccccaugcagcuucggcggagugucugugaucaccccuggcaccaacaccagcaaucagguggcagugcuguaccaggacgugaacuguaccgaagugcccguggccauucacgccgaucagcugacaccuacauggcggguguacuccaccggcagcaauguguuucagaccagagccggcugucugaucggagccgagcacgugaacaauagcuacgagugcgacauccccaucggcgcuggcaucugugccagcuaccagacacagacaaacagccccagacgggcuagaagcguggccagccagagcaucauugccuacacaaugucucugggcgccgagaacagcguggccuacuccaacaacucuaucgcuauccccaccaacuucaccaucagcgugaccaccgagauccugccuguguccaugaccaagaccagcguggacugcaccauguacaucugcggcgauuccaccgagugcuccaaccugcugcugcaguacggcagcuucugcacccagcugaauagagcccugacagggaucgccguggaacaggacaagaacacccaagagguguucgcccaagugaagcaaaucuacaagaccccuccuaucaaggacuucggcggcuucaauuucagccagauucugcccgauccuagcaagcccagcaagcggagcuucaucgaggaccugcuguucaacaaagugacacuggccgacgccggcuucaucaagcaguauggcgauugucugggcgacauugccgccagggaucugauuugcgcccagaaguuuaacggacugacagugcugccuccucugcugaccgaugagaugaucgcccaguacacaucugcccugcuggccggcacaaucacaagcggcuggacauuuggagcuggcgccgcucugcagauccccuuugcuaugcagauggccuaccgguucaacggcaucggagugacccagaaugugcuguacgagaaccagaagcugaucgccaaccaguucaacagcgccaucggcaagauccaggacagccugagcagcacagcaagcgcccugggaaagcugcaggacguggucaaccagaaugcccaggcacugaacacccuggucaagcagcuguccuccaacuucggcgccaucagcucugugcugaacgauauccugagcagacuggacccuccugaggccgaggugcagaucgacagacugaucacaggcagacugcagagccuccagacauacgugacccagcagcugaucagagccgccgagauuagagccucugccaaucuggccgccaccaagaugucugagugugugcugggccagagcaagagaguggacuuuugcggcaagggcuaccaccugaugagcuucccucagucugccccucacggcgugguguuucugcacgugacauaugugcccgcucaagagaagaauuucaccaccgcuccagccaucugccacgacggcaaagcccacuuuccuagagaaggcguguucguguccaacggcacccauugguucgugacacagcggaacuucuacgagccccagaucaucaccaccgacaacaccuucgugucuggcaacugcgacguugugaucggcauugugaacaauaccguguacgacccucugcagcccgagcuggacagcuucaaagaggaacuggacaaguacuuuaagaaccacacaagccccgacguggaccugggcgauaucagcggaaucaaugccagcgucgugaacauccagaaagagaucgaccggcugaacgagguggccaagaaucugaacgagagccugaucgaccugcaagaacuggggaaguacgagcaguacaucaaguggcccugguacaucuggcugggcuuuaucgccggacugauugccaucgugauggucacaaucaugcuguguugcaugaccagcugcuguagcugccugaagggcuguuguagcuguggcagcugcugcaaguucgacgaggacgauucugagcccgugcugaagggcgugaaacugcacuacaccugaggacuaguuauaagacugacuagcccgaugggccucccaacgggcccuccuccccuccuugcaccgagauuaauaaaaaaaaaaaaaaaaaaaaaaaaaaaaaaaaaaaaaaaaaaaaaaaaaaaaaaaaaaaaaaaaugcaucccccccccccccccccccccccccccccccaaaggcucuuuucagagccaccagaauu

SEQ ID NO: 173 - RNA, 2263 nt, Artificial Sequence
  SARS-CoV-2/Wuhan/WIV05/2019__EPI_ISL_402128 spike protein mRNA gc (1-681)
gggagaaagcuuaccauguucguguuccugguccuccugccccuggugagcucccagugcgugaaccucaccacccgcacgcagcugccgcccgccuacaccaacagcuucacccggggcgucuacuaccccgacaagguguuccgcuccagcgugcugcacuccacccaggaccucuuccugcccuucuucagcaacgucacgugguuccacgccauccacguguccgggaccaacggcaccaagcgguucgacaacccggugcugcccuucaacgacggggucuacuucgcgagcaccgagaaguccaacaucauccgcggcuggaucuucgggacgacccucgacagcaagacccagucccugcugaucgugaacaacgccaccaacguggucaucaaggugugcgaguuccaguucugcaacgaccccuuccucggcguguacuaccacaagaacaacaagagcuggauggaguccgaguuccgggucuacagcuccgccaacaacugcacguucgaguacgugagccagcccuuccugauggaccuggagggcaagcaggggaacuucaagaaccuccgcgaguucguguucaagaacaucgacggcuacuucaagaucuacuccaagcacaccccgaucaaccugguccgggaccugccccagggguucagcgcccucgagccccugguggaccugcccaucggcaucaacaucacccgcuuccagacccuccuggcccugcaccgguccuaccucacgccgggggacagcagcuccggcuggaccgcgggcgccgccgccuacuacgugggguaccugcagccccgcaccuuccugcucaaguacaacgagaacggcaccaucacggacgcggucgacugcgcccuggacccccugagcgagaccaagugcacccucaaguccuucaccguggagaaggggaucuaccagacgagcaacuuccgggugcagcccaccgaguccaucguccgcuucccgaacaucaccaaccugugccccuucggcgagguguucaacgccacccgguucgccagcgucuacgccuggaaccgcaagcggaucuccaacugcguggcggacuacagcgugcuguacaacuccgccagcuucuccacguucaagugcuacggcgucagccccaccaagcucaacgaccugugcuucaccaacguguacgccgacuccuucgugauccgcggggacgagguccggcagaucgcccccggccagaccgggaagaucgccgacuacaacuacaagcugccggacgacuucacgggcugcgugaucgcguggaacagcaacaaccucgacuccaaggucgggggcaacuacaacuaccuguaccgccuguuccgcaagagcaaccucaagcccuucgagcgggacaucuccaccgagaucuaccaggccggcagcacccccugcaacgggguggagggcuucaacugcuacuucccccugcaguccuacggguuccagccgaccaacggcgugggguaccagcccuaccggguggucgugcugagcuucgagcuccugcacgcccccgccacggugugcggccccaagaaguccaccaaccuggucaagaacaagugcgugaacuucaacuucaacggccucaccgggaccggcgugcugaccgagagcaacaagaaguuccugccguuccagcaguucgggcgcgacaucgccgacacgaccgacgcgguccgcgacccccagacccuggagauccucgacaucacccccugcagcuucggcgggguguccgugaucacgccgggcaccaacaccagcaaccaggucgccgugcuguaccaggacgugaacugcaccgagguccccguggccauccacgccgaccagcugacgcccaccuggcggguguacuccaccggcagcaacgucuuccagacccgcgccgggugccucaucggcgcggagcacgugaacaacuccuacgagugcgacauccccaucggggccggcaucugcgccagcuaccagacgcagaccaacuccccgugaggacuaguuauaagacugacuagcccgaugggccucccaacgggcccuccuccccuccuugcaccgagauuaauaaaaaaaaaaaaaaaaaaaaaaaaaaaaaaaaaaaaaaaaaaaaaaaaaaaaaaaaaaaaaaaaugcaucccccccccccccccccccccccccccccccaaaggcucuuuucagagccaccagaauu

SEQ ID NO: 174 - RNA, 2263 nt, Artificial Sequence
  SARS-CoV-2/Wuhan/WIV05/2019__EPI_ISL_402128 spike protein mRNA human (1-681)
gggagaaagcuuaccauguucguguuucugguccuccuuccccugguuagcucccagugcgugaacuugaccacaagaacucaauuaccuccagccuacacuaauucuuucaccaggggcguauauuacccggacaagguguuucggucaaguguccugcacagcacacaggaucuauuccuccccuuuuucuccaacgugacuugguuucaugcuauccacguuucugggaccaauggaacaaaacgcuucgacaacccugugcugccauuuaaugauggugucuauuucgcaucgaccgagaagucaaacauuauacgaggcuggaucuuugggacuacacuugacagcaaaacccagagucuguugauugugaauaacgccacgaauguaguuaucaaggugugugaguuccaguuuugcaacgaucccuuccucggagucuacuaucauaaaaauaacaaguccuggauggagucugaguuccguguguacagcuccgcgaauaacuguacuuuugaauaugugucacaaccuuuccugauggaccuggaaggcaagcaggguaauuuuaaaaaccucagagaguucgucuuuaagaacauugauggguacuucaaaaucuacaguaagcacaccccaauaaauuuaguuagggaccugccccagggauuuagcgcucuugagccuuugguggaucugccaaucggcauuaacaucacacgguuccagacucuacucgcccugcaucgcucuuaucuuaccccgggcgacuccucaagcggguggacagcaggagccgcugcauacuauguagguuaccugcaacccagaaccuuuuugcucaaauauaaugaaaacggcacgauuacugaugccguggacugcgcucuggauccuuuaagugagacaaaguguacccugaagucuuucacugucgaaaaagggaucuaccagacauccaauuuuagggugcagccaaccgagagcauaguucgguuccccaacauuacgaaucucugcccuuuuggagagguguucaacgccacccgcuucgcgucggucuaugcauggaaucgaaagagaaucucuaacuguguggccgacuacuccguacuuuacaauucagcuaguuuuagcacauucaaaugcuauggcguuuccccaacuaagcugaacgacuuguguuuuaccaauguguacgccgauucuuucgucauuaggggugacgaagugcggcagaucgcacccgggcaaacaggaaaaaucgcugauuauaacuacaagcuaccggacgauuuuacuggcugcgucauugccuggaauagcaacaaccuggacucaaaagugggcgggaauuauaacuaccucuaucgucuguuccgcaagaguaaucuuaagccuuuugagagagauauauccaccgaaaucuaccaggcgggaagcacacccuguaacgguguugagggcuucaauugcuacuuuccacugcagucuuauggguuccaaccuaccaacggagugggcuaccagcccuauaggguagucguguugucauuugaacuccugcacgccccagcaacuguuugcggucccaaaaagaguacgaauuuagugaaaaacaagugugucaauuucaacuuuaaugggcugacaggcaccggagugcuaacugagagcaacaaaaaguuccucccuuuccagcaguuuggccgggacauugcugauaccacagacgccguacgagauccacaaacccuggagauccuugacauaacuccgugcuccuucgggggagugucuguuauuacacccgguacgaauaccucgaaccaggucgcuguguuguaccaggacgugaauuguacugaagucccuguugccauccacgcagaucagcugacaccaaccuggcgcguguauagcacaggcuccaacguguuucaaacuagagccgggugccucaucggagcugagcauguaaacaauucauacgaaugugacauucccaucggcgcggguauuugcgcaaguuaucagacccagacgaacucuccuugaggacuaguuauaagacugacuagcccgaugggccucccaacgggcccuccuccccuccuugcaccgagauuaauaaaaaaaaaaaaaaaaaaaaaaaaaaaaaaaaaaaaaaaaaaaaaaaaaaaaaaaaaaaaaaaaugcaucccccccccccccccccccccccccccccccaaaggcucuuuucagagccaccagaauu

SEQ ID NO: 175 - RNA, 2263 nt, Artificial Sequence
  SARS-CoV-2/Wuhan/WIV05/2019__EPI_ISL_402128 spike protein mRNA gc mod (1-681)
gggagaaagcuuaccauguucguguuucuggugcugcugccccugguguccagccagugugugaaccugaccaccagaacacagcugccuccagccuacaccaacagcuucaccagaggcguguacuaccccgacaagguguucagauccagcgugcugcacucuacccaggaccuguuccugccuuucuucagcaacgugaccugguuccacgccauccacguguccggcaccaauggcaccaagagauucgacaaccccgugcugcccuucaacgacgggguguacuuugccagcaccgagaaguccaacaucaucagaggcuggaucuucggcaccacacuggacagcaagacccagagccugcugaucgugaacaacgccaccaacguggucaucaaagugugcgaguuccaguucugcaacgaccccuuccugggcgucuacuaccacaagaacaacaagagcuggauggaaagcgaguuccggguguacagcagcgccaacaacugcaccuucgaguacgugucccagccuuuccugauggaccuggaaggcaagcagggcaacuucaagaaccugcgcgaguucguguucaagaacaucgacggcuacuucaaaaucuacagcaagcacaccccuaucaaccucgugcgggaucugccucagggcuucucugcucuggaaccccugguggaucugcccaucggcaucaacaucacccgguuucagacacugcuggcccugcacagaagcuaccugacaccuggcgauagcagcagcggauggacagcuggugccgccgcuuacuaugugggcuaccugcagccuagaaccuuccugcugaaguacaacgagaacggcaccaucaccgacgccguggauugugcucuggauccucugagcgagacaaagugcacccugaaguccuucaccguggaaaagggcaucuaccagaccagcaacuuccgggugcagcccaccgaauccaucgugcgguuccccaauaucaccaaucugugccccuucggcgagguguucaaugccaccagauucgccucuguguacgccuggaaccggaagcggaucagcaauugcguggccgacuacuccgugcuguacaacuccgccagcuucagcaccuucaagugcuacggcguguccccuaccaagcugaacgaccugugcuucacaaacguguacgccgacagcuucgugauccggggagaugaagugcggcagauugccccuggacagacaggcaagaucgccgacuacaacuacaagcugcccgacgacuucaccggcugugugauugccuggaacagcaacaaccuggacuccaaagucggcggcaacuacaauuaccuguaccggcuguuccggaaguccaaucugaagcccuucgagcgggacaucagcaccgaaaucuaucaggccggcagcaccccuugcaacggcguggaaggcuucaacugcuacuucccacugcaguccuacggcuuucagcccacaaauggcgugggcuaucagcccuacagagugguggugcugagcuucgaacugcugcaugcuccugccacagugugcggcccuaagaaaagcaccaaucucgugaagaacaaaugcgugaacuucaacuucaacggccugaccggcaccggcgugcugacagagagcaacaagaaguuccugccauuccagcaguuuggccgggauaucgccgauaccacagacgccguuagagauccccagacacuggaaauccuggacaucaccccaugcagcuucggcggagugucugugaucaccccuggcaccaacaccagcaaucagguggcagugcuguaccaggacgugaacuguaccgaagugcccguggccauucacgccgaucagcugacaccuacauggcggguguacuccaccggcagcaauguguuucagaccagagccggcugucugaucggagccgagcacgugaacaauagcuacgagugcgacauccccaucggcgcuggcaucugugccagcuaccagacacagacaaacagccccugaggacuaguuauaagacugacuagcccgaugggccucccaacgggcccuccuccccuccuugcaccgagauuaauaaaaaaaaaaaaaaaaaaaaaaaaaaaaaaaaaaaaaaaaaaaaaaaaaaaaaaaaaaaaaaaaugcaucccccccccccccccccccccccccccccccaaaggcucuuuucagagccaccagaauu

SEQ ID NO: 176 - RNA, 6 nt, Artificial Sequence
  mRNA 5'-end
gggaga

SEQ ID NO: 177 - RNA, 6 nt, Artificial Sequence
  mRNA 5'-end
aggaga

SEQ ID NO: 178 - DNA, 24 bp, Artificial Sequence
  histone stem-loop (histoneSL,hSL)
caaaggctcttttcagagccacca

SEQ ID NO: 179 - RNA, 24 nt, Artificial Sequence
  histone stem-loop (histoneSL,hSL) mRNA
caaaggcucuuuucagagccacca

SEQ ID NO: 180 - DNA, 13 bp, Artificial Sequence
  Kozak
gccgccaccatgg

SEQ ID NO: 181 - RNA, 13 nt, Artificial Sequence
  Kozak mRNA
gccgccaccaugg

SEQ ID NO: 182 - RNA, 128 nt, Artificial Sequence
  mRNA 3'-end A64-N5-C30-histoneSL-N5
aaaaaaaaaaaaaaaaaaaaaaaaaaaaaaaaaaaaaaaaaaaaaaaaaaaaaaaaaaaaaaaaugcaucccccccccccccccccccccccccccccccaaaggcucuuuucagagccaccagaauu

SEQ ID NO: 183 - RNA, 129 nt, Artificial Sequence
  mRNA 3'-end histoneSL-A100-N5
caaaggcucuuuucagagccaccaaaaaaaaaaaaaaaaaaaaaaaaaaaaaaaaaaaaaaaaaaaaaaaaaaaaaaaaaaaaaaaaaaaaaaaaaaaaaaaaaaaaaaaaaaaaaaaaaaaaagaauu

SEQ ID NO: 184 - RNA, 93 nt, Artificial Sequence
  mRNA 3'-end histoneSL-A64-N5
caaaggcucuuuucagagccaccaaaaaaaaaaaaaaaaaaaaaaaaaaaaaaaaaaaaaaaaaaaaaaaaaaaaaaaaaaaaaaaaagaauu

SEQ ID NO: 185 - RNA, 105 nt, Artificial Sequence
  mRNA 3'-end A100-N5
aaaaaaaaaaaaaaaaaaaaaaaaaaaaaaaaaaaaaaaaaaaaaaaaaaaaaaaaaaaaaaaaaaaaaaaaaaaaaaaaaaaaaaaaaaaaaaaaaaaagaauu

SEQ ID NO: 186 - RNA, 69 nt, Artificial Sequence
  mRNA 3'-end A64-N5
aaaaaaaaaaaaaaaaaaaaaaaaaaaaaaaaaaaaaaaaaaaaaaaaaaaaaaaaaaaaaaaagaauu

SEQ ID NO: 187 - RNA, 124 nt, Artificial Sequence
  mRNA 3'-end histoneSL-A100
caaaggcucuuuucagagccaccaaaaaaaaaaaaaaaaaaaaaaaaaaaaaaaaaaaaaaaaaaaaaaaaaaaaaaaaaaaaaaaaaaaaaaaaaaaaaaaaaaaaaaaaaaaaaaaaaaaaa

SEQ ID NO: 188 - RNA, 88 nt, Artificial Sequence
  mRNA 3'-end histoneSL-A64
caaaggcucuuuucagagccaccaaaaaaaaaaaaaaaaaaaaaaaaaaaaaaaaaaaaaaaaaaaaaaaaaaaaaaaaaaaaaaaaa

SEQ ID NO: 189 - RNA, 100 nt, Artificial Sequence
  mRNA 3'-end A100
aaaaaaaaaaaaaaaaaaaaaaaaaaaaaaaaaaaaaaaaaaaaaaaaaaaaaaaaaaaaaaaaaaaaaaaaaaaaaaaaaaaaaaaaaaaaaaaaaaaa

SEQ ID NO: 190 - RNA, 64 nt, Artificial Sequence
  mRNA 3'-end A64
aaaaaaaaaaaaaaaaaaaaaaaaaaaaaaaaaaaaaaaaaaaaaaaaaaaaaaaaaaaaaaaa

SEQ ID NO: 191 - RNA, 93 nt, Artificial Sequence
  mRNA 3'-end A64-histoneSL-N5
aaaaaaaaaaaaaaaaaaaaaaaaaaaaaaaaaaaaaaaaaaaaaaaaaaaaaaaaaaaaaaaacaaaggcucuuuucagagccaccagaauu

SEQ ID NO: 192 - RNA, 134 nt, Artificial Sequence
  mRNA 3'-end N6-A64-N5-C30-histoneSL-N5
auuaauaaaaaaaaaaaaaaaaaaaaaaaaaaaaaaaaaaaaaaaaaaaaaaaaaaaaaaaaaaaaaaaaugcaucccccccccccccccccccccccccccccccaaaggcucuuuucagagccaccagaauu

SEQ ID NO: 193 - RNA, 134 nt, Artificial Sequence
  mRNA 3'-end N6-A64-N5-C30-histoneSL-N5
agaucuaaaaaaaaaaaaaaaaaaaaaaaaaaaaaaaaaaaaaaaaaaaaaaaaaaaaaaaaaaaaaaaaugcaucccccccccccccccccccccccccccccccaaaggcucuuuucagagccaccagaauu

SEQ ID NO: 194 - RNA, 135 nt, Artificial Sequence
  mRNA 3'-end N6-histoneSL-A100-N5
auuaaucaaaggcucuuuucagagccaccaaaaaaaaaaaaaaaaaaaaaaaaaaaaaaaaaaaaaaaaaaaaaaaaaaaaaaaaaaaaaaaaaaaaaaaaaaaaaaaaaaaaaaaaaaaaaaaaaaaaagaauu

SEQ ID NO: 195 - RNA, 135 nt, Artificial Sequence
  mRNA 3'-end N6-histoneSL-A100-N5
agaucucaaaggcucuuuucagagccaccaaaaaaaaaaaaaaaaaaaaaaaaaaaaaaaaaaaaaaaaaaaaaaaaaaaaaaaaaaaaaaaaaaaaaaaaaaaaaaaaaaaaaaaaaaaaaaaaaaaaagaauu

SEQ ID NO: 196 - RNA, 99 nt, Artificial Sequence
  mRNA 3'-end N6-histoneSL-A64-N5
auuaaucaaaggcucuuuucagagccaccaaaaaaaaaaaaaaaaaaaaaaaaaaaaaaaaaaaaaaaaaaaaaaaaaaaaaaaaaaaaaaaaagaauu

SEQ ID NO: 197 - RNA, 99 nt, Artificial Sequence
  mRNA 3'-end N6-histoneSL-A64-N5
agaucucaaaggcucuuuucagagccaccaaaaaaaaaaaaaaaaaaaaaaaaaaaaaaaaaaaaaaaaaaaaaaaaaaaaaaaaaaaaaaaaagaauu

SEQ ID NO: 198 - RNA, 111 nt, Artificial Sequence
  mRNA 3'-end N6-A100-N5
auuaauaaaaaaaaaaaaaaaaaaaaaaaaaaaaaaaaaaaaaaaaaaaaaaaaaaaaaaaaaaaaaaaaaaaaaaaaaaaaaaaaaaaaaaaaaaaaaaaaaaaagaauu

SEQ ID NO: 199 - RNA, 111 nt, Artificial Sequence
  mRNA 3'-end N6-A100-N5
agaucuaaaaaaaaaaaaaaaaaaaaaaaaaaaaaaaaaaaaaaaaaaaaaaaaaaaaaaaaaaaaaaaaaaaaaaaaaaaaaaaaaaaaaaaaaaaaaaaaaaaagaauu

SEQ ID NO: 200 - RNA, 75 nt, Artificial Sequence
  mRNA 3'-end N6-A64-N5
auuaauaaaaaaaaaaaaaaaaaaaaaaaaaaaaaaaaaaaaaaaaaaaaaaaaaaaaaaaaaaaaaaaagaauu

SEQ ID NO: 201 - RNA, 75 nt, Artificial Sequence
  mRNA 3'-end N6-A64-N5
agaucuaaaaaaaaaaaaaaaaaaaaaaaaaaaaaaaaaaaaaaaaaaaaaaaaaaaaaaaaaaaaaaaagaauu

SEQ ID NO: 202 - RNA, 130 nt, Artificial Sequence
  mRNA 3'-end N6-histoneSL-A100
auuaaucaaaggcucuuuucagagccaccaaaaaaaaaaaaaaaaaaaaaaaaaaaaaaaaaaaaaaaaaaaaaaaaaaaaaaaaaaaaaaaaaaaaaaaaaaaaaaaaaaaaaaaaaaaaaaaaaaaaa

SEQ ID NO: 203 - RNA, 130 nt, Artificial Sequence
  mRNA 3'-end N6-histoneSL-A100
agaucucaaaggcucuuuucagagccaccaaaaaaaaaaaaaaaaaaaaaaaaaaaaaaaaaaaaaaaaaaaaaaaaaaaaaaaaaaaaaaaaaaaaaaaaaaaaaaaaaaaaaaaaaaaaaaaaaaaaa

SEQ ID NO: 204 - RNA, 94 nt, Artificial Sequence
  mRNA 3'-end N6-histoneSL-A64
auuaaucaaaggcucuuuucagagccaccaaaaaaaaaaaaaaaaaaaaaaaaaaaaaaaaaaaaaaaaaaaaaaaaaaaaaaaaaaaaaaaaa

SEQ ID NO: 205 - RNA, 94 nt, Artificial Sequence
  mRNA 3'-end N6-histoneSL-A64
agaucucaaaggcucuuuucagagccaccaaaaaaaaaaaaaaaaaaaaaaaaaaaaaaaaaaaaaaaaaaaaaaaaaaaaaaaaaaaaaaaaa

SEQ ID NO: 206 - RNA, 106 nt, Artificial Sequence
  mRNA 3'-end N6-A100
auuaauaaaaaaaaaaaaaaaaaaaaaaaaaaaaaaaaaaaaaaaaaaaaaaaaaaaaaaaaaaaaaaaaaaaaaaaaaaaaaaaaaaaaaaaaaaaaaaaaaaaa

SEQ ID NO: 207 - RNA, 106 nt, Artificial Sequence
  mRNA 3'-end N6-A100
agaucuaaaaaaaaaaaaaaaaaaaaaaaaaaaaaaaaaaaaaaaaaaaaaaaaaaaaaaaaaaaaaaaaaaaaaaaaaaaaaaaaaaaaaaaaaaaaaaaaaaaa

SEQ ID NO: 208 - RNA, 70 nt, Artificial Sequence
  mRNA 3'-end N6-A64
auuaauaaaaaaaaaaaaaaaaaaaaaaaaaaaaaaaaaaaaaaaaaaaaaaaaaaaaaaaaaaaaaaaa

SEQ ID NO: 209 - RNA, 70 nt, Artificial Sequence
  mRNA 3'-end N6-A64
agaucuaaaaaaaaaaaaaaaaaaaaaaaaaaaaaaaaaaaaaaaaaaaaaaaaaaaaaaaaaaaaaaaa

SEQ ID NO: 210 - RNA, 99 nt, Artificial Sequence
  mRNA 3'-end N6-A64-histoneSL-N5
auuaauaaaaaaaaaaaaaaaaaaaaaaaaaaaaaaaaaaaaaaaaaaaaaaaaaaaaaaaaaaaaaaaacaaaggcucuuuucagagccaccagaauu

SEQ ID NO: 211 - RNA, 99 nt, Artificial Sequence
  mRNA 3'-end N6-A64-histoneSL-N5
agaucuaaaaaaaaaaaaaaaaaaaaaaaaaaaaaaaaaaaaaaaaaaaaaaaaaaaaaaaaaaaaaaaacaaaggcucuuuucagagccaccagaauu

SEQ ID NO: 212 - RNA, 110 nt, Artificial Sequence
  mRNA 3'-end N12-A64-N5-histoneSL-N5
auuaauagaucuaaaaaaaaaaaaaaaaaaaaaaaaaaaaaaaaaaaaaaaaaaaaaaaaaaaaaaaaaaaaaaaaugcaucaaaggcucuuuucagagccaccagaauu

SEQ ID NO: 213 - RNA, 110 nt, Artificial Sequence; identical to SEQ ID NO: 212
  mRNA 3'-end N12-A64-N5-histoneSL-N5

SEQ ID NO: 214 - RNA, 99 nt, Artificial Sequence
  mRNA 3'-end A75-histoneSL
aaaaaaaaaaaaaaaaaaaaaaaaaaaaaaaaaaaaaaaaaaaaaaaaaaaaaaaaaaaaaaaaaaaaaaaaaaacaaaggcucuuuucagagccacca

SEQ ID NO: 215 - RNA, 102 nt, Artificial Sequence
  mRNA 3'-end U3-A75-histoneSL
uuuaaaaaaaaaaaaaaaaaaaaaaaaaaaaaaaaaaaaaaaaaaaaaaaaaaaaaaaaaaaaaaaaaaaaaaaaaaacaaaggcucuuuucagagccacca

SEQ ID NO: 216 - RNA, 178 nt, Artificial Sequence
  mRNA 3'-end A154-histoneSL
aaaaaaaaaaaaaaaaaaaaaaaaaaaaaaaaaaaaaaaaaaaaaaaaaaaaaaaaaaaaaaaaaaaaaaaaaaaaaaaaaaaaaaaaaaaaaaaaaaaaaaaaaaaaaaaaaaaaaaaaaaaaaaaaaaaaaaaaaaaaaaaaaaaaaaaaaacaaaggcucuuuucagagccacca

SEQ ID NO: 217 - RNA, 181 nt, Artificial Sequence
  mRNA 3'-end U3-A154-histoneSL
uuuaaaaaaaaaaaaaaaaaaaaaaaaaaaaaaaaaaaaaaaaaaaaaaaaaaaaaaaaaaaaaaaaaaaaaaaaaaaaaaaaaaaaaaaaaaaaaaaaaaaaaaaaaaaaaaaaaaaaaaaaaaaaaaaaaaaaaaaaaaaaaaaaaaaaaaaaaacaaaggcucuuuucagagccacca

SEQ ID NO: 218 - RNA, 101 nt, Artificial Sequence
  mRNA 3'-end N2-A75-histoneSL
agaaaaaaaaaaaaaaaaaaaaaaaaaaaaaaaaaaaaaaaaaaaaaaaaaaaaaaaaaaaaaaaaaaaaaaaaaaacaaaggcucuuuucagagccacca

SEQ ID NO: 219 - RNA, 99 nt, Artificial Sequence
  mRNA 3'-end histoneSL-A75
caaaggcucuuuucagagccaccaaaaaaaaaaaaaaaaaaaaaaaaaaaaaaaaaaaaaaaaaaaaaaaaaaaaaaaaaaaaaaaaaaaaaaaaaaaa

SEQ ID NO: 220 - RNA, 170 nt, Artificial Sequence
  mRNA 3'-end histoneSL-A146
caaaggcucuuuucagagccaccaaaaaaaaaaaaaaaaaaaaaaaaaaaaaaaaaaaaaaaaaaaaaaaaaaaaaaaaaaaaaaaaaaaaaaaaaaaaaaaaaaaaaaaaaaaaaaaaaaaaaaaaaaaaaaaaaaaaaaaaaaaaaaaaaaaaaaaaaaaaaaaaaaa

SEQ ID NO: 221 - RNA, 136 nt, Artificial Sequence
  mRNA 3'-end N8-A64-N5-C30-histoneSL-N5
agauuaauaaaaaaaaaaaaaaaaaaaaaaaaaaaaaaaaaaaaaaaaaaaaaaaaaaaaaaaaaaaaaaaaugcaucccccccccccccccccccccccccccccccaaaggcucuuuucagagccaccagaauu

SEQ ID NO: 222 - RNA, 131 nt, Artificial Sequence
  mRNA 3'-end N8-A64-N5-C30-histoneSL
agauuaauaaaaaaaaaaaaaaaaaaaaaaaaaaaaaaaaaaaaaaaaaaaaaaaaaaaaaaaaaaaaaaaaugcaucccccccccccccccccccccccccccccccaaaggcucuuuucagagccacca

SEQ ID NO: 223 - RNA, 105 nt, Artificial Sequence
  mRNA 3'-end N8-A64-N5-C4-histoneSL
agauuaauaaaaaaaaaaaaaaaaaaaaaaaaaaaaaaaaaaaaaaaaaaaaaaaaaaaaaaaaaaaaaaaaugcaucccccaaaggcucuuuucagagccacca

SEQ ID NO: 224 - RNA, 115 nt, Artificial Sequence
  mRNA 3'-end N8-A64-N5-C14-histoneSL
agauuaauaaaaaaaaaaaaaaaaaaaaaaaaaaaaaaaaaaaaaaaaaaaaaaaaaaaaaaaaaaaaaaaaugcaucccccccccccccccaaaggcucuuuucagagccacca

SEQ ID NO: 225 - RNA, 129 nt, Artificial Sequence
  mRNA 3'-end N6-A64-N5-C30-histoneSL
agaucuaaaaaaaaaaaaaaaaaaaaaaaaaaaaaaaaaaaaaaaaaaaaaaaaaaaaaaaaaaaaaaaaugcaucccccccccccccccccccccccccccccccaaaggcucuuuucagagccacca

SEQ ID NO: 226 - RNA, 103 nt, Artificial Sequence
  mRNA 3'-end N6-A64-N5-C4-histoneSL
agaucuaaaaaaaaaaaaaaaaaaaaaaaaaaaaaaaaaaaaaaaaaaaaaaaaaaaaaaaaaaaaaaaaugcaucccccaaaggcucuuuucagagccacca

SEQ ID NO: 227 - RNA, 113 nt, Artificial Sequence
  mRNA 3'-end N6-A64-N5-C14-histoneSL
agaucuaaaaaaaaaaaaaaaaaaaaaaaaaaaaaaaaaaaaaaaaaaaaaaaaaaaaaaaaaaaaaaaaugcaucccccccccccccccaaaggcucuuuucagagccacca

SEQ ID NO: 228 - RNA, 123 nt, Artificial Sequence
  mRNA 3'-end A64-N5-C30-histoneSL
aaaaaaaaaaaaaaaaaaaaaaaaaaaaaaaaaaaaaaaaaaaaaaaaaaaaaaaaaaaaaaaaugcaucccccccccccccccccccccccccccccccaaaggcucuuuucagagccacca

SEQ ID NO: 229 - RNA, 97 nt, Artificial Sequence
  mRNA 3'-end A64-N5-C4-histoneSL
aaaaaaaaaaaaaaaaaaaaaaaaaaaaaaaaaaaaaaaaaaaaaaaaaaaaaaaaaaaaaaaaugcaucccccaaaggcucuuuucagagccacca

SEQ ID NO: 230 - RNA, 107 nt, Artificial Sequence
  mRNA 3'-end A64-N5-C14-histoneSL
aaaaaaaaaaaaaaaaaaaaaaaaaaaaaaaaaaaaaaaaaaaaaaaaaaaaaaaaaaaaaaaaugcaucccccccccccccccaaaggcucuuuucagagccacca

SEQ ID NO: 231 - DNA, 62 bp, Artificial Sequence
  HSD17B4 5'-UTR
gtcccgcagtcggcgtccagcggctctgcttgttcgtgtgtgtgtcgttgcaggccttattc

SEQ ID NO: 232 - RNA, 62 nt, Artificial Sequence
  HSD17B4 5'-UTR
gucccgcagucggcguccagcggcucugcuuguucgugugugugucguugcaggccuuauuc

SEQ ID NO: 233 - DNA, 42 bp, Artificial Sequence
  ASAH1 5'-UTR
gcctctgctggagtccggggagtggcgttggctgctagagcg

SEQ ID NO: 234 - RNA, 42 nt, Artificial Sequence
  ASAH1 5'-UTR
gccucugcuggaguccggggaguggcguuggcugcuagagcg

SEQ ID NO: 235 - DNA, 75 bp, Artificial Sequence
  ATP5A1 5'-UTR
gcggctcggccattttgtcccagtcagtccggaggctgcggctgcagaagtaccgcctgcggagtaactgcaaag

SEQ ID NO: 236 - RNA, 75 nt, Artificial Sequence
  ATP5A1 5'-UTR
gcggcucggccauuuugucccagucaguccggaggcugcggcugcagaaguaccgccugcggaguaacugcaaag

SEQ ID NO: 237 - DNA, 54 bp, Artificial Sequence
  Mp68_(2010107E04Rik) 5'-UTR
ctttcccattctgtagcagaatttggtgttgcctgtggtcttggtcccgcggag

SEQ ID NO: 238 - RNA, 54 nt, Artificial Sequence
  Mp68_(2010107E04Rik) 5'-UTR
cuuucccauucuguagcagaauuugguguugccuguggucuuggucccgcggag

SEQ ID NO: 239 - DNA, 81 bp, Artificial Sequence
  Ndufa4 5'-UTR
gtccgctcagccaggttgcagaagcggcttagcgtgtgtcctaatcttctctctgcgtgtaggtaggcctgtgccgcaaac

SEQ ID NO: 240 - RNA, 81 nt, Artificial Sequence
  Ndufa4 5'-UTR
guccgcucagccagguugcagaagcggcuuagcguguguccuaaucuucucucugcguguagguaggccugugccgcaaac

SEQ ID NO: 241 - DNA, 108 bp, Artificial Sequence
  Nosip 5'-UTR
ctcctgtcgggcggaagtaggaggagtagagtttaaaaacagtactctttttccggttcgggacgtagttgaagcaacgacaagccggataaccgctcttgagacagg

SEQ ID NO: 242 - RNA, 108 nt, Artificial Sequence
  Nosip 5'-UTR
cuccugucgggcggaaguaggaggaguagaguuuaaaaacaguacucuuuuuccgguucgggacguaguugaagcaacgacaagccggauaaccgcucuugagacagg

SEQ ID NO: 243 - DNA, 84 bp, Artificial Sequence
  Rpl31 5'-UTR
cccgtgacccggaagttgtacggctacgcgactttccctcccacaaaccctcgcgcccttcctttcctacttgggcccggcaga

SEQ ID NO: 244 - RNA, 84 nt, Artificial Sequence
  Rpl31 5'-UTR
cccgugacccggaaguuguacggcuacgcgacuuucccucccacaaacccucgcgcccuuccuuuccuacuugggcccggcaga

SEQ ID NO: 245 - DNA, 159 bp, Artificial Sequence
  Slc7a3 5'-UTR
gggcgcttggcttgcaaggaccctgagctgcggcattgaagcacacccaacccaactcgactgaagtcagcctcactgaaccggatctgagaatcttctctctctgggcttgccagggctctccgaacctagctagcatcctcttcaattccaactaga

SEQ ID NO: 246 - RNA, 159 nt, Artificial Sequence
  Slc7a3 5'-UTR
gggcgcuuggcuugcaaggacccugagcugcggcauugaagcacacccaacccaacucgacugaagucagccucacugaaccggaucugagaaucuucucucucugggcuugccagggcucuccgaaccuagcuagcauccucuucaauuccaacuaga

SEQ ID NO: 247 - DNA, 102 bp, Artificial Sequence
  TUBB4B 5'-UTR
atataagcgttggcggagcgtcggttgtagcactctgcgcgcccgctcttctgctgctgtttgtctacttcctcctgcttccccgccgccgccgccgccatc

SEQ ID NO: 248 - RNA, 102 nt, Artificial Sequence
  TUBB4B 5'-UTR
auauaagcguuggcggagcgucgguuguagcacucugcgcgcccgcucuucugcugcuguuugucuacuuccuccugcuuccccgccgccgccgccgccauc

SEQ ID NO: 249 - DNA, 222 bp, Artificial Sequence
  Ubqln2 5'-UTR
cggagacggcctgcaggacctgctctctcagccctcagccgaggcctacgccgagccgagtgcgcagccgacgaccgggaggagccgcagccttcaactctgaggtactgtgatccgcgctgcccgccgggccgccccagtccgctgctgcggcacctccttccctcgcgccctcttcgctcgccagcgccttccctgtgagcctgcgtcaccgcggccgcc

SEQ ID NO: 250 - RNA, 222 nt, Artificial Sequence
  Ubqln2 5'-UTR
cggagacggccugcaggaccugcucucucagcccucagccgaggccuacgccgagccgagugcgcagccgacgaccgggaggagccgcagccuucaacucugagguacugugauccgcgcugcccgccgggccgccccaguccgcugcugcggcaccuccuucccucgcgcccucuucgcucgccagcgccuucccugugagccugcgucaccgcggccgcc

SEQ ID NO: 251 - DNA, 42 bp, Artificial Sequence
  RPL32_(32L4,32L3) 5'-UTR
ggcgctgcctacggaggtggcagccatctccttctcggcatc

SEQ ID NO: 252 - RNA, 42 nt, Artificial Sequence
  RPL32_(32L4,32L3) 5'-UTR
ggcgcugccuacggagguggcagccaucuccuucucggcauc

SEQ ID NO: 253 - DNA, 57 bp, Artificial Sequence
  PSMB3 3'-UTR
ccctgttcccagagcccacttttttttctttttttgaaataaaatagcctgtctttc

SEQ ID NO: 254 - RNA, 57 nt, Artificial Sequence
  PSMB3 3'-UTR
cccuguucccagagcccacuuuuuuuucuuuuuuugaaauaaaauagccugucuuuc

SEQ ID NO: 255 - DNA, 121 bp, Artificial Sequence
  CASP1 3'-UTR
aataaggaaactgtatgaatgtctgtgggcaggaagtgaagagatccttctgtaaaggtttttggaattatgtctgctgaataataaacttttttgaaataataaatctggtagaaaaatg

SEQ ID NO: 256 - RNA, 121 nt, Artificial Sequence
  CASP1 3'-UTR
aauaaggaaacuguaugaaugucugugggcaggaagugaagagauccuucuguaaagguuuuuggaauuaugucugcugaauaauaaacuuuuuugaaauaauaaaucugguagaaaaaug

SEQ ID NO: 257 - DNA, 137 bp, Artificial Sequence
  COX6B1 3'-UTR
actggctgcatctccctttcctctgtcctccatccttctcccaggatggtgaagggggacctggtacccagtgatccccaccccaggatcctaaatcatgacttacctgctaataaaaactcattggaaaagtgaga

SEQ ID NO: 258 - RNA, 137 nt, Artificial Sequence
  COX6B1 3'-UTR
acuggcugcaucucccuuuccucuguccuccauccuucucccaggauggugaagggggaccugguacccagugauccccaccccaggauccuaaaucaugacuuaccugcuaauaaaaacucauuggaaaagugaga

SEQ ID NO: 259 - DNA, 353 bp, Artificial Sequence
  Gnas 3'-UTR
gaagggaacacccaaatttaattcagccttaagcacaattaattaagagtgaaacgtaattgtacaagcagttggtcacccaccatagggcatgatcaacaccgcaacctttcctttttcccccagtgattctgaaaaacccctcttcccttcagcttgcttagatgttccaaatttagtaagcttaaggcggcctacagaagaaaaagaaaaaaaaggccacaaaagttccctctcactttcagtaaataaaataaaagcagcaacagaaataaagaaataaatgaaattcaaaatgaaataaatattgtgttgtgcagcattaaaaaatcaataaaaattaaaaatgagca

SEQ ID NO: 260 - RNA, 353 nt, Artificial Sequence
  Gnas 3'-UTR
gaagggaacacccaaauuuaauucagccuuaagcacaauuaauuaagagugaaacguaauuguacaagcaguuggucacccaccauagggcaugaucaacaccgcaaccuuuccuuuuucccccagugauucugaaaaaccccucuucccuucagcuugcuuagauguuccaaauuuaguaagcuuaaggcggccuacagaagaaaaagaaaaaaaaggccacaaaaguucccucucacuuucaguaaauaaaauaaaagcagcaacagaaauaaagaaauaaaugaaauucaaaaugaaauaaauauuguguugugcagcauuaaaaaaucaauaaaaauuaaaaaugagca

SEQ ID NO: 261 - DNA, 133 bp, Artificial Sequence
  Ndufa1 3'-UTR
ggaagcattttcctggctgattaaaagaaattactcagctatggtcatctgttcctgttagaaggctatgcagcatattatatactatgcgcatgttatgaaatgcataataaaaaattttaaaaaatctaaa

SEQ ID NO: 262 - RNA, 133 nt, Artificial Sequence
  Ndufa1 3'-UTR
ggaagcauuuuccuggcugauuaaaagaaauuacucagcuauggucaucuguuccuguuagaaggcuaugcagcauauuauauacuaugcgcauguuaugaaaugcauaauaaaaaauuuuaaaaaaucuaaa

SEQ ID NO: 263 - DNA, 70 bp, Artificial Sequence
  RPS9 3'-UTR
gtccacctgtccctcctgggctgctggattgtctcgttttcctgccaaataaacaggatcagcgctttac

SEQ ID NO: 264 - RNA, 70 nt, Artificial Sequence
  RPS9 3'-UTR
guccaccugucccuccugggcugcuggauugucucguuuuccugccaaauaaacaggaucagcgcuuuac

SEQ ID NO: 265 - DNA, 187 bp, Artificial Sequence
  ALB7 3'-UTR
gcatcacatttaaaagcatctcagcctaccatgagaataagagaaagaaaatgaagatcaatagcttattcatctctttttctttttcgttggtgtaaagccaacaccctgtctaaaaaacataaatttctttaatcattttgcctcttttctctgtgcttcaattaataaaaaatggaaagaacct

SEQ ID NO: 266 - RNA, 187 nt, Artificial Sequence
  ALB7 3'-UTR
gcaucacauuuaaaagcaucucagccuaccaugagaauaagagaaagaaaaugaagaucaauagcuuauucaucucuuuuucuuuuucguugguguaaagccaacacccugucuaaaaaacauaaauuucuuuaaucauuuugccucuuuucucugugcuucaauuaauaaaaaauggaaagaaccu

SEQ ID NO: 267 - DNA, 44 bp, Artificial Sequence
  muag 3'-UTR
gcccgatgggcctcccaacgggccctcctcccctccttgcaccg

SEQ ID NO: 268 - RNA, 44 nt, Artificial Sequence
  muag 3'-UTR
gcccgaugggccucccaacgggcccuccuccccuccuugcaccg

SEQ ID NO: 269 - protein, 14 aa, Artificial Sequence
  carrier peptide CR12C
CRRRRRRRRRRRRC

SEQ ID NO: 270 - protein, 13 aa, Artificial Sequence
  carrier peptide CR12
CRRRRRRRRRRRR

SEQ ID NO: 271 - protein, 14 aa, Artificial Sequence
  carrier peptide WR12C
WRRRRRRRRRRRRC

SEQ ID NO: 272 - protein, 18 aa, Artificial Sequence
  carrier peptide CH6R4H6C
CHHHHHHRRRRHHHHHHC

SEQ ID NO: 273 - protein, 18 aa, Artificial Sequence
  carrier peptide CGH5R4H5GC
CGHHHHHRRRRHHHHHGC

SEQ ID NO: 274 - protein, 1273 aa, Artificial Sequence; identical to SEQ ID NO: 1
  SARS-CoV-2/Wuhan/WIV05/2019__EPI_ISL_402128 spike protein (1-1273)

SEQ ID NO: 275 - protein, 1269 aa, Artificial Sequence; identical to SEQ ID NO: 2
  SARS-CoV-2/bat/Yunnan/RaTG13/2013__EPI_ISL_402131 spike protein (1-1269)

SEQ ID NO: 276 - protein, 1273 aa, Artificial Sequence; identical to SEQ ID NO: 3
  SARS-CoV-2/Wuhan/HBCDC-HB-01/2019__EPI_ISL_402132 spike protein (1-1273)

SEQ ID NO: 277 - protein, 1273 aa, Artificial Sequence; identical to SEQ ID NO: 4
  SARS-CoV-2/Guangdong/20SF028/2020__EPI_ISL_403936 spike protein (1-1273)

SEQ ID NO: 278 - protein, 1273 aa, Artificial Sequence; identical to SEQ ID NO: 5
  SARS-CoV-2/Shenzhen/SZTH-001/2020__EPI_ISL_406592 spike protein (1-1273)

SEQ ID NO: 279 - protein, 1273 aa, Artificial Sequence; identical to SEQ ID NO: 6
  SARS-CoV-2/Shenzhen/SZTH-004/2020__EPI_ISL_406595 spike protein (1-1273)

SEQ ID NO: 280 - protein, 1273 aa, Artificial Sequence; identical to SEQ ID NO: 7
  SARS-CoV-2/France/IDF0372/2020__EPI_ISL_406596 spike protein (1-1273)

SEQ ID NO: 281 - protein, 1273 aa, Artificial Sequence; identical to SEQ ID NO: 8
  SARS-CoV-2/Australia/VIC01/2020__EPI_ISL_406844 spike protein (1-1273)

SEQ ID NO: 282 - protein, 1273 aa, Artificial Sequence; identical to SEQ ID NO: 9
  SARS-CoV-2/Germany/BavPat1/2020__EPI_ISL_406862 spike protein (1-1273)

SEQ ID NO: 283 - protein, 1273 aa, Artificial Sequence
  SARS-CoV-2/Wuhan/HBCDC-HB-02/2020__EPI_ISL_412978 spike protein (1-1273)
MFVFLVLLPLVSSQCVNLTTRTQLPPAYTNSFTRGVYYPDKVFRSSVLHSTQDLFLPFFSNVTWFHAIHVSGTNGTKRFDNPVLPFNDGVYFASTEKSNIIRGWIFGTTLDSKTQSLLIVNNATNVVIKVCEFQFCNDPFLGVYYHKNNKSWMESEFRVYSSANNCTFEYVSQPFLMDLEGKQGNFKNLREFVFKNIDGYFKIYSKHTPINLVRDLPQGFSALEPLVDLPIGINITRFQTLLALHRSYLTPGDSSSGWTAGAAAYYVGYLQPRTFLLKYNENGTITDAVDCALDPLSETKCTLKSFTVEKGIYQTSNFRVQPTESIVRFPNITNLCPFGEVFNATRFASVYAWNRKRISNCVADYSVLYNSASFSTFKCYGVSPTKLNDLCFTNVYADSFVIRGDEVRQIAPGQTGKIADYNYKLPDDFTGCVIAWNSNNLDSKVGGNYNYLYRLFRKSNLKPFERDISTEIYQAGSTPCNGVEGFNCYFPLQSYGFQPTNGVGYQPYRVVVLSFELLHAPATVCGPKKSTNLVKNKCVNFNFNGLTGTGVLTESNKKFLPFQQFGRDIADTTDAVRDPQTLEILDITPCSFGGVSVITPGTNTSNQVAVLYQDVNCTEVPVAIHADQLTPTWRVYSTGSNVFQTRAGCLIGAEHVNNSYECDIPIGAGICASYQTQTNSPRRARSVASQSIIAYTMSLGAENSVAYSNNSIAIPTNFTISVTTEILPVSMTKTSVDCTMYICGDSTECSNFLLQYGSFCTQLNRALTGIAVEQDKNTQEVFAQVKQIYKTPPIKDFGGFNFSQILPDPSKPSKRSFIEDLLFNKVTLADAGFIKQYGDCLGDIAARDLICAQKFNGLTVLPPLLTDEMIAQYTSALLAGTITSGWTFGAGAALQIPFAMQMAYRFNGIGVTQNVLYENQKLIANQFNSAIGKIQDSLSSTASALGKLQDVVNQNAQALNTLVKQLSSNFGAISSVLNDILSRLDKVEAEVQIDRLITGRLQSLQTYVTQQLIRAAEIRASANLAATKMSECVLGQSKRVDFCGKGYHLMSFPQSAPHGVVFLHVTYVPAQEKNFTTAPAICHDGKAHFPREGVFVSNGTHWFVTQRNFYEPQIITTDNTFVSGNCDVVIGIVNNTVYDPLQPELDSFKEELDKYFKNHTSPDVDLGDISGINASVVNIQKEIDRLNEVAKNLNESLIDLQELGKYEQYIKWPWYIWLGFIAGLIAIVMVTIMLCCMTSCCSCLKGCCSCGSCCKFDEDDSEPVLKGVKLHYT

SEQ ID NO: 284 - protein, 1273 aa, Artificial Sequence
  SARS-CoV-2/Australia/QLD02/2020__EPI_ISL_407896 spike protein (1-1273)
MFVFLVLLPLVSSQCVNLTTRTQLPPAYTNSFTRGVYYPDKVFRSSVLHSTQDLFLPFFSNVTWFHAIHVSGTNGTKRFDNPVLPFNDGVYFASTEKSNIIRGWIFGTTLDSKTQSLLIVNNATNVVIKVCEFQFCNDPFLGVYYHKNNKSWMESEFRVYSSANNCTFEYVSQPFLMDLEGKQGNFKNLREFVFKNIDGYFKIYSKHTPINLVRDLPQGFSALEPLVDLPIGINITRFQTLLALHRSYLTPGDSSSGWTAGAAAYYVGYLQPRTFLLKYNENGTITDAVDCALDPLSETKCTLKSFTVEKGIYQTSNFRVQPTESIVRFPNITNLCPFGEVFNATRFASVYAWNRKRISNCVADYSVLYNSASFSTFKCYGVSPTKLNDLCFTNVYADSFVIRGDEVRQIAPGQTGKIADYNYKLPDDFTGCVIAWNSNNLDSKVGGNYNYLYRLFRKSNLKPFERDISTEIYQAGSTPCNGVEGFNCYFPLQSYGFQPTNGVGYQPYRVVVLSFELLHAPATVCGPKKSTNLVKNKCVNFNFNGLTGTGVLTESNKKFLPFQQFGRDIADTTDAVRDPQTLEILDITPCSFGGVSVITPGTNTSNQVAVLYQDVNCTEVPVAIHADQLTPTWRVYSTGSNVFQTRAGCLIGAEHVNNSYECDIPIGAGICASYQTQTNSPRRARSVASQSIIAYTMSLGAENSVAYSNNSIAIPTNFTISVTTEILPVSMTKTSVDCTMYICGDSTECSNLLLQYGSFCTQLNRALTGIAVEQDKNTQEVFAQVKQIYKTPPIKDFGGFNFSQILPDPSKPSKRSFIEDLLFNKVTLADAGFIKQYGDCLGDIAARDLICAQKFNGLTVLPPLLTDEMIAQYTSALLAGTITSGWTFGAGAALQIPFAMQMAYRFNGIGVTQNVLYENQKLIANQFNSAIGKIQDSLSSTASALGKLQDVVNQNAQALNTLVKQLSSNFGAISSVLNDILSRLDKVEAEVQIDRLITGRLQSLQTYVTQQLIRAAEIRASANLAATKMSECVLGQSKRVDFCGKGYHLMSFPQSAPHGVVFLHVTYVPAQEKNFTTAPAICHDGKAHFPREGVFVSNGTHWFVTQRNFYEPQIITTDNTFVSGNCDVVIGIVNNTVYDPLQLELDSFKEELDKYFKNHTSPDVDLGDISGINASVVNIQKEIDRLNEVAKNLNESLIDLQELGKYEQYIKWPWYIWLGFIAGLIAIVMVTIMLCCMTSCCSCLKGCCSCGSCCKFDEDDSEPVLKGVKLHYT

SEQ ID NO: 285 - protein, 1273 aa, Artificial Sequence
  SARS-CoV-2/India/1-31/2020__EPI_ISL_413523 spike protein (1-1273)
MFVFLVLLPLVSSQCVNLTTRTQLPPAYTNSFTRGVYYPDKVFRSSVLHSTQDLFLPFFSNVTWFHAIHVSGTNGTKRFDNPVLPFNDGVYFASTEKSNIIRGWIFGTTLDSKTQSLLIVNNATNVVIKVCEFQFCNDPFLGVYYHKNNKSWMESEFRVYSSANNCTFEYVSQPFLMDLEGKQGNFKNLREFVFKNIDGYFKIYSKHTPINLVRDLPQGFSALEPLVDLPIGINITRFQTLLALHRSYLTPGDSSSGWTAGAAAYYVGYLQPRTFLLKYNENGTITDAVDCALDPLSETKCTLKSFTVEKGIYQTSNFRVQPTESIVRFPNITNLCPFGEVFNATRFASVYAWNRKRISNCVADYSVLYNSASFSTFKCYGVSPTKLNDLCFTNVYADSFVIRGDEVRQIAPGQTGKIADYNYKLPDDFTGCVIAWNSNNLDSKVGGNYNYLYRLFRKSNLKPFERDISTEIYQAGSTPCNGVEGFNCYFPLQSYGFQPTNGVGYQPYRVVVLSFELLHAPATVCGPKKSTNLVKNKCVNFNFNGLTGTGVLTESNKKFLPFQQFGRDIADTTDAVRDPQTLEILDITPCSFGGVSVITPGTNTSNQVAVLYQDVNCTEVPVAIHADQLTPTWRVYSTGSNVFQTRAGCLIGAEHVNNSYECDIPIGAGICASYQTQTNSPRRARSVASQSIIAYTMSLGAENSVAYSNNSIAIPTNFTISVTTEILPVSMTKTSVDCTMYICGDSTECSNLLLQYGSFCTQLNRALTGIAVEQDKNTQEVFAQVKQIYKTPPIKDFGGFNFSQILPDPSKPSKRSFIEDLLFNKVTLADAGFIKQYGDCLGDIAARDLICAQKFNGLTVLPPLLTDEMIAQYTSALLAGTITSGWTFGAGAALQIPFAMQMAYRFNGIGVTQNVLYENQKLIANQFNSVIGKIQDSLSSTASALGKLQDVVNQNAQALNTLVKQLSSNFGAISSVLNDILSRLDKVEAEVQIDRLITGRLQSLQTYVTQQLIRAAEIRASANLAATKMSECVLGQSKRVDFCGKGYHLMSFPQSAPHGVVFLHVTYVPAQEKNFTTAPAICHDGKAHFPREGVFVSNGTHWFVTQRNFYEPQIITTDNTFVSGNCDVVIGIVNNTVYDPLQPELDSFKEELDKYFKNHTSPDVDLGDISGINASVVNIQKEIDRLNEVAKNLNESLIDLQELGKYEQYIKWPWYIWLGFIAGLIAIVMVTIMLCCMTSCCSCLKGCCSCGSCCKFDEDDSEPVLKGVKLHYT

SEQ ID NO: 286 - protein, 1273 aa, Artificial Sequence
  SARS-CoV-2/Guangdong/GD2020087-P0008/2020__EPI_ISL_413863 spike protein (1-1273)
MFVFLVLLPLVSSQCVNLTTRTQLPPAYTNSFTRGVYYPDKVFRSSVLHSTQDLFLPFFSNVTWFHAIHVSGTNGTKRFDNPVLPFNDGVYFASTEKSNIIRGWIFGTTLDSKTQSLLIVNNATNVVIKVCEFQFCNDPFLGVYYHKNNKSWMESEFRVYSSANNCTFEYVSQPFLMDLEGKQGNFKNLREFVFKNIDGYFKIYSKHTPINLVRDLPQGFSALEPLVDLPIGINITRFQTLLALHRSYLTPGDSSSGWTAGAAAYYVGYLQPRTFLLKYNENGTITDAVDCALDPLSETKCTLKSFTVEKGIYQTSNFRVQPTESIVRFPNITNLCPFGEVFNATRFASVYAWNRKRISNCVADYSVLYNSASFSTFKCYGVSPTKLNDLCFTNVYADSFVIRGDEVREIAPGQTGKIADYNYKLPDDFTGCVIAWNSNNLDSKVGGNYNYLYRLFRKSNLKPFERDISTEIYQAGSTPCNGVEGFNCYFPLQSYGFQPTNGVGYQPYRVVVLSFELLHAPATVCGPKKSTNLVKNKCVNFNFNGLTGTGVLTESNKKFLPFQQFGRDIADTTDAVRDPQTLEILDITPCSFGGVSVITPGTNTSNQVAVLYQDVNCTEVPVAIHADQLTPTWRVYSTGSNVFQTRAGCLIGAEHVNNSYECDIPIGAGICASYQTQTNSPRRARSVASQSIIAYTMSLGAENSVAYSNNSIAIPTNFTISVTTEILPVSMTKTSVDCTMYICGDSTECSNLLLQYGSFCTQLNRALTGIAVEQDKNTQEVFAQVKQIYKTPPIKDFGGFNFSQILPDPSKPSKRSFIEDLLFNKVTLADAGFIKQYGDCLGDIAARDLICAQKFNGLTVLPPLLTDEMIAQYTSALLAGTITSGWTFGAGAALQIPFAMQMAYRFNGIGVTQNVLYENQKLIANQFNSAIGKIQDSLSSTASALGKLQDVVNQNAQALNTLVKQLSSNFGAISSVLNDILSRLDKVEAEVQIDRLITGRLQSLQTYVTQQLIRAAEIRASANLAATKMSECVLGQSKRVDFCGKGYHLMSFPQSAPHGVVFLHVTYVPAQEKNFTTAPAICHDGKAHFPREGVFVSNGTHWFVTQRNFYEPQIITTDNTFVSGNCDVVIGIVNNTVYDPLQPELDSFKEELDKYFKNHTSPDVDLGDISGINASVVNIQKEIDRLNEVAKNLNESLIDLQELGKYEQYIKWPWYIWLGFIAGLIAIVMVTIMLCCMTSCCSCLKGCCSCGSCCKFDEDDSEPVLKGVKLHYT

SEQ ID NO: 287 - protein, 1273 aa, Artificial Sequence
  SARS-CoV-2/Sweden/01/2020__EPI_ISL_411951 spike protein (1-1273)
MFVFLVLLPLVSSQCVNLTTRTQLPPAYTNSFTRGVYYPDKVFRSSVLHSTQDLFLPFFSNVTWFHAIHVSGTNGTKRFDNPVLPFNDGVYFASTEKSNIIRGWIFGTTLDSKTQSLLIVNNATNVVIKVCEFQFCNDPFLGVYYHKNNKSWMESEFRVYSSANNCTFEYVSQPFLMDLEGKQGNFKNLREFVFKNIDGYFKIYSKHTPINLVRDLPQGFSALEPLVDLPIGINITRFQTLLALHRSYLTPGDSSSGWTAGAAAYYVGYLQPRTFLLKYNENGTITDAVDCALDPLSETKCTLKSFTVEKGIYQTSNFRVQPTESIVRFPNITNLCPFGEVFNATRFASVYAWNRKRISNCVADYSVLYNSASFSTFKCYGVSPTKLNDLCFTNVYADSFVIRGDEVRQIAPGQTGKIADYNYKLPDDFTGCVIAWNSNNLDSKVGGNYNYLYRLFRKSNLKPFERDISTEIYQAGSTPCNGVEGFNCYFPLQSYGFQPTNGVGYQPYRVVVLSFELLHAPATVCGPKKSTNLVKNKCVNFNFNGLTGTGVLTESNKKFLPFQQFGRDIADTTDAVRDPQTLEILDITPCSFGGVSVITPGTNTSNQVAVLYQDVNCTEVPVAIHADQLTPTWRVYSTGSNVFQTRAGCLIGAEHVNNSYECDIPIGAGICASYQTQTNSPRRARSVASQSIIAYTMSLGAENSVAYSNNSIAIPTNFTISVTTEILPVSMTKTSVDCTMYICGDSTECSNLLLQYGSFCTQLNRALTGIAVEQDKNTQEVFAQVKQIYKTPPIKDCGGFNFSQILPDPSKPSKRSFIEDLLFNKVTLADAGFIKQYGDCLGDIAARDLICAQKFNGLTVLPPLLTDEMIAQYTSALLAGTITSGWTFGAGAALQIPFAMQMAYRFNGIGVTQNVLYENQKLIANQFNSAIGKIQDSLSSTASALGKLQDVVNQNAQALNTLVKQLSSNFGAISSVLNDILSRLDKVEAEVQIDRLITGRLQSLQTYVTQQLIRAAEIRASANLAATKMSECVLGQSKRVDFCGKGYHLMSFPQSAPHGVVFLHVTYVPAQEKNFTTAPAICHDGKAHFPREGVFVSNGTHWFVTQRNFYEPQIITTDNTFVSGNCDVVIGIVNNTVYDPLQPELDSFKEELDKYFKNHTSPDVDLGDISGINASVVNIQKEIDRLNEVAKNLNESLIDLQELGKYEQYIKWPWYIWLGFIAGLIAIVMVTIMLCCMTSCCSCLKGCCSCGSCCKFDEDDSEPVLKGVKLHYT

SEQ ID NO: 288 - protein, 1273 aa, Artificial Sequence
  SARS-CoV-2/Tianmen/HBCDC-HB-07/2020__EPI_ISL_412983 spike protein (1-1273)
MFVFLVLLPLVSSQCVNLTTRTQLPPAYTNSFTRGVYYPDKVFRSSVLHSTQDLFLPFFSNVTWFHAIHVSGTNGTKRFDNPVLPFNDGVYFASTEKSNIIRGWIFGTTLDSKTQSLLIVNNATNVVIKVCEFQFCNDPFLGVYYHKNNKSWMESEFRVYSSANNCTFEYVSQPFLMDLEGKQGNFKNLREFVFKNIDGYFKIYSKHTPINLVRDLPQGFSALEPLVDLPIGINITRFQTLLALHRSYLTPGDSSSGWTAGAAAYYVGYLQPRTFLLKYNENGTITDAVDCALDPLSETKCTLKSFTVEKGIYQTSNFRVQPTESIVRFPNITNLCPFGEVFNATRFASVYAWNRKRISNCVADYSVLYNSASFSTFKCYGVSPTKLNDLCFTNVYADSFVIRGDEVRQIAPGQTGKIADYNYKLPDDFTGCVIAWNSNNLDSKVGGNYNYLYRLFRKSNLKPFERDISTEIYQAGSTPCNGVEGFNCYFPLQSYGFQPTNGVGYQPYRVVVLSFELLHAPATVCGPKKSTNLVKNKCVNFNFNGLTGTGVLTESNKKFLPFQQFGRDIADTTDAVRDPQTLEILDITPCSFGGVSVITPGTNTSNQVAVLYQDLNCTEVPVAIHADQLTPTWRVYSTGSNVFQTRAGCLIGAEHVNNSYECDIPIGAGICASYQTQTNSPRRARSVASQSIIAYTMSLGAENSVAYSNNSIAIPTNFTISVTTEILPVSMTKTSVDCTMYICGDSTECSNLLLQYGSFCTQLNRALTGIAVEQDKNTQEVFAQVKQIYKTPPIKDFGGFNFSQILPDPSKPSKRSFIEDLLFNKVTLADAGFIKQYGDCLGDIAARDLICAQKFNGLTVLPPLLTDEMIAQYTSALLAGTITSGWTFGAGAALQIPFAMQMAYRFNGIGVTQNVLYENQKLIANQFNSAIGKIQDSLSSTASALGKLQDVVNQNAQALNTLVKQLSSNFGAISSVLNDILSRLDKVEAEVQIDRLITGRLQSLQTYVTQQLIRAAEIRASANLAATKMSECVLGQSKRVDFCGKGYHLMSFPQSAPHGVVFLHVTYVPAQEKNFTTAPAICHDGKAHFPREGVFVSNGTHWFVTQRNFYEPQIITTDNTFVSGNCDVVIGIVNNTVYDPLQPELDSFKEELDKYFKNHTSPDVDLGDISGINASVVNIQKEIDRLNEVAKNLNESLIDLQELGKYEQYIKWPWYIWLGFIAGLIAIVMVTIMLCCMTSCCSCLKGCCSCGSCCKFDEDDSEPVLKGVKLHYT

SEQ ID NO: 289 - protein, 1273 aa, Artificial Sequence
  SARS-CoV-2/Hong Kong/case42_VM20002493/2020__EPI_ISL_414527 spike protein (1-1273)
MFVFLVLLPLVSSQCVNLTTRTQLPPAYTNSFTRGVYYPDKVFRSSVLHSTQDLFLPFFSNVTWFHAIHVSGTNGTKRFDNPVLPFNDGVYFASTEKSNIIRGWIFGTTLDSKTQSLLIVNNATNVVIKVCEFQFCNDPFLGVYYHKNNKSWMESEFRVYSSANNCTFEYVSQPFLMDLEGKQGNFKNLREFVFKNIDGYFKIYSKHTPINLVRDLPQGFSALEPLVDLPIGINITRFQTLLALHRSYLTPGDSSSGWTAGAAAYYVGYLQPRTFLLKYNENGTITDAVDCALDPLSETKCTLKSFTVEKGIYQTSNFRVQPTESIVRFPNITNLCPFGEVFNATRFASVYAWNRKRISNCVADYSVLYNSASFSTFKCYGVSPTKLNDLCFTNVYADSFVIRGDEVRQIAPGQTGKIADYNYKLPDDFTGCVIAWNSNNLDSKVGGNYNYLYRLFRKSNLKPFERDISTEIYQAGSTPCNGVEGFNCYFPLQSYGFQPTNGVGYQPYRVVVLSFELLHAPATVCGPKKSTNLVKNKCVNFNFNGLTGTGVLTESNKKFLPFQQFGRDIADTTDAVRDPQTLEILDITPCSFGGVSVITPGTNTSNQVAVLYQDVNCTEVPVAIHADQLTPTWRVYSTGSNVFQTRAGCLIGAEHVNNSYECDIPIGAGICASYQTQTNSPRRARSVASQSIIAYTMSLGAENSVAYSNNSIAIPTNFAISVTTEILPVSMTKTSVDCTMYICGDSTECSNLLLQYGSFCTQLNRALTGIAVEQDKNTQEVFAQVKQIYKTPPIKDFGGFNFSQILPDPSKPSKRSFIEDLLFNKVTLADAGFIKQYGDCLGDIAARDLICAQKFNGLTVLPPLLTDEMIAQYTSALLAGTITSGWTFGAGAALQIPFAMQMAYRFNGIGVTQNVLYENQKLIANQFNSAIGKIQDSLSSTASALGKLQDVVNQNAQALNTLVKQLSSNFGAISSVLNDILSRLDKVEAEVQIDRLITGRLQSLQTYVTQQLIRAAEIRASANLAATKMSECVLGQSKRVDFCGKGYHLMSFPQSAPHGVVFLHVTYVPAQEKNFTTAPAICHDGKAHFPREGVFVSNGTHWFVTQRNFYEPQIITTDNTFVSGNCDVVIGIVNNTVYDPLQPELDSFKEELDKYFKNHTSPDVDLGDISGINASVVNIQKEIDRLNEVAKNLNESLIDLQELGKYEQYIKWPWYIWLGFIAGLIAIVMVTIMLCCMTSCCSCLKGCCSCGSCCKFDEDDSEPVLKGVKLHYT

SEQ ID NO: 290 - protein, 1273 aa, Artificial Sequence
  SARS-CoV-2/USA/CruiseA-23/2020__EPI_ISL_414482 spike protein (1-1273)
MFVFLVLLPLVSSQCVNLTTRTQLPPAYTNSFTRGVYYPDKVFRSSVLHSTQDLFLPFFSNVTWFHAIHVSGTNGTKRFDNPVLPFNDGVYFASTEKSNIIRGWIFGTTLDSKTQSLLIVNNATNVVIKVCEFQFCNDPFLGVYYHKNNKSWMESEFRVYSSANNCTFEYVSQPFLMDLEVKQGNFKNLREFVFKNIDGYFKIYSKHTPINLVRDLPQGFSALEPLVDLPIGINITRFQTLLALHRSYLTPGDSSSGWTAGAAAYYVGYLQPRTFLLKYNENGTITDAVDCALDPLSETKCTLKSFTVEKGIYQTSNFRVQPTESIVRFPNITNLCPFGEVFNATRFASVYAWNRKRISNCVADYSVLYNSASFSTFKCYGVSPTKLNDLCFTNVYADSFVIRGDEVRQIAPGQTGKIADYNYKLPDDFTGCVIAWNSNNLDSKVGGNYNYLYRLFRKSNLKPFERDISTEIYQAGSTPCNGVEGFNCYFPLQSYGFQPTNGVGYQPYRVVVLSFELLHAPATVCGPKKSTNLVKNKCVNFNFNGLTGTGVLTESNKKFLPFQQFGRDIADTTDAVRDPQTLEILDITPCSFGGVSVITPGTNTSNQVAVLYQDVNCTEVPVAIHADQLTPTWRVYSTGSNVFQTRAGCLIGAEHVNNSYECDIPIGAGICASYQTQTNSPRRARSVASQSIIAYTMSLGAENSVAYSNNSIAIPTNFTISVTTEILPVSMTKTSVDCTMYICGDSTECSNLLLQYGSFCTQLNRALTGIAVEQDKNTQEVFAQVKQIYKTPPIKDFGGFNFSQILPDPSKPSKRSFIEDLLFNKVTLADAGFIKQYGDCLGDIAARDLICAQKFNGLTVLPPLLTDEMIAQYTSALLAGTITSGWTFGAGAALQIPFAMQMAYRFNGIGVTQNVLYENQKLIANQFNSAIGKIQDSLSSTASALGKLQDVVNQNAQALNTLVKQLSSNFGAISSVLNDILSRLDKVEAEVQIDRLITGRLQSLQTYVTQQLIRAAEIRASANLAATKMSECVLGQSKRVDFCGKGYHLMSFPQSAPHGVVFLHVTYVPAQEKNFTTAPAICHDGKAHFPREGVFVSNGTHWFVTQRNFYEPQIITTDNTFVSGNCDVVIGIVNNTVYDPLQPELDSFKEELDKYFKNHTSPDVDLGDISGINASVVNIQKEIDRLNEVAKNLNESLIDLQELGKYEQYIKWPWYIWLGFIAGLIAIVMVTIMLCCMTSCCSCLKGCCSCGSCCKFDEDDSEPVLKGVKLHYT

SEQ ID NO: 291 - protein, 1273 aa, Artificial Sequence
  SARS-CoV-2/Hong Kong/case85_VM20002868/2020__EPI_ISL_414519 spike protein (1-1273)
MFVFLVLVPLVSSQCVNLTTRTQLPPAYTNSFTRGVYYPDKVFRSSVLHSTQDLFLPFFSNVTWFHAIHVSGTNGTKRFDNPVLPFNDGVYFASTEKSNIIRGWIFGTTLDSKTQSLLIVNNATNVVIKVCEFQFCNDPFLGVYYHKNNKSWMESEFRVYSSANNCTFEYVSQPFLMDLEGKQGNFKNLREFVFKNIDGYFKIYSKHTPINLVRDLPQGFSALEPLVDLPIGINITRFQTLLALHRSYLTPGDSSSGWTAGAAAYYVGYLQPRTFLLKYNENGTITDAVDCALDPLSETKCTLKSFTVEKGIYQTSNFRVQPTESIVRFPNITNLCPFGEVFNATRFASVYAWNRKRISNCVADYSVLYNSASFSTFKCYGVSPTKLNDLCFTNVYADSFVIRGDEVRQIAPGQTGKIADYNYKLPDDFTGCVIAWNSNNLDSKVGGNYNYLYRLFRKSNLKPFERDISTEIYQAGSTPCNGVEGFNCYFPLQSYGFQPTNGVGYQPYRVVVLSFELLHAPATVCGPKKSTNLVKNKCVNFNFNGLTGTGVLTESNKKFLPFQQFGRDIADTTDAVRDPQTLEILDITPCSFGGVSVITPGTNTSNQVAVLYQDVNCTEVPVAIHADQLTPTWRVYSTGSNVFQTRAGCLIGAEHVNNSYECDIPIGAGICASYQTQTNSPRRARSVASQSIIAYTMSLGAENSVAYSNNSIAIPTNFTISVTTEILPVSMTKTSVDCTMYICGDSTECSNLLLQYGSFCTQLNRALTGIAVEQDKNTQEVFAQVKQIYKTPPIKDFGGFNFSQILPDPSKPSKRSFIEDLLFNKVTLADAGFIKQYGDCLGDIAARDLICAQKFNGLTVLPPLLTDEMIAQYTSALLAGTITSGWTFGAGAALQIPFAMQMAYRFNGIGVTQNVLYENQKLIANQFNSAIGKIQDSLSSTASALGKLQDVVNQNAQALNTLVKQLSSNFGAISSVLNDILSRLDKVEAEVQIDRLITGRLQSLQTYVTQQLIRAAEIRASANLAATKMSECVLGQSKRVDFCGKGYHLMSFPQSAPHGVVFLHVTYVPAQEKNFTTAPAICHDGKAHFPREGVFVSNGTHWFVTQRNFYEPQIITTDNTFVSGNCDVVIGIVNNTVYDPLQPELDSFKEELDKYFKNHTSPDVDLGDISGINASVVNIQKEIDRLNEVAKNLNESLIDLQELGKYEQYIKWPWYIWLGFIAGLIAIVMVTIMLCCMTSCCSCLKGCCSCGSCCKFDEDDSEPVLKGVKLHYT

SEQ ID NO: 292 - protein, 1273 aa, Artificial Sequence
  SARS-CoV-2/England/200990660/2020__EPI_ISL_414523 spike protein (1-1273)
MFVFLVLLPLVSSQCVNLTTRTQLPPAYTNSFTRGVYYPDKVFRSSVLHSTQDLFLPFFSNVTWFHAIHVSGTNGTKRFDNPVLPFNDGVYFASTEKSNIIRGWIFGTTLDSKTQSLLIVNNATNVVIKVCEFQFCNDPFLGVYYHKNNKSWMESEFRVYSSANNCTFEYVSQPFLMDLEGKQGNFKNLREFVFKNIDGYFKIYSKHTPINLVRDLPQGFSALEPLVDLPIGINITRFQTLLALHRSYLTPGDSSSGWTAGAAAYYVGYLQPRTFLLKYNENGTITDAVDCALDPLSETKCTLKSFTVEKGIYQTSNFRVQPTESIVRFPNITNLCPFGEVFNATRFASVYAWNRKRISNCVADYSVLYNSASFSTFKCYGVSPTKLNDLCFTNVYADSFVIRGDEVRQIAPGQTGKIADYNYKLPDDFTGCVIAWNSNNLDSKVGGNYNYLYRLFRKSNLKPFERDISTEIYQAGSTPCNGVEGFNCYFPLQSYGFQPTNGVGYQPYRVVVLSFELLHAPATVCGPKKSTNLVKNKCVNFNFNGLTGTGVLTESNKKFLPFQQFGRDIADTTDAVRDPQTLEILDITPCSFGGVSVITPGTNTSNQVAVLYQGVNCTEVPVAIHADQLTPTWRVYSTGSNVFQTRAGCLIGAEHVNNSYECDIPIGAGICASYQTQTNSPRRARSVASQSIIAYTMSLGAENSVAYSNNSIAIPTNFTISVTTEILPVSMTKTSVDCTMYICGDSTECSNLLLQYGSFCTQLNRALTGIAVEQDKNTQEVFAQVKQIYKTPPIKDFGGFNFSQILPDPSKPSKRSFIEDLLFNKVTLADAGFIKQYGDCLGDIAARDLICAQKFNGLTVLPPLLTDEMIAQYTSALLAGTITSGWTFGAGAALQIPFAMQMAYRFNGIGVTQNVLYENQKLIANQFNSAIGKIQDSLSSTASALGKLQDVVNQNAQALNTLVKQLSSNFGAISSVLNDILSRLDKVEAEVQIDRLITGRLQSLQTYVTQQLIRAAEIRASANLAATKMSECVLGQSKRVDFCGKGYHLMSFPQSAPHGVVFLHVTYVPAQEKNFTTAPAICHDGKAHFPREGVFVSNGTHWFVTQRNFYEPQIITTDNTFVSGNCDVVIGIVNNTVYDPLQPELDSFKEELDKYFKNHTSPDVDLGDISGINASVVNIQKEIDRLNEVAKNLNESLIDLQELGKYEQYIKWPWYIWLGFIAGLIAIVMVTIMLCCMTSCCSCLKGCCSCGSCCKFDEDDSELVLKGVKLHYT

SEQ ID NO: 293 - protein, 1273 aa, Artificial Sequence
  SARS-CoV-2/Australia/NSW09/2020__EPI_ISL_413595 spike protein (1-1273)
MFVFLVLLPLVSSQCVNLTTRTQLPPAYTNSFTRGVYYPDKVFRSSVLHSTQDLFLPFFSNVTWFHAIHVSGTNGTKRFDNPVLPFNDGVYFASTEKSNIIRGWIFGTTLDSKTQSLLIVNNATNVVIKVCEFQFCNDPFLGVYYHKNNKSWMESEFRVYSSANNCTFEYVSQPFLMDLEGKQGNFKNLREFVFKNIDGYFKIYSKHTPINLVRDLPQGFSALEPLVDLPIGINITRFQTLLALHRSYLTPGDSSSGWTAGAAAYYVGYLQPRTFLLKYNENGTITDAVDCALDPLSETKCTLKSFTVEKGIYQTSNFRVQPTESIVRFPNITNLCPFGEVFNATRFASVYAWNRKRISNCVADYSVLYNSASFSTFKCYGVSPTKLNDLCFTNVYADSFVIRGDEVRQIAPGQTGKIADYNYKLPDDFTGCVIAWNSNNLDSKVGGNYNYLYRLFRKSNLKPFERDISTEIYQAGSTPCNGVEGFNCYFPLQSYGFQPTNGVGYQPYRVVVLSFELLHAPATVCGPKKSTNLVKNKCVNFNFNGLTGTGVLTESNKKFLPFQQFGRDIADTTDAVRDPQTLEILDITPCSFGGVSVITPGTNTSNQVAVLYQDVNCTEVPVAIHADQLTPTWRVYSTGSNVFQTRAGCLIGAEHVNNSYECDIPIGAGICASYQTQTNSPRRARSVASQSIIAYTMSLGAENSVAYSNNSIAIPTNFTISVTTEILPVSMTKTSVDCTMYICGDSTECSNLLLQYGSFCTQLNRALTGIAVEQDKNTQEVFAQVKQIYKTPPIKDFGGFNFSQILPDPSKPSKRSFIEDLLFNKVTLADAGFIKQYGDCLGDIAARDLICAQKFNGLTVLPPLLTDEMIAQYTSALLAGTITSGWTFGAGAALQIPFAMQMAYRFNGIGVTQNVLYENQKLIANQFNSAIGKIQDSLSFTASALGKLQDVVNQNAQALNTLVKQLSSNFGAISSVLNDILSRLDKVEAEVQIDRLITGRLQSLQTYVTQQLIRAAEIRASANLAATKMSECVLGQSKRVDFCGKGYHLMSFPQSAPHGVVFLHVTYVPAQEKNFTTAPAICHDGKAHFPREGVFVSNGTHWFVTQRNFYEPQIITTDNTFVSGNCDVVIGIVNNTVYDPLQPELDSFKEELDKYFKNHTSPDVDLGDISGINASVVNIQKEIDRLNEVAKNLNESLIDLQELGKYEQYIKWPWYIWLGFIAGLIAIVMVTIMLCCMTSCCSCLKGCCSCGSCCKFDEDDSEPVLKGVKLHYT

SEQ ID NO: 294 - protein, 1273 aa, Artificial Sequence
  SARS-CoV-2/Australia/NSW10/2020__EPI_ISL_413596 spike protein (1-1273)
MFVFLVLLPLVSSQCVNLTTRTQLPPAYTNSFTRGVYYPDKVFRSSVLHSTQDLFLPFFSNVTWFHAIHVSGTNGTKRFDNPVLPFNDGVYFASTEKSNIIRGWIFGTTLDSKTQSLLIVNNATNVVIKVCEFQFCNDPFLGVYYHKNNKSWMESEFRVYSSANNCTFEYVSQPFLMDLEGKQGNFKNLREFVFKNIDGYFKIYSKHTPINLVRDLPQGFSALEPLVDLPIGINITRFQTLLALHRSYLTPGDSSSGWTAGAAAYYVGYLQPRTFLLKYNENGTITDAVDCALDPLSETKCTLKSFTVEKGIYQTSNFRVQPTESIVRFPNITNLCPFGEVFNATRFASVYAWNRKRISNCVADYSVLYNSASFSTFKCYGVSPTKLNDLCFTNVYADSFVIRGDEVRQIAPGQTGKIADYNYKLPDDFTGCVIAWNSNNLDSKVGGNYNYLYRLFRKSNLKPFERDISTEIYQAGSTPCNGVEGFNCYFPLQSYGFQPTNGVGYQPYRVVVLSFELLHAPATVCGPKKSTNLVKNKCVNFNFNGLTGTGVLTESNKKFLPFQQFGRDIADTTDAVRDPQTLEILDITPCSFGGVSVITPGTNTSNQVAVLYQDVNCTEVPVAIHADQLTPTWRVYSTGSNVFQTRAGCLIGAEHVNNSYECDIPIGAGICASYQTQTNSPRRARSVASQSIIAYTMSLGAENSVAYSNNSIAIPTNFTISVTTEILPVSMTKTSVDCTMYICGDSTECSNLLLQYGSFCTQLNRALTGIAVEQDKNTQEVFAQVKQIYKTPPIKDFGGFNFSQILPDPSKPSKRSFIEDLLFNKVTLADAGFIKQYGDCLGDIAARDLICAQKFNGLTVLPPLLTDEMIAQYTSALLAGTITSGWTFGAGAALQIPFAMQMAYRFNGIGVTQNVLYENQKLIANQFNSAIGKIQDSLSSTASALGKLQDVVNQNAQALNTLVKQLSSNFGAISSVLNDILSRLDKVEAEVQIDRLITGRLQSLQTYVTQQLIRAAEIRASANLAATKMSECVLGQSKRVDFCGKGYHLMSFPQSAPHGVVFLHVTYVPAQEKNFTTAPAICHDGKAHFPREGVFVSNGTHWFVTQRNFYEPQIITTDNTFVSGNCDVVIGIVNNTVYDPLQPELDSFKEELDKYFKNHTSPDVDLGDISGINASVVNIQKEIDRLNEVAKNLNESLIDLQELGKYEQYIKWPWYIWLGFIAGLIAIVMVTIMLCCMTSCCSCLKGCCSCGSCFKFDEDDSEPVLKGVKLHYT

SEQ ID NO: 295 - protein, 1273 aa, Artificial Sequence
  SARS-CoV-2/Switzerland/1000477797/2020__EPI_ISL_413023 spike protein (1-1273)
MFVFLVLLPLVSSQCVNLTTRTQLPPAYTNSFTRGVYYPDKVFRSSVLHSTQDLFLPFFSNVTWFHAIHVSGTNGTKRFDNPVLPFNDGVYFASTEKSNIIRGWIFGTTLDSKTQSLLIVNNATNVVIKVCEFQFCNDPFLGVYYHKNNKSWMESEFRVYSSANNCTFEYVSQPFLMDLEGKQGNFKNLREFVFKNIDGYFNIYSKHTPINLVRDLPQGFSALEPLVDLPIGINITRFQTLLALHRSYLTPGDSSSGWTAGAAAYYVGYLQPRTFLLKYNENGTITDAVDCALDPLSETKCTLKSFTVEKGIYQTSNFRVQPTESIVRFPNITNLCPFGEVFNATRFASVYAWNRKRISNCVADYSVLYNSASFSTFKCYGVSPTKLNDLCFTNVYADSFVIRGDEVRQIAPGQTGKIADYNYKLPDDFTGCVIAWNSNNLDSKVGGNYNYLYRLFRKSNLKPFERDISTEIYQAGSTPCNGVEGFNCYFPLQSYGFQPTNGVGYQPYRVVVLSFELLHAPATVCGPKKSTNLVKNKCVNFNFNGLTGTGVLTESNKKFLPFQQFGRDIADTTDAVRDPQTLEILDITPCSFGGVSVITPGTNTSNQVAVLYQGVNCTEVPVAIHADQLTPTWRVYSTGSNVFQTRAGCLIGAEHVNNSYECDIPIGAGICASYQTQTNSPRRARSVASQSIIAYTMSLGAENSVAYSNNSIAIPTNFTISVTTEILPVSMTKTSVDCTMYICGDSTECSNLLLQYGSFCTQLNRALTGIAVEQDKNTQEVFAQVKQIYKTPPIKDFGGFNFSQILPDPSKPSKRSFIEDLLFNKVTLADAGFIKQYGDCLGDIAARDLICAQKFNGLTVLPPLLTDEMIAQYTSALLAGTITSGWTFGAGAALQIPFAMQMAYRFNGIGVTQNVLYENQKLIANQFNSAIGKIQDSLSSTASALGKLQDVVNQNAQALNTLVKQLSSNFGAISSVLNDILSRLDKVEAEVQIDRLITGRLQSLQTYVTQQLIRAAEIRASANLAATKMSECVLGQSKRVDFCGKGYHLMSFPQSAPHGVVFLHVTYVPAQEKNFTTAPAICHDGKAHFPREGVFVSNGTHWFVTQRNFYEPQIITTDNTFVSGNCDVVIGIVNNTVYDPLQPELDSFKEELDKYFKNHTSPDVDLGDISGINASVVNIQKEIDRLNEVAKNLNESLIDLQELGKYEQYIKWPWYIWLGFIAGLIAIVMVTIMLCCMTSCCSCLKGCCSCGSCCKFDEDDSEPVLKGVKLHYT

SEQ ID NO: 296 - protein, 1273 aa, Artificial Sequence
  SARS-CoV-2/Belgium/BA-02291/2020__EPI_ISL_415159 spike protein (1-1273)
MFVFLVLLPLVSSQCVNLTTRTQLPPAYTNSFTRGVYYPDKVFRSSVLHSTQDLFLPFFSNVTWFHAIHVSGTNGTKRFDNPVLPFNDGVYFASTEKSNIIRGWIFGTTLDSKTQSLLIVNNATNVVIKVCEFQFCNDPFLGVYYHKNNKSWMESEFRVYSSANNCTFEYVSQPFLMDLEGKQGNFKNLREFVFKNIDGYFKIYSKHTPINLVRDLPQGFSALEPLVDLPIGINITRFQTLLALHRSYLTPGDSSSGWTAGAAAYYVGYLQPRTFLLKYNENGTITDAVDCALDPLSETKCTLKSFTVEKGIYQTSNFRVQPTESIVRFPNITNLCPFGEVFNATRFASVYAWNRKRISNCVADYSVLYNSASFSTFKCYGVSPTKLNDLCFTNVYADSFVIRGDEVRQIAPGQTGKIADYNYKLPDDFTGCVIAWNSNNLDSKVGGNYNYLYRLFRRSNLKPFERDISTEIYQAGSTPCNGVEGFNCYFPLQSYGFQPTNGVGYQPYRVVVLSFELLPAPATVCGPKKSTNLVKNKCVNFNFNGLTGTGVLTESNKKFLPFQQFGRDIADTTDAVRDPQTLEILDITPCSFGGVSVITPGTNTSNQVAVLYQGVNCTEVPVAIHADQLTPTWRVYSTGSNVFQTRAGCLIGAEHVNNSYECDIPIGAGICASYQTQTNSPRRARSVASQSIIAYTMSLGAENSVAYSNNSIAIPTNFTISVTTEILPVSMTKTSVDCTMYICGDSTECSNLLLQYGSFCTQLNRALTGIAVEQDKNTQEVFAQVKQIYKTPPIKDFGGFNFSQILPDPSKPSKRSFIEDLLFNKVTLADAGFIKQYGDCLGDIAARDLICAQKFNGLTVLPPLLTDEMIAQYTSALLAGTITSGWTFGAGAALQIPFAMQMAYRFNGIGVTQNVLYENQKLIANQFNSAIGKIQDSLSSAAPALGKLQDVVNQNAQALNTLVKQLSSNFGAISSVLNDILSRLDKVEAEVQIDRLITGRLQSLQTYVTQQLIRAAEIRASANLAATKMSECVLGQSKRVDFCGKGYHLMSFPQSAPHGVVFLHVTYVPAQEKNFTTAPAICHDGKAHFPREGVFVSNGTHWFVTQRNFYEPQIITTDNTFVSGNCDVVIGIVNNTVYDPLQPELDSFKEELDKYFKNHTSPDVDLGDISGINASVVNIQKEIDRLNEVAKNLNESLIDLQELGKYEQYIKWPWYIWLGFIAGLIAIVMVTIMLCCMTSCCSCLKGCCSCGSCCKFDEDDSEPVLKGVKLHYT

SEQ ID NO: 297 - protein, 1273 aa, Artificial Sequence
  SARS-CoV-2/USA/WA8-UW5/2020__EPI_ISL_413486 spike protein (1-1273)
MFVFLVLLPLVSSQCVNLTTRTQLPPAYTNSFTRGVYYPDKVFRSSVLHSTQDLFLPFFSNVTWFHAIHVSGTNGTKRFDNPVLPFNDGVYFASTEKSNIIRGWIFGTTLDSKTQSLLIVNNATNVVIKVCEFQFCNDPFLGVYYHKNNKSWMESEFRVYSSANNCTFEYVSQPFLMDLEGKQGNFKNLREFVFKNIDGYFKIYSKHTPINLVRDLPQGFSALEPLVDLPIGINITRFQTLLALHRSYLTPGDSSSGWTAGAAAYYVGYLQPRTFLLKYNENGTITDAVDCALDPLSETKCTLKSFTVEKGIYQTSNFRVQPTESIVRFPNITNLCPFGEVFNATRFASVYAWNRKRISNCVADYSVLYNSASFSTFKCYGVSPTKLNDLCFTNVYADSFVIRGDEVRQIAPGQTGKIADYNYKLPDDFTGCVIAWNSNNLDSKVGGNYNYLYRLFRKSNLKPFERDISTEIYQAGSTPCNGVEGFNCYFPLQSYGFQPTNGVGYQPYRVVVLSFELLHAPATVCGPKKSTNLVKNKCVNFNFNGLTGTGVLTESNKKFLPFQQFGRDIADTTDAVRDPQTLEILDITPCSFGGVSVITPGTNTSNQVAVLYQDVNCTEVPVAIHADQLTPTWRVYSTGSNVFQTRAGCLIGAEYVNNSYECDIPIGAGICASYQTQTNSPRRARSVASQSIIAYTMSLGAENSVAYSNNSIAIPTNFTISVTTEILPVSMTKTSVDCTMYICGDSTECSNLLLQYGSFCTQLNRALTGIAVEQDKNTQEVFAQVKQIYKTPPIKDFGGFNFSQILPDPSKPSKRSFIEDLLFNKVTLADAGFIKQYGDCLGDIAARDLICAQKFNGLTVLPPLLTDEMIAQYTSALLAGTITSGWTFGAGAALQIPFAMQMAYRFNGIGVTQNVLYENQKLIANQFNSAIGKIQDSLSSTASALGKLQDVVNQNAQALNTLVKQLSSNFGAISSVLNDILSRLDKVEAEVQIDRLITGRLQSLQTYVTQQLIRAAEIRASANLAATKMSECVLGQSKRVDFCGKGYHLMSFPQSAPHGVVFLHVTYVPAQEKNFTTAPAICHDGKAHFPREGVFVSNGTHWFVTQRNFYEPQIITTDNTFVSGNCDVVIGIVNNTVYDPLQPELDSFKEELDKYFKNHTSPDVDLGDISGINASVVNIQKEIDRLNEVAKNLNESLIDLQELGKYEQYIKWPWYIWLGFIAGLIAIVMVTIMLCCMTSCCSCLKGCCSCGSCCKFDEDDSEPVLKGVKLHYT

SEQ ID NO: 298 - protein, 1273 aa, Artificial Sequence
  SARS-CoV-2/England/20102000506/2020__EPI_ISL_415147 spike protein (1-1273)
MFVFLVLLPLVSSQCVNLTTRTQLPPAYTNSFTRGVYYPDKVFRSSVLHSTQDLFLPFFSNVTWFHAIHVSGTNGTKRFDNPVLPFNDGVYFASTEKSNIIRGWIFGTTLDSKTQSLLIVNNATNVVIKVCEFQFCNDPFLGVYYHKNNKSWMESEFRVYSSANNCTFEYVSQPFLMDLEGKQGNFKNLREFVFKNIDGYFKIYSKHTPINLVRDLPQGFSALEPLVDLPIGINITRFQTLLALHRSYLTPGDSSSGWTAGAAAYYVGYLQPRTFLLKYNENGTITDAVDCALDPLSETKCTLKSFTVEKGIYQTSNFRVQPTESIVRFPNITNLCPFGEVFNATRFASVYAWNRKRISNCVADYSVLYNSASFSTFKCYGVSPTKLNDLCFTNVYADSFVIRGDEVRQIAPGQTGKIADYNYKLPDDFTGCVIAWNSNNLDSKVGGNYNYLYRLFRKSNLKPFERDISTEIYQAGSTPCNGVEGFNCYFPLQSYGFQPTNGVGYQPYRVVVLSFELLHAPATVCGPKKSTNLVKNKCVNFNFNGLTGTGVLTESNKKFLPFQQFGRDIADTTDAVRDPQTLEILDITPCSFGGVSVITPGTNTSNQVAVLYQGVNCTEVPVAIHADQLTPTWRVYSTGSNVFQTRAGCLIGAEHVNNSYECDIPIGAGICASYQTQTNSPRRARSVASQSIIAYTMSLGAENSVAYSNNSIAIPTNFTISVTTEILPVSMTKTSVDCTMYICGDSTECSNLLLQYGSFCTQLNRALTGIAVEQDKNTQEVFAQVKQIYKTPPIKDFGGFNFSQILPDPSKPSKRSFIEDLLFNKVTLADAGFIKQYGYCLGDIAARDLICAQKFNGLTVLPPLLTDEMIAQYTSALLAGTITSGWTFGAGAALQIPFAMQMAYRFNGIGVTQNVLYENQKLIANQFNSAIGKIQDSLSSTASALGKLQDVVNQNAQALNTLVKQLSSNFGAISSVLNDILSRLDKVEAEVQIDRLITGRLQSLQTYVTQQLIRAAEIRASANLAATKMSECVLGQSKRVDFCGKGYHLMSFPQSAPHGVVFLHVTYVPAQEKNFTTAPAICHDGKAHFPREGVFVSNGTHWFVTQRNFYEPQIITTDNTFVSGNCDVVIGIVNNTVYDPLQPELDSFKEELDKYFKNHTSPDVDLGDISGINASVVNIQKEIDRLNEVAKNLNESLIDLQELGKYEQYIKWPWYIWLGFIAGLIAIVMVTIMLCCMTSCCSCLKGCCSCGSCCKFDEDDSEPVLKGVKLHYT

SEQ ID NO: 299 - protein, 1273 aa, Artificial Sequence
  SARS-CoV-2/Belgium/VAG-03013/2020__EPI_ISL_415155 spike protein (1-1273)
MFVFLVLLPLVSSQCVNLTTRTQLPPAYTNSFTRGVYYPDKVFRSSVLHSTQDLFLPFFSNVTWFHAIHVSGTNGTKRFDNPVLPFNDGVYFASTEKSNIIRGWIFGTTLDSKTQSLLIVNNATNVVIKVCEFQFCNDPFLGVYYHKNNKSWMESEFRVYSSANNCTFEYVSQPFLMDLEGKQGNFKNLREFVFKNIDGYFKIYSKHTPINLVRDLPQGFSALEPLVDLPIGINITRFQTLLALHRSYLTPGDSSSGWTAGAAAYYVGYLQPRTFLLKYNENGTITDAVDCALDPLSETKCTLKSFTVEKGIYQTSNFRVQPTESIVRFPNITNLCPFGEVFNATRFASVYAWNRKRISNCVADYSVLYNSASFSTFKCYGVSPTKLNDLCFTNVYADSFVIRGDEVRQIAPGQTGKIADYNYKLPDDFTGCVIAWNSNNLDSKVGGNYNYLYRLFRKSNLKPFERDISTEIYQAGSTPCNGVEGFNCYFPLQSYGFQPTNGVGYQPYRVVVLSFELLHAPATVCGPKKSTNLVKNKCVNFNFNGLTGTGVLTESNKKFLPFQQFGRDIADTTDAVRDPQTLEILDITPCSFGGVSVITPGTNTSNQVAVLYQGVNCTEVPVAIHADQLTPTWRVYSTGSNVFQTRAGCLIGAEHVNNSYECDIPIGAGICASYQTQTNSPRRARSVASQSIIAYTMSLGAENSVAYSNNSIAIPTNFTISVTTEILPVSMTKTSVDCTMYICGDSTECSNLLLQYGSFCTQLNRALTGIAVEQDKNTQEVFAQVKQIYKTPPIKDFGGFNFSQILPDPSKPSKRSFIEDLLFNKVTLADAGFIKQYGDCLGDIAARDLICAQKFNGLTVLPPLLTDEMIAQYTSALLAGTITSGWTFGAGAALQIPFAMQMAYRFNGIGVTQNVLYENQKLIANQFNSAIGKIQDSLSSTATALGKLQDVVNQNAQALNTLVKQLSSNFGAISSVLNDILSRLDKVEAEVQIDRLITGRLQSLQTYVTQQLIRAAEIRASANLAATKMSECVLGQSKRVDFCGKGYHLMSFPQSAPHGVVFLHVTYVPAQEKNFTTAPAICHDGKAHFPREGVFVSNGTHWFVTQRNFYEPQIITTDNTFVSGNCDVVIGIVNNTVYDPLQPELDSFKEELDKYFKNHTSPDVDLGDISGINASVVNIQKEIDRLNEVAKNLNESLIDLQELGKYEQYIKWPWYIWLGFIAGLIAIVMVTIMLCCMTSCCSCLKGCCSCGSCCKFDEDDSEPVLKGVKLHYT

SEQ ID NO: 300 - protein, 1273 aa, Artificial Sequence
  SARS-CoV-2/Belgium/BC-03016/2020__EPI_ISL_415157 spike protein (1-1273)
MFVFLVLLPLVSSQCVNLTTRTQLPPAYTNSFTRGVYYPDKVFRSSVLHSTQDLFLPFFSNVTWFHAIHVSGTNGTKRFDNPVLPFNDGVYFASTEKSNIIRGWIFGTTLDSKTQSLLIVNNATNVVIKVCEFQFCNDPFLGVYYHKNNKSWMESEFRVYSSANNCTFEYVSQPFLMDLEGKQGNFKNLREFVFKNIDGYFKIYSKHTPINLVRDLPQGFSALEPLVDLPIGINITRFQTLLALHRSYLTPGDSSSGWTAGAAAYYVGYLQPRTFLLKYNENGTITDAVDCALDPLSETKCTLKSFTVEKGIYQTSNFRVQPTESIVRFPNITNLCPFGEVFNATRFASVYAWNRKRISNCVADYSVLYNSASFSTFKCYGVSPTKLNDLCFTNVYADSFVIRGDEVRQIAPGQTGKIADYNYKLPDDFTGCVIAWNSNNLDSKVGGNYNYLYRLFRKSNLKPFERDISTEIYQAGSTPCNGVEGFNCYFPLQSYGFQPTNGVGYQPYRVVVLSFELLHAPATVCGPKKSTNLVKNKCVNFNFNGLTGTGVLTESNKKFLPFQQFGRDIADTTDAVRDPQTLEILDITPCSFGGVSVITPGTNTSNQVAVLYQGVNCTEVPVAIHADQLTPTWRVYSTGSNVFQTRAGCLIGAEHVNNSYECDIPIGAGICASYQTQTNSPRRARSVASQSIIAYTMSLGAENSVAYSNNSIAIPTNFTISVTTEILPVSMTKTSVDCTMYICGDSTECSNLLLQYGSFCTQLNRALTGIAVEQDKNTQEVFAQVKQIYKTPPIKDFGGFNFSQILPDPSKPSKRSFIEDLLFNKVTLADAGFIKQYGDCLGDIAARDLICAQKFNGLTVLPPLLTDEMIAQYTSALLAGTITSGWTFGAGAALQIPFAMQMAYRFNGIGVTQNVLYENQKLIANQFNSAIGKIQDSLSSTAPALGKLQDVVNQNAQALNTLVKQLSSNFGAISSVLNDILSRLDKVEAEVQIDRLITGRLQSLQTYVTQQLIRAAEIRASANLAATKMSECVLGQSKRVDFCGKGYHLMSFPQSAPHGVVFLHVTYVPAQEKNFTTAPAICHDGKAHFPREGVFVSNGTHWFVTQRNFYEPQIITTDNTFVSGNCDVVIGIVNNTVYDPLQPELDSFKEELDKYFKNHTSPDVDLGDISGINASVVNIQKEIDRLNEVAKNLNESLIDLQELGKYEQYIKWPWYIWLGFIAGLIAIVMVTIMLCCMTSCCSCLKGCCSCGSCCKFDEDDSEPVLKGVKLHYT

SEQ ID NO: 301 - protein, 1273 aa, Artificial Sequence
  SARS-CoV-2/Germany/BavPat3/2020__EPI_ISL_414521 spike protein (1-1273)
MFVFLVLLPLVSSQCVNLTTRTQLPPAYTNSFTRGVYYPDKVFRSSVLHSTQDLFLPFFSNVTWFHAIHVSGTNGTKRFDNPVLPFNDGVYFASTEKSNIIRGWIFGTTLDSKTQSLLIVNNATNVVIKVCEFQFCNDPFLGVYYHKNNKSWMESEFRVYSSANNCTFEYVSQPFLMDLEGKQGNFKNLREFVFKNIDGYFKIYSKHTPINLVRDLPQGFSALEPLVDLPIGINITRFQTLLALHRSYLTPGDSSSGWTAGAAAYYVGYLQPRTFLLKYNENGTITDAVDCALDPLSETKCTLKSFTVEKGIYQTSNFRVQPTESIVRFPNITNLCPFGEVFNATRFASVYAWNRKRISNCVADYSVLYNSASFSTFKCYGVSPTKLNDLCFTNVYADSFVIRGDEVRQIAPGQTGKIADYNYKLPDDFTGCVIAWNSNNLDSKVGGNYNYLYRLFRKSNLKPFERDISTEIYQAGSTPCNGVEGFNCYFPLQSYGFQPTNGVGYQPYRVVVLSFELLHAPATVCGPKKSTNLVKNKCVNFNFNGLTGTGVLTESNKKFLPFQQFGRDIADTTDAVRDPQTLEILDITPCSFGGVSVITPGTNTSNQVAVLYQDVNCTEVPVAIHADQLTPTWRVYSTGSNVFQTRAGCLIGAEHVNNSYECDIPIGAGICASYQTQTNSPRRARSVASQSIIAYTMSLGAENSVAYSNNSIAIPTNFTISVTTEILPVSMTKTSVDCTMYICGDSTECSNLLLQYGSFCTQLNRALTGIAVEQDKNTQQVFAQVKQIYKTPPIKDFGGFNFSQILPDPSKPSKRSFIEDLLFNKVTLADAGFIKQYGDCLGDIAARDLICAQKFNGLTVLPPLLTDEMIAQYTSALLAGTITSGWTFGAGAALQIPFAMQMAYRFNGIGVTQNVLYENQKLIANQFNSAIGKIQDSLSSTASALGKLQDVVNQNAQALNTLVKQLSSNFGAISSVLNDILSRLDKVEAEVQIDRLITGRLQSLQTYVTQQLIRAAEIRASANLAATKMSECVLGQSKRVDFCGKGYHLMSFPQSAPHGVVFLHVTYVPAQEKNFTTAPAICHDGKAHFPREGVFVSNGTHWFVTQRNFYEPQIITTDNTFVSGNCDVVIGIVNNTVYDPLQPELDSFKEELDKYFKNHTSPDVDLGDISGINASVVNIQKEIDRLNEVAKNLNESLIDLQELGKYEQYIKWPWYIWLGFIAGLIAIVMVTIMLCCMTSCCSCLKGCCSCGSCCKFDEDDSEPVLKGVKLHYT

SEQ ID NO: 302 - protein, 1273 aa, Artificial Sequence
  SARS-CoV-2/France/HF1805/2020__EPI_ISL_414628 spike protein (1-1273)
MFVFLVLLPLVSSQCVNLTTRTQLPPAYTNSFTRGVYYPDKVFRSSVLHSTQDLFLPFFSNVTWFHAIHVSGTNGTKRFDNPVLPFNDGVYFASTEKSNIIRGWIFGTTLDSKTQSLLIVNNATNVVIKVCEFQFCNDPFLGVYYHKNNKSWMESEFRVYSSANNCTFEYVSQPFLMDLEGKQGNFKNLREFVFKNIDGYFKIYSKHTPINLVRDLPQGFSALEPLVDLPIGINITRFQTLLALHRSYLTPGDSSSGWTAGAAAYYVGYLQPRTFLLKYNENGTITDAVDCALDPLSETKCTLKSFTVEKGIYQTSNFRVQPTESIVRFPNITNLCPFGEVFNATRFASVYAWNRKRISNCVADYSVLYNSASFSTFKCYGVSPTKLNDLCFTNVYADSFVIRGDEVRQIAPGQTGKIADYNYKLPDDFTGCVIAWNSNNLDSKVGGNYNYLYRLFRKSNLKPFERDISTEIYQAGSTPCNGVEGFNCYFPLQSYGFQPTNGVGYQPYRVVVLSFELLHAPATVCGPKKSTNLVKNKCVNFNFNGLTGTGVLTESNKKFLPFQQFGRDIADTTDAVRDPQTLEILDITPCSFGGVSVITPGTNTSNQVAVLYQGVNCTEVPVAIHADQLTPTWRVYSTGSNVFQTRAGCLIGAEHVNNSYECDIPIGAGICASYQTQTNSPRRARSVASQSIIAYTMSLGAENSVAYSNNSIAIPTNFTISVTTEILPVSMTKTSVDCTMYICGDSTECSNLLLQYGSFCTQLNRALTGIAVEQDKNTQEVFAQVKQIYKTPPIKDFGGFNFSQILPDPSKPSKRSFIEDLLFNKVTLADAGFIKQYGDCLGDIAARDLICAQKFNGLTVLPPLLTDEMIAQYTSALLAGTITSGWTFGAGAALQIPFAMQMAYRFNGIGVTQNVLYENQKLIANQFNSAIGKIQDSLSSTASALGKLQDVVNQNAQALNTLVKQLSSNFGAISSVLNDILSRLDKVEAEVQIDRLITGRLQSLQTYVTQQLIRAAEIRASANLAATKMSECVLGQSKRVDFCGKGYHLMSFPQSAPHGVVFLHVTYVPAQEKNFTTAPAICHDGKAHFPREGVFVSNGTHWFVTQRNFYEPQIITTDNTFVSGNCDVVIGVVNNTVYDPLQPELDSFKEELDKYFKNHTSPDVDLGDISGINASVVNIQKEIDRLNEVAKNLNESLIDLQELGKYEQYIKWPWYIWLGFIAGLIAIVMVTIMLCCMTSCCSCLKGCCSCGSCCKFDEDDSEPVLKGVKLHYT

SEQ ID NO: 303 - protein, 1273 aa, Artificial Sequence
  SARS-CoV-2/Netherlands/ZuidHolland_9/2020__EPI_ISL_414445 spike protein (1-1273)
MFVFLVLLPLVSSQCVNLTTRTQLPPAYTNSFTRGVYYPDKVFRSSVLHSTQDLFLPFFSNVTWFHAIHVSGTNGTKRFDNPVLPFNDGVYFASTEKSNIIRGWIFGTTLDSKTQSLLIVNNATNVVIKVCEFQFCNDPFLGVYYHKNNKSWMESEFRVYSSANNCTFEYVSQPFLMDLEGKQGNFKNLREFVFKNIDGYFKIYSKHTPINLVRDLPQGFSALEPLVDLPIGINITRFQTLLALHRSYLTPGDSSSGWTAGAAAYYVGYLQPRTFLLKYNENGTITDAVDCALDPLSETKCTLKSFTVEKGIYQTSNFRVQPTESIVRFPNITNLCPFGEVFNATRFASVYAWNRKRISNCVADYSVLYNSASFSTFKCYGVSPTKLNDLCFTNVYADSFVIRGDEVRQIAPGQTGKIADYNYKLPDDFTGCVIAWNSNNLDSKVGGNYNYLYRLFRKSNLKPFERDISTEIYQAGSTPCNGVEGFNCYFPLQSYGFQPTNGVGYQPYRVVVLSFELLHAPATVCGPKKSTNLVKNKCVNFNFNGLTGTGVLTESNKKFLPFQQFGRDIADTTDAVRDPQTLEILDITPCSFGGVSVITPGTNTSNQVAVLYQGVNCTEVPVAIHADQLTPTWRVYSTGSNVFQTRAGCLIGAEHVNNSYECDIPIGAGICASYQTQTNSPRRARSVASQSIIAYTMSLGAENSVAYSNNSIAIPTNFTISVTTEILPVSMTKTSVDCTMYICGDSTECSNLLLQYGSFCTQLNRALTGIAVEQDKNTQEVFAQVKQIYKTPPIKDFGGFNFSQILPDPSKPSKRSFIEDLLFNKVTLADAGFIKQYGDCLGDIAARDLICVQKFNGLTVLPPLLTDEMIAQYTSALLAGTITSGWTFGAGAALQIPFAMQMAYRFNGIGVTQNVLYENQKLIANQFNSAIGKIQDSLSSTASALGKLQDVVNQNAQALNTLVKQLSSNFGAISSVLNDILSRLDKVEAEVQIDRLITGRLQSLQTYVTQQLIRAAEIRASANLAATKMSECVLGQSKRVDFCGKGYHLMSFPQSAPHGVVFLHVTYVPAQEKNFTTAPAICHDGKAHFPREGVFVSNGTHWFVTQRNFYEPQIITTDNTFVSGNCDVVIGIVNNTVYDPLQPELDSFKEELDKYFKNHTSPDVDLGDISGINASVVNIQKEIDRLNEVAKNLNESLIDLQELGKYEQYIKWPWYIWLGFIAGLIAIVMVTIMLCCMTSCCSCLKGCCSCGSCCKFDEDDSEPVLKGVKLHYT

SEQ ID NO: 304 - protein, 1273 aa, Artificial Sequence
  SARS-CoV-2/Finland/FIN03032020A/2020__EPI_ISL_413602 spike protein (1-1273)
MFVFLVLLPLVSSQCVNLTTRTQLPPAYTNSFTRGVYYPDKVFRSSVLHSTQDLFLPFFSNVTWFHAIHVSGTNGTKRFDNPVLPFNDGVYFASTEKSNIIRGWIFGTTLDSKTQSLLIVNNATNVVIKVCEFQFCNDPFLGVYYHKNNKSWMESEFRVYSSANNCTFEYVSQPFLMDLEGKQGNFKNLREFVFKNIDGYFKIYSKHTPINLVRDLPQGFSALEPLVDLPIGINITRFQTLLALHRSYLTPGDSSSGWTAGAAAYYVGYLQPRTFLLKYNENGTITDAVDCALDPLSETKCTLKSFTVEKGIYQTSNFRVQPTESIVRFPNITNLCPFGEVFNATRFASVYAWNRKRISNCVADYSVLYNSASFSTFKCYGVSPTKLNDLCFTNVYADSFVIRGDEVRQIAPGQTGKIADYNYKLPDDFTGCVISWNSNNLDSKVGGNYNYLYRLFRKSNLKPFERDISTEIYQAGSTPCNGVEGFNCYFPLQSYGFQPTNGVGYQPYRVVVLSFELLHAPATVCGPKKSTNLVKNKCVNFNFNGLTGTGVLTESNKKFLPFQQFGRDIADTTDAVRDPQTLEILDITPCSFGGVSVITPGTNTSNQVAVLYQGVNCTEVPVAIHADQLTPTWRVYSTGSNVFQTRAGCLIGAEHVNNSYECDIPIGAGICASYQTQTNSPRRARSVASQSIIAYTMSLGAENSVAYSNNSIAIPTNFTISVTTEILPVSMTKTSVDCTMYICGDSTECSNLLLQYGSFCTQLNRALTGIAVEQDKNTQEVFAQVKQIYKTPPIKDFGGFNFSQILPDPSKPSKRSFIEDLLFNKVTLADAGFIKQYGDCLGDIAARDLICAQKFNGLTVLPPLLTDEMIAQYTSALLAGTITSGWTFGAGAALQIPFAMQMAYRFNGIGVTQNVLYENQKLIANQFNSAIGKIQDSLSSTASALGKLQDVVNQNAQALNTLVKQLSSNFGAISSVLNDILSRLDKVEAEVQIDRLITGRLQSLQTYVTQQLIRAAEIRASANLAATKMSECVLGQSKRVDFCGKGYHLMSFPQSAPHGVVFLHVTYVPAQEKNFTTAPAICHDGKAHFPREGVFVSNGTHWFVTQRNFYEPQIITTDNTFVSGNCDVVIGIVNNTVYDPLQPELDSFKEELDKYFKNHTSPDVDLGDISGINASVVNIQKEIDRLNEVAKNLNESLIDLQELGKYEQYIKWPWYIWLGFIAGLIAIVMVTIMLCCMTSCCSCLKGCCSCGSCCKFDEDDSEPVLKGVKLHYT

SEQ ID NO: 305 - protein, 1273 aa, Artificial Sequence
  SARS-CoV-2/France/GE1977/2020__EPI_ISL_414632 spike protein (1-1273)
MFVFLVLLPLVSSQCVNLTTRTQLPPAYTNSFTRGVYYPDKVFRSSVLHSTQDLFLPFFSNVTWFHAIHVSGTNGTKRFDNPVLPFNDGVYFASTEKSNIIRGWIFGTTLDSKTQSLLIVNNATNVVIKVCEFQFCNDPFLGVYYHKNNKSWMESEFRVYSSANNCTFEYVSQPFLMDLEGKQGNFKNLREFVFKNIDGYFKIYSKHTPINLVRDLPQGFSALEPLVDLPIGINITRFQTLLALHRSYLTPGDSSSGWTAGAAAYYVGYLQPRTFLLKYNENGTITDAVDCALDPLSETKCTLKSFTVEKGIYQTSNFRVQPTESIVRFPNITNLCPFGEVFNATRFASVYAWNRKRISNCVADYSVLYNSASFSTFKCYGVSPTKLNDLCFTNVYADSFVIRGDEVRQIAPGQTGKIADYNYKLPDDFTGCVIAWNSNNLDSKVGGNYNYLYRLFRKSNLKPFERDISTEIYQAGSTPCNGVEGFNCYFPLQSYGFQPTNGVGYQPYRVVVLSFELLHAPATVCGPKKSTNLVKNKCVNFNFNGLTGTGVLTESNKKFLPFQQFGRDIADTTDAVRDPQTLEILDITPCSFGGVSVITPGTNTSNQVAVLYQGVNCTEVPVAIHADQLTPTWRVYSTGSNVFQTRAGCLIGAEHVNNSYECDIPIGAGICASYQTQTNSPRRARSVASQSIIAYTMSLGAENSVAYSNNSIAIPTNFTISVTTEILPVSMTKTSVDCTMYICGDSTECSNLLLQYGSFCTQLNRALTGIAVEQDKNTQEVFAQVKQIYKTPPIKDFGGFNFSQILPDPSKPSKRSFIEDLLFNKVTLADAGFIKQYGDCLGDIAARDLICAQKFNGLTVLPPLLTDEMIAQYTSALLAGTITSGWTFGAGAALQIPFAMQMAYRFNGIGVTQNVLYENQKLIANQFNSAIGKIQDSLFSTASALGKLQDVVNQNAQALNTLVKQLSSNFGAISSVLNDILSRLDKVEAEVQIDRLITGRLQSLQTYVTQQLIRAAEIRASANLAATKMSECVLGQSKRVDFCGKGYHLMSFPQSAPHGVVFLHVTYVPAQEKNFTTAPAICHDGKAHFPREGVFVSNGTHWFVTQRNFYEPQIITTDNTFVSGNCDVVIGIVNNTVYDPLQPELDSFKEELDKYFKNHTSPDVDLGDISGINASVVNIQKEIDRLNEVAKNLNESLIDLQELGKYEQYIKWPWYIWLGFIAGLIAIVMVTIMLCCMTSCCSCLKGCCSCGSCCKFDEDDSEPVLKGVKLHYT

SEQ ID NO: 306 - protein, 1273 aa, Artificial Sequence
  SARS-CoV-2/Finland/FIN-313/2020__EPI_ISL_414641 spike protein (1-1273)
MFVFLVLLPLVSSQCVNLTTRTQLPPAYTNSFTRGVYYPDKVFRSSVLHSTQDLFLPFFSNVTWFHAIHVSGTNGTKRFDNPVLPFNDGVYFASTEKSNIIRGWIFGTTLDSKTQSLLIVNNATNVVIKVCEFQFCNDPFLGVYYHKNNKSWMESEFRVYSSANNCTFEYVSQPFLMDLEGKQGNFKNLREFVFKNIDGYFKIYSKHTPINLVRDLPQGFSALEPLVDLPIGINITRFKTLLALHRSYLTPGDSSSGWTAGAAAYYVGYLQPRTFLLKYNENGTITDAVDCALDPLSETKCTLKSFTVEKGIYQTSNFRVQPTESIVRFPNITNLCPFGEVFNATRFASVYAWNRKRISNCVADYSVLYNSASFSTFKCYGVSPTKLNDLCFTNVYADSFVIRGDEVRQIAPGQTGKIADYNYKLPDDFTGCVIAWNSNNLDSKVGGNYNYLYRLFRKSNLKPFERDISTEIYQAGSTPCNGVEGFNCYFPLQSYGFQPTNGVGYQPYRVVVLSFELLHAPATVCGPKKSTNLVKNKCVNFNFNGLTGTGVLTESNKKFLPFQQFGRDIADTTDAVRDPQTLEILDITPCSFGGVSVITPGTNTSNQVAVLYQGVNCTEVPVAIHADQLTPTWRVYSTGSNVFQTRAGCLIGAEHVNNSYECDIPIGAGICASYQTQTNSPRRARSVASQSIIAYTMSLGAENSVAYSNNSIAIPTNFTISVTTEILPVSMTKTSVDCTMYICGDSTECSNLLLQYGSFCTQLNRALTGIAVEQDKNTQEVFAQVKQIYKTPPIKDFGGFNFSQILPDPSKPSKRSFIEDLLFNKVTLADAGFIKQYGDCLGDIAARDLICAQKFNGLTVLPPLLTDEMIAQYTSALLAGTITSGWTFGAGAALQIPFAMQMAYRFNGIGVTQNVLYENQKLIANQFNSAIGKIQDSLSSTASALGKLQDVVNQNAQALNTLVKQLSSNFGAISSVLNDILSRLDKVEAEVQIDRLITGRLQSLQTYVTQQLIRAAEIRASANLAATKMSECVLGQSKRVDFCGKGYHLMSFPQSAPHGVVFLHVTYVPAQEKNFTTAPAICHDGKAHFPREGVFVSNGTHWFVTQRNFYEPQIITTDNTFVSGNCDVVIGIVNNTVYDPLQPELDSFKEELDKYFKNHTSPDVDLGDISGINASVVNIQKEIDRLNEVAKNLNESLIDLQELGKYEQYIKWPWYIWLGFIAGLIAIVMVTIMLCCMTSCCSCLKGCCSCGSCCKFDEDDSEPVLKGVKLHYT

SEQ ID NO: 307 - protein, 1273 aa, Artificial Sequence
  SARS-CoV-2/Netherlands/ZuidHolland_2/2020__EPI_ISL_414556 spike protein (1-1273)
MFVFLVLLPLVSSQCVNLTTRTQLPPAYTNSFTRGVYYPDKVFRSSVLHSTQDLFLPFFSNVTWFHAIHVSGTNGTKRFDNPVLPFNDGVYFASTEKSNIIRGWIFGTTLDSKTQSLLIVNNATNVVIKVCEFQFCNDPFLGVYYHKNNKSWMESEFRVYSSANNCTFEYVSQPFLMDLEGKQGNFKNLREFVFKNIDGYFKIYSKHTPINLVRDLPQGFSALEPLVDLPIGINITRFQTLLALHRSYLTPGDSSSGWTAGAAAYYVGYLQPRTFLLKYNENGTITDAVDCALDPLSETKCTLKSFTVEKGIYQTSNFRVQPTESIVRFPNITNLCPFGEVFNATRFASVYAWNRKRISNCVADYSVLYNSASFSTFKCYGVSPTKLNDLCFTNVYADSFVIRGDEVRQIAPGQTGKIADYNYKLPDDFTGCVIAWNSNNLDSKVGGNYNYLYRLFRKSNLKPFERDISTEIYQAGSTPCNGVEGFNCYFPLQSYGFQPTNGVGYQPYRVVVLSFELLHAPATVCGPKKSTNLVKNKCVNFNFNGLTGTGVLTESNKKFLPFQQFGRDIADTTDAVRDPQTLEILDITPCSFGGVSVITPGTNTSNQVAVLYQGVNCTEVPVAIHADQLTPTWRVYSTGSNVFQTRAGCLIGAEHVNNSYECDIPIGAGICASYQTQTNSPRRARSVASQSIIAYTMSLGAENSVAYSNNSIAIPTNFTISVTTEILPVSMTKTSVDCTMYICGDSTECSNLLLQYGSFCTQLNRALTGIALEQDKNTQEVFAQVKQIYKTPPIKDFGGFNFSQILPDPSKPSKRSFIEDLLFNKVTLADAGFIKQYGDCLGDIAARDLICAQKFNGLTVLPPLLTDEMIAQYTSALLAGTITSGWTFGAGAALQIPFAMQMAYRFNGIGVTQNVLYENQKLIANQFNSAIGKIQDSLSSTASALGKLQDVVNQNAQALNTLVKQLSSNFGAISSVLNDILSRLDKVEAEVQIDRLITGRLQSLQTYVTQQLIRAAEIRASANLAATKMSECVLGQSKRVDFCGKGYHLMSFPQSAPHGVVFLHVTYVPAQEKNFTTAPAICHDGKAHFPREGVFVSNGTHWFVTQRNFYEPQIITTDNTFVSGNCDVVIGIVNNTVYDPLQPELDSFKEELDKYFKNHTSPDVDLGDISGINASVVNIQKEIDRLNEVAKNLNESLIDLQELGKYEQYIKWPWYIWLGFIAGLIAIVMVTIMLCCMTSCCSCLKGCCSCGSCCKFDEDDSEPVLKGVKLHYT

SEQ ID NO: 308 - protein, 1273 aa, Artificial Sequence
  SARS-CoV-2/USA/WA-UW31/2020__EPI_ISL_414618 spike protein (1-1273)
MFVFLVLLPLVSSQCVNLTTRTQLPPAYTNSFTRGVYYPDKVFRSSVLHSTQDLFLPFFSNVTWFHAIHVSGTNGTKRFDNPVLPFNDGVYFASTEKSNIIRGWIFGTTLDSKTQSLLIVNNATNVVIKVCEFQFCNDPFLGVYYHKNNKSWMESEFRVYSSANNCTFEYVSQPFLMDLEGKQGNFKNLREFVFKNIDGYFKIYSKHTPINLVRDLPQGFSALEPLVDLPIGINITRFQTLLALHRSYLTPGDSSSGWTAGAAAYYVGYLQPRTFLLKYNENGTITDAVDCALDPLSETKCTLKSFTVEKGIYQTSNFRVQPTESIVRFPNITNLCPFGEVFNATRFASVYAWNRKRISNCVADYSVLYNSASFSTFKCYGVSPTKLNDLCFTNVYADSFVIRGDEVRQIAPGQTGKIADYNYKLPDDFTGCVIAWNSNNLDSKVGGNYNYLYRLFRKSNLKPFERDISTEIYQAGSTPCNGAEGFNCYFPLQSYGFQPTNGVGYQPYRVVVLSFELLHAPATVCGPKKSTNLVKNKCVNFNFNGLTGTGVLTESNKKFLPFQQFGRDIADTTDAVRDPQTLEILDITPCSFGGVSVITPGTNTSNQVAVLYQDVNCTEVPVAIHADQLTPTWRVYSTGSNVFQTRAGCLIGAEHVNNSYECDIPIGAGICASYQTQTNSPRRARSVASQSIIAYTMSLGAENSVAYSNNSIAIPTNFTISVTTEILPVSMTKTSVDCTMYICGDSTECSNLLLQYGSFCTQLNRALTGIAVEQDKNTQEVFAQVKQIYKTPPIKDFGGFNFSQILPDPSKPSKRSFIEDLLFNKVTLADAGFIKQYGDCLGDIAARDLICAQKFNGLTVLPPLLTDEMIAQYTSALLAGTITSGWTFGAGAALQIPFAMQMAYRFNGIGVTQNVLYENQKLIANQFNSAIGKIQDSLSSTASALGKLQDVVNQNAQALNTLVKQLSSNFGAISSVLNDILSRLDKVEAEVQIDRLITGRLQSLQTYVTQQLIRAAEIRASANLAATKMSECVLGQSKRVDFCGKGYHLMSFPQSAPHGVVFLHVTYVPAQEKNFTTAPAICHDGKAHFPREGVFVSNGTHWFVTQRNFYEPQIITTDNTFVSGNCDVVIGIVNNTVYDPLQPELDSFKEELDKYFKNHTSPDVDLGDISGINASVVNIQKEIDRLNEVAKNLNESLIDLQELGKYEQYIKWPWYIWLGFIAGLIAIVMVTIMLCCMTSCCSCLKGCCSCGSCCKFDEDDSEPVLKGVKLHYT

SEQ ID NO: 309 - protein, 1273 aa, Artificial Sequence
  SARS-CoV-2/South Korea/SNU01/2020__EPI_ISL_411929 spike protein (1-1273)
MFVFLVLLPLVSSQCVNLTTRTQLPPAYTNSFTRGVYYPDKVFRSSVLHSTQDLFLPFFSNVTWFHAIHVSGTNGTKRFDNPVLPFNDGVYFASTEKSNIIRGWIFGTTLDSKTQSLLIVNNATNVVIKVCEFQFCNDPFLGVYYHKNNKSWMESEFRVYSSANNCTFEYVSQPFLMDLEGKQGNFKNLREFVFKNIDGYFKIYSKHTPINLVRDLPQGFWALEPLVDLPIGINITRFQTLLALHRSYLTPGDSSSGWTAGAAAYYVGYLQPRTFLLKYNENGTITDAVDCALDPLSETKCTLKSFTVEKGIYQTSNFRVQPTESIVRFPNITNLCPFGEVFNATRFASVYAWNRKRISNCVADYSVLYNSASFSTFKCYGVSPTKLNDLCFTNVYADSFVIRGDEVRQIAPGQTGKIADYNYKLPDDFTGCVIAWNSNNLDSKVGGNYNYLYRLFRKSNLKPFERDISTEIYQAGSTPCNGVEGFNCYFPLQSYGFQPTNGVGYQPYRVVVLSFELLHAPATVCGPKKSTNLVKNKCVNFNFNGLTGTGVLTESNKKFLPFQQFGRDIADTTDAVRDPQTLEILDITPCSFGGVSVITPGTNTSNQVAVLYQDVNCTEVPVAIHADQLTPTWRVYSTGSNVFQTRAGCLIGAEHVNNSYECDIPIGAGICASYQTQTNSPRRARSVASQSIIAYTMSLGAENSVAYSNNSIAIPTNFTISVTTEILPVSMTKTSVDCTMYICGDSTECSNLLLQYGSFCTQLNRALTGIAVEQDKNTQEVFAQVKQIYKTPPIKDFGGFNFSQILPDPSKPSKRSFIEDLLFNKVTLADAGFIKQYGDCLGDIAARDLICAQKFNGLTVLPPLLTDEMIAQYTSALLAGTITSGWTFGAGAALQIPFAMQMAYRFNGIGVTQNVLYENQKLIANQFNSAIGKIQDSLSSTASALGKLQDVVNQNAQALNTLVKQLSSNFGAISSVLNDILSRLDKVEAEVQIDRLITGRLQSLQTYVTQQLIRAAEIRASANLAATKMSECVLGQSKRVDFCGKGYHLMSFPQSAPHGVVFLHVTYVPAQEKNFTTAPAICHDGKAHFPREGVFVSNGTHWFVTQRNFYEPQIITTDNTFVSGNCDVVIGIVNNTVYDPLQPELDSFKEELDKYFKNHTSPDVDLGDISGINASVVNIQKEIDRLNEVAKNLNESLIDLQELGKYEQYIKWPWYIWLGFIAGLIAIVMVTIMLCCMTSCCSCLKGCCSCGSCCKFDEDDSEPVLKGVKLHYT

SEQ ID NO: 310 - protein, 1273 aa, Artificial Sequence
  SARS-CoV-2/China/WF0004/2020__EPI_ISL_413694 spike protein (1-1273)
MFVFLVLLPLVSSQCVNLTTRTQLPPAYTNSFTRGVYYPDKVFRSSVLHSTQDLFLPFFSNVTWFHAIHVSGTNGTKRFDNPVLPFNDGVYFASTEKSNIIRGWIFGTTLDSKTQSLLIVNNATNVVIKVCEFQFCNDPFLGVYYHKNNKSWTESEFRVYSSANNCTFEYVSQPFLMDLEGKQGNFKNLREFVFKNIDGYFKIYSKHTPINLVRDLPQGFSALEPLVDLPIGINITRFQTLLALHRSYLTPGDSSSGWTAGAAAYYVGYLQPRTFLLKYNENGTITDAVDCALDPLSETKCTLKSFTVEKGIYQTSNFRVQPTESIVRFPNITNLCPFGEVFNATRFASVYAWNRKRISNCVADYSVLYNSASFSTFKCYGVSPTKLNDLCFTNVYADSFVIRGDEVRQIAPGQTGKIADYNYKLPDDFTGCVIAWNSNNLDSKVGGNYNYLYRLFRKSNLKPFERDISTEIYQAGSTPCNGVEGFNCYFPLQSYGFQPTNGVGYQPYRVVVLSFELLHAPATVCGPKKSTNLVKNKCVNFNFNGLTGTGVLTESNKKFLPFQQFGRDIADTTDAVRDPQTLEILDITPCSFGGVSVITPGTNTSNQVAVLYQDVNCTEVPVAIHADQLTPTWRVYSTGSNVFQTRAGCLIGAEHVNNSYECDIPIGAGICASYQTQTNSPRRARSVASQSIIAYTMSLGAENSVAYSNNSIAIPTNFTISVTTEILPVSMTKTSVDCTMYICGDSTECSNLLLQYGSFCTQLNRALTGIAVEQDKNTQEVFAQVKQIYKTPPIKDFGGFNFSQILPDPSKPSKRSFIEDLLFNKVTLADAGFIKQYGDCLGDIAARDLICAQKFNGLTVLPPLLTDEMIAQYTSALLAGTITSGWTFGAGAALQIPFAMQMAYRFNGIGVTQNVLYENQKLIANQFNSAIGKIQDSLSSTASALGKLQDVVNQNAQALNTLVKQLSSNFGAISSVLNDILSRLDKVEAEVQIDRLITGRLQSLQTYVTQQLIRAAEIRASANLAATKMSECVLGQSKRFDFCGKGYHLMSFPQSAPHGVVFLHVTYVPAQEKNFTTAPAICHDGKAHFPREGVFVSNGTHWFVTQRNFYEPQIITTDNTFVSGNCDVVIGIVNNTVYDPLQPELDSFKEELDKYFKNHTSPDVDLGDISGINASVVNIQKEIDRLNEVAKNLNESLIDLQELGKYEQYIKWPWYIWLGFIAGLIAIVMVTIMLCCMTSCCSCLKGCCSCGSCCKFDEDDSEPVLKGVKLHYT

SEQ ID NO: 311 - protein, 1273 aa, Artificial Sequence
  SARS-CoV-2/China/WF0028/2020__EPI_ISL_413791 spike protein (1-1273)
MFVFLVLLPLVSSQCVNLTTRTQLPPAYTNSFTRGVYYPDKVFRSSVLHSTQDLFLPFFSNVTWFHAIHVSGTNGTKRFDNPVLPFNDGVYFASTEKSNIIRGWIFGTTLDSKTQSLLIVNNATNVVIKVCEFQFCNDPFLGVYYHKNNKSWMESEFRVYSSANNCTFEYVSQPFLMDLEGKQGNFKNLREFVFKNIDGYFKIYSKHTPINLVRDLPQGFSALEPLVDLPIGINITRFQTLLALHRSYLTPGDSSSGWTAGAAAYYVGYLQPRTFLLKYNENGTITDAVDCALDPLSETKCTLKSFTVEKGIYQTSNFRVQPTESIVRFPNITNLCPFGEVFNATRFASVYAWNRKRISNCVADYSVLYNSASFSTFKCYGVSPTKLNDLCFTNVYADSFVIRGDEVRQIAPGQTGKIADYNYKLPDDFTGCVIAWNSNNLDSKVGGNYNYLYRLFRKSNLKPFERDISTEIYQAGSTPCNGVEGFNCYFPLQSYGFQPTNGVGYQPYRVVVLSFELLHAPATVCGPKKSTNLVKNKCVNFNFNGLTGTGVLTESNKKFLPFQQFGRDIADTTDAVRDPQTLEILDITPCSFGGVSVITPGTNTSNQVAVLYQDVNCTEVPVAIHADQLTPTWRVYSTGSNVFQTRAGCLIGAEHVNNSYECDIPIGAGICASYQTQTNSPRRARSVASQSIIAYTMSLGAENSVAYSNNSIAIPTNFTISVTTEILPVSMTKTSVDCTMYICGDSTECSNLLLQYGSFCTQLNRALTGIAVEQDKNTQEVFAQVKQIYKTPPIKDFGGFNFSQILPDPSKPSKRSFIEDLLFNKVTLADAGFIKQYGDCLGDIAARDLICAQKFNGLTVLPPLLTDEMIAQYTSALLAGTITSGWTFGAGAALQIPFAMQMAYRFNGIGVTQNVLYENQKLIANQFNSAIGKIQDSLSSTASALGKLQDVVNQNAQALNTLVKQLSSNFGAISSVLNDILSRLDKVEAEVQIDRLITGRLQSLQTYVTQQLIRAAEIRASANLAATKMSECVLGQSKRVDFCGKGYHLMSFPQSAPHGVVFLHVTYVPAQEKNFTTAPAICHDGKAHFPREGVFVSNGTHWFVTQRNFYEPQIITTDNTFVSGNCDVVIGIVNNTVYDPLQPELESFKEELDKYFKNHTSPDVDLGDISGINASVVNIQKEIDRLNEVAKNLNESLIDLQELGKYEQYIKWPWYIWLGFIAGLIAIVMVTIMLCCMTSCCSCLKGCCSCGSCCKFDEDDSEPVLKGVKLHYT

SEQ ID NO: 312 - protein, 1273 aa, Artificial Sequence
  SARS-CoV-2/2019-nCoV/USA-CruiseA-18/2020__MT159716.1 spike protein (1-1273)
MFVFLVLLPLVSSQCVNLTTRTQLPPAYTNSFTRGVYYPDKVFRSSVLHSTQDLFLPFFSNVTWFHAIHVSGTNGTKRFDNPVLPFNDGVYFASTEKSNIIRGWIFGTTLDSKTQSLLIVNNATNVVIKVCEFQFCNDPFLGVYYHKNNKSWMESELRVYSSANNCTFEYVSQPFLMDLEGKQGNFKNLREFVFKNIDGYFKIYSKHTPINLVRDLPQGFSALEPLVDLPIGINITRFQTLLALHRSYLTPGDSSSGWTAGAAAYYVGYLQPRTFLLKYNENGTITDAVDCALDPLSETKCTLKSFTVEKGIYQTSNFRVQPTESIVRFPNITNLCPFGEVFNATRFASVYAWNRKRISNCVADYSVLYNSASFSTFKCYGVSPTKLNDLCFTNVYADSFVIRGDEVRQIAPGQTGKIADYNYKLPDDFTGCVIAWNSNNLDSKVGGNYNYLYRLFRKSNLKPFERDISTEIYQAGSTPCNGVEGFNCYFPLQSYGFQPTNGVGYQPYRVVVLSFELLHAPATVCGPKKSTNLVKNKCVNFNFNGLTGTGVLTESNKKFLPFQQFGRDIADTTDAVRDPQTLEILDITPCSFGGVSVITPGTNTSNQVAVLYQDVNCTEVPVAIHADQLTPTWRVYSTGSNVFQTRAGCLIGAEHVNNSYECDIPIGAGICASYQTQTNSPRRARSVASQSIIAYTMSLGAENSVAYSNNSIAIPTNFTISVTTEILPVSMTKTSVDCTMYICGDSTECSNLLLQYGSFCTQLNRALTGIAVEQDKNTQEVFAQVKQIYKTPPIKDFGGFNFSQILPDPSKPSKRSFIEDLLFNKVTLADAGFIKQYGDCLGDIAARDLICAQKFNGLTVLPPLLTDEMIAQYTSALLAGTITSGWTFGAGAALQIPFAMQMAYRFNGIGVTQNVLYENQKLIANQFNSAIGKIQDSLSSTASALGKLQDVVNQNAQALNTLVKQLSSNFGAISSVLNDILSRLDKVEAEVQIDRLITGRLQSLQTYVTQQLIRAAEIRASANLAATKMSECVLGQSKRVDFCGKGYHLMSFPQSAPHGVVFLHVTYVPAQEKNFTTAPAICHDGKAHFPREGVFVSNGTHWFVTQRNFYEPQIITTDNTFVSGNCDVVIGIVNNTVYDPLQPELDSFKEELDKYFKNHTSPDVDLGDISGINASVVNIQKEIDRLNEVAKNLNESLIDLQELGKYEQYIKWPWYIWLGFIAGLIAIVMVTIMLCCMTSCCSCLKGCCSCGSCCKFDEDDSEPVLKGVKLHYT

SEQ ID NO: 313 - protein, 1273 aa, Artificial Sequence
  SARS-CoV-2/SARS-CoV-2/Yunnan-01/human/2020/CHN__MT049951.1 spike protein (1-1273)
MFVFLVLLPLVSSQCVNLTTRTQLPPANTNSFTRGVYYPDKVFRSSVLHSTQDLFLPFFSNVTWFHAIHVSGTNGTKRFDNPVLPFNDGVYFASTEKSNIIRGWIFGTTLDSKTQSLLIVNNATNVVIKVCEFQFCNDPFLGVYYHKNNKSWMESEFRVYSSANNCTFEYVSQPFLMDLEGKQGNFKNLREFVFKNIDGYFKIYSKHTPINLVRDLPQGFSALEPLVDLPIGINITRFQTLLALHRSYLTPGDSSSGWTAGAAAYYVGYLQPRTFLLKYNENGTITDAVDCALDPLSETKCTLKSFTVEKGIYQTSNFRVQPTESIVRFPNITNLCPFGEVFNATRFASVYAWNRKRISNCVADYSVLYNSASFSTFKCYGVSPTKLNDLCFTNVYADSFVIRGDEVRQIAPGQTGKIADYNYKLPDDFTGCVIAWNSNNLDSKVGGNYNYLYRLFRKSNLKPFERDISTEIYQAGSTPCNGVEGFNCYFPLQSYGFQPTNGVGYQPYRVVVLSFELLHAPATVCGPKKSTNLVKNKCVNFNFNGLTGTGVLTESNKKFLPFQQFGRDIADTTDAVRDPQTLEILDITPCSFGGVSVITPGTNTSNQVAVLYQDVNCTEVPVAIHADQLTPTWRVYSTGSNVFQTRAGCLIGAEHVNNSYECDIPIGAGICASYQTQTNSPRRARSVASQSIIAYTMSLGAENSVAYSNNSIAIPTNFTISVTTEILPVSMTKTSVDCTMYICGDSTECSNLLLQYGSFCTQLNRALTGIAVEQDKNTQEVFAQVKQIYKTPPIKDFGGFNFSQILPDPSKPSKRSFIEDLLFNKVTLADAGFIKQYGDCLGDIAARDLICAQKFNGLTVLPPLLTDEMIAQYTSALLAGTITSGWTFGAGAALQIPFAMQMAYRFNGIGVTQNVLYENQKLIANQFNSAIGKIQDSLSSTASALGKLQDVVNQNAQALNTLVKQLSSNFGAISSVLNDILSRLDKVEAEVQIDRLITGRLQSLQTYVTQQLIRAAEIRASANLAATKMSECVLGQSKRVDFCGKGYHLMSFPQSAPHGVVFLHVTYVPAQEKNFTTAPAICHDGKAHFPREGVFVSNGTHWFVTQRNFYEPQIITTDNTFVSGNCDVVIGIVNNTVYDPLQPELDSFKEELDKYFKNHTSPDVDLGDISGINASVVNIQKEIDRLNEVAKNLNESLIDLQELGKYEQYIKWPWYIWLGFIAGLIAIVMVTIMLCCMTSCCSCLKGCCSCGSCCKFDEDDSEPVLKGVKLHYT

SEQ ID NO: 314 - protein, 1273 aa, Artificial Sequence
  SARS-CoV-2/USA/WA-UW292/2020__EPI_ISL_418077 spike protein (1-1273)
MFVFLVLLPLVSSQCVNLTTRTQLPPAYTNSFTRGVYYPDKVFRSSVLHSTQDLFLPFFSNVTWFHAIHVSGTNGTKRFDNPVLPFNDGVYFASTEKSNIIRGWIFGTTLDSKTQSLLIVNNATNVVIKVCEFQFCNDPFLGVYYHKNNKSWMESEFRVYSSANNCTFEYVSQPFLMDLEGKQGNFKNLREFVFKNIDGYFKIYSKHTPINLVRDLPQGFSALEPLVDLPIGINITRFQTLLALHRSYLTPGDSSSGWTAGAAAYYVGYLQPRTFLLKYNENGTITDAVDCALDPLSETKCTLKSFTVEKGIYQTSNFRVQPTESIVRFPNITNLCPFGEVFNATRFASVYAWNRKRISNCVADYSVLYNSASFSTFKCYGVSPTKLNDLCFTNVYADSFVIRGDEVRQIAPGQTGKIADYNYKLPDDFTGCVIAWNSNNLDSKVGGNYNYLYRLFRKSNLKPFERDISTEIYQASSTPCNGVEGFNCYFPLQSYGFQPTNGVGYQPYRVVVLSFELLHAPATVCGPKKSTNLVKNKCVNFNFNGLTGTGVLTESNKKFLPFQQFGRDIADTTDAVRDPQTLEILDITPCSFGGVSVITPGTNTSNQVAVLYQDVNCTEVPVAIHADQLTPTWRVYSTGSNVFQTRAGCLIGAEHVNNSYECDIPIGAGICASYQTQTNSPRRARSVASQSIIAYTMSLGAENSVAYSNNSIAIPTNFTISVTTEILPVSMTKTSVDCTMYICGDSTECSNLLLQYGSFCTQLNRALTGIAVEQDKNTQEVFAQVKQIYKTPPIKDFGGFNFSQILPDPSKPSKRSFIEDLLFNKVTLADAGFIKQYGDCLGDIAARDLICAQKFNGLTVLPPLLTDEMIAQYTSALLAGTITSGWTFGAGAALQIPFAMQMAYRFNGIGVTQNVLYENQKLIANQFNSAIGKIQDSLSSTASALGKLQDVVNQNAQALNTLVKQLSSNFGAISSVLNDILSRLDKVEAEVQIDRLITGRLQSLQTYVTQQLIRAAEIRASANLAATKMSECVLGQSKRVDFCGKGYHLMSFPQSAPHGVVFLHVTYVPAQEKNFTTAPAICHDGKAHFPREGVFVSNGTHWFVTQRNFYEPQIITTDNTFVSGNCDVVIGIVNNTVYDPLQPELDSFKEELDKYFKNHTSPDVDLGDISGINASVVNIQKEIDRLNEVAKNLNESLIDLQELGKYEQYIKWPWYIWLGFIAGLIAIVMVTIMLCCMTSCCSCLKGCCSCGSCCKFDEDDSEPVLKGVKLHYT

SEQ ID NO: 315 - protein, 1273 aa, Artificial Sequence
  SARS-CoV-2/Iceland/192/2020__EPI_ISL_417819 spike protein (1-1273)
MFVFFVLLPLVSSQCVNLTTRTQLPPAYTNSFTRGVYYPDKVFRSSVLHSTQDLFLPFFSNVTWFHAIHVSGTNGTKRFDNPVLPFNDGVYFASTEKSNIIRGWIFGTTLDSKTQSLLIVNNATNVVIKVCEFQFCNDPFLGVYYHKNNKSWMESEFRVYSSANNCTFEYVSQPFLMDLEGKQGNFKNLREFVFKNIDGYFKIYSKHTPINLVRDLPQGFSALEPLVDLPIGINITRFQTLLALHRSYLTPGDSSSGWTAGAAAYYVGYLQPRTFLLKYNENGTITDAVDCALDPLSETKCTLKSFTVEKGIYQTSNFRVQPTESIVRFPNITNLCPFGEVFNATRFASVYAWNRKRISNCVADYSVLYNSASFSTFKCYGVSPTKLNDLCFTNVYADSFVIRGDEVRQIAPGQTGKIADYNYKLPDDFTGCVIAWNSNNLDSKVGGNYNYLYRLFRKSNLKPFERDISTEIYQAGSTPCNGVEGFNCYFPLQSYGFQPTNGVGYQPYRVVVLSFELLHAPATVCGPKKSTNLVKNKCVNFNFNGLTGTGVLTESNKKFLPFQQFGRDIADTTDAVRDPQTLEILDITPCSFGGVSVITPGTNTSNQVAVLYQGVNCTEVPVAIHADQLTPTWRVYSTGSNVFQTRAGCLIGAEHVNNSYECDIPIGAGICASYQTQTNSPRRARSVASQSIIAYTMSLGAENSVAYSNNSIAIPTNFTISVTTEILPVSMTKTSVDCTMYICGDSTECSNLLLQYGSFCTQLNRALTGIAVEQDKNTQEVFAQVKQIYKTPPIKDFGGFNFSQILPDPSKPSKRSFIEDLLFNKVTLADAGFIKQYGDCLGDIAARDLICAQKFNGLTVLPPLLTDEMIAQYTSALLAGTITSGWTFGAGAALQIPFAMQMAYRFNGIGVTQNVLYENQKLIANQFNSAIGKIQDSLSSTASALGKLQDVVNQNAQALNTLVKQLSSNFGAISSVLNDILSRLDKVEAEVQIDRLITGRLQSLQTYVTQQLIRAAEIRASANLAATKMSECVLGQSKRVDFCGKGYHLMSFPQSAPHGVVFLHVTYVPAQEKNFTTAPAICHDGKAHFPREGVFVSNGTHWFVTQRNFYEPQIITTDNTFVSGNCDVVIGIVNNTVYDPLQPELDSFKEELDKYFKNHTSPDVDLGDISGINASVVNIQKEIDRLNEVAKNLNESLIDLQELGKYEQYIKWPWYIWLGFIAGLIAIVMVTIMLCCMTSCCSCLKGCCSCGSCCKFDEDDSEPVLKGVKLHYT

SEQ ID NO: 316 - protein, 1273 aa, Artificial Sequence
  SARS-CoV-2/Belgium/ULG-6939/2020__EPI_ISL_417020 spike protein (1-1273)
MFVFLVLLPLVSSQCVNLTTRTQLPPAYTNSFTRGVYYPDKVFRSSVLHSTQDLFLPFFSNVTWFHAIHVSGTNGTKRFDNPVLPFNDGVYFASTEKSNIIRGWIFGTTLDSKTQSLLIVNNATNVVIKVCEFQFCNDPFLGVYYHKNNKSWMESEFRVYSSANNCTFEYVSQPFLMDLEGKQGNFKNLREFVFKNIDGYFKIYSKHTPINLVRDLPQGFSALEPLVDLPIGINITRFQTLLALHRSYLTPGDSSSGWTAGAAAYYVGYLQPRTFLLKYNENGTITDAVDCALDPLSETKCTLKSFTVEKGIYQTSNFRVQPTESIVRFPNITNLCPFGEVFNATRFASVYAWNRKRISNCVADYSVLYNSASFSTFKCYGVSPTKLNDLCFTNVYADSFVIRGDEVRQIAPGQTGKIADYNYKLPDDFTGCVIAWNSNNLDSKVGGNYNYLYRLFRKSNLKPFERDISTEIYQAGSTPCNGVEGFNCYFPLQSYGFQPTNGVGYQPYRVVVLSFELLHAPATVCGPKKSTNLVKNKCVNFNFNGLTGTGVLTESNKKFLPFQQFGRDIADTTDAVRDPQTLEILDITPCSFGGVSVITPGTNTSNQVAVLYQGVNCTEVPVAIHADQLTPTWRVYSTGSNVFQTRAGCLIGAEHVNNSYECDIPIGAGICASYQTQTNSPRRARSVASQSIIAYTMSLGAENSVVYSNNSIAIPTNFTISVTTEILPVSMTKTSVDCTMYICGDSTECSNLLLQYGSFCTQLNRALTGIAVEQDKNTQEVFAQVKQIYKTPPIKDFGGFNFSQILPDPSKPSKRSFIEDLLFNKVTLADAGFIKQYGDCLGDIAARDLICAQKFNGLTVLPPLLTDEMIAQYTSALLAGTITSGWTFGAGAALQIPFAMQMAYRFNGIGVTQNVLYENQKLIANQFNSAIGKIQDSLSSTASALGKLQDVVNQNAQALNTLVKQLSSNFGAISSVLNDILSRLDKVEAEVQIDRLITGRLQSLQTYVTQQLIRAAEIRASANLAATKMSECVLGQSKRVDFCGKGYHLMSFPQSAPHGVVFLHVTYVPAQEKNFTTAPAICHDGKAHFPREGVFVSNGTHWFVTQRNFYEPQIITTDNTFVSGNCDVVIGIVNNTVYDPLQPELDSFKEELDKYFKNHTSPDVDLGDISGINASVVNIQKEIDRLNEVAKNLNESLIDLQELGKYEQYIKWPWYIWLGFIAGLIAIVMVTIMLCCMTSCCSCLKGCCSCGSCCKFDEDDSEPVLKGVKLHYT

SEQ ID NO: 317 - protein, 1273 aa, Artificial Sequence
  SARS-CoV-2/France/HF2496/2020__EPI_ISL_418231 spike protein (1-1273)
MFVFLVLLPLVSSQCVNLTTRTQLPPAYTNSFTRGVYYPDKVFRSSVLHSTQDLFLPFFSNVTWFHAIHVSGTNGTKRFDNPVLPFNDGVYFASTEKSNIIRGWIFGTTLDSKTQSLLIVNNATNVVIKVCEFQFCNDPFLGVYYHKNNKSWMESEFRVYSSANNCTFEYVSQPFLMDLEGKQGNFKNLREFVFKNIDGYFKIYSKHTPINLVRDLPQGFSALEPLVDLPIGINITRFQTLLALHRSYLTPGDSSSGWTAGAAAYYVGYLQPRTFLLKYNENGTITDAVDCALDPLSETKCTLKSFTVEKGIYQTSNFRVQPTESIVRFPNITNLCPFGEVFNATRFASVYAWNRKRISNCVADYSVLYNSASFSTFKCYGVSPTKLNDLCFTNVYADSFVIRGDEVRQIAPGQTGKIADYNYKLPDDFTGCVIAWNSNNLDSKVGGNYNYLYRLFRKSNLKPFERDISTEIYQAGSTPCNGVEGFNCYFPLQSYGFQPTNGVGYQPYRVVVLSFELLHAPATVCGPKKSTNLVKNKCVNFNFNGLTGTGVLTESNKKFLPFQQFGRDIADTTDAVRDPQTLEILDITPCSFGGVSVITPGTNTSNQVAVLYQGVNCTEVPVAIHADQLTPTWRVYSTGSNVFQTRAGCLIGAEHVNNSYECDIPIGAGICASYQTQTNSPRRARSVASQSIIAYTMSLGAENSVAYSNNSIAIPTNFTISVTTEILPVSMTKTSVDCTMYICGDSTECSNLLLQYGSFCTQLNRALTGIAVEQDKNTQEVFAQVKQIYKTPPIKDFGGFNFSQILPDPSKPSKRSFIEDLLFNKVTLADAGFIKQYGDCLGDIVARDLICAQKFNGLTVLPPLLTDEMIAQYTSALLAGTITSGWTFGAGAALQIPFAMQMAYRFNGIGVTQNVLYENQKLIANQFNSAIGKIQDSLSSTASALGKLQDVVNQNAQALNTLVKQLSSNFGAISSVLNDILSRLDKVEAEVQIDRLITGRLQSLQTYVTQQLIRAAEIRASANLAATKMSECVLGQSKRVDFCGKGYHLMSFPQSAPHGVVFLHVTYVPAQEKNFTTAPAICHDGKAHFPREGVFVSNGTHWFVTQRNFYEPQIITTDNTFVSGNCDVVIGIVNNTVYDPLQPELDSFKEELDKYFKNHTSPDVDLGDISGINASVVNIQKEIDRLNEVAKNLNESLIDLQELGKYEQYIKWPWYIWLGFIAGLIAIVMVTIMLCCMTSCCSCLKGCCSCGSCCKFDEDDSEPVLKGVKLHYT

SEQ ID NO: 318 - protein, 1273 aa, Artificial Sequence
  SARS-CoV-2/USA/WA-UW291/2020__EPI_ISL_418076 spike protein (1-1273)
MFVFLVLLPLVSSQCVNLTTRTQLPPAYTNSFTRGVYYPDKVFRSSVLHSTQDLFLPFFSNVTWFHAIHVSGTNGTKRFDNPVLPFNDGVYFASTEKSNIIRGWIFGTTLDSKTQSLLIVNNATNVVIKVCEFQFCNDPFLGVYYHKNNKSWMESEFRVYSSANNCTFEYVSQPFLMDLEGKQGNFKNLREFVFKNIDGYFKIYSKHTPINLVRDLPQGFSALEPLVDLPIGINITRFQTLLALHRSYLTPGDSSSGWTAGAAAYYVGYLQPRTFLLKYNENGTITDAVDCALDPLSETKCTLKSFTVEKGIYQTSNFRVQPTESIVRFPNITNLCPFGEVFNATRFASVYAWNRKRISNCVADYSVLYNSASFSTFKCYGVSPTKLNDLCFTNVYADSFVIRGDEVRQIAPGQTGKIADYNYKLPDDFTGCVIAWNSNNLDSKVGGNYNYLYRLFRKSNLKPFERDISTEIYQAGSTPCNGVEGFNCYFPLQSYGFQPTNGVGYQPYRVVVLSFELLHAPATVCGPKKSTNLVKNKCVNFNFNGLTGTGVLTESNKKFLPFQQFGRDIADTTDAVRDPQTLEILDITPCSFGGVSVITPGTNTSNQVAVLYQGVNCTEVPVAIHADQLTPTWRVYSTGSNVFQTRAGCLIGAEHVNNSYECDIPIGAGICASYQTQTNSPRRARSVASQSIIAYTMSLGAENSVAYSNNSIAIPTNFTISVTTEILPVSMTKTSVDCTMYICGDSTECSNLLLQYGSFCTQLNRALTGIAVEQDKNTQEVFAQVKQIYKTPPIKDFGGFNFSQILPDPSKPSKRSFIEDLLFNKVTLADAGFIKQYGDCLGDIAARDLICAQKFNGLTVLPPLLTDEMIAQYTSALLAGTITSGWTFGAGAALQIPFAMQMAYRFNGIGVTQNVLYENQKLIANQFNSAIGKIQYSLSSTASALGKLQDVVNQNAQALNTLVKQLSSNFGAISSVLNDILSRLDKVEAEVQIDRLITGRLQSLQTYVTQQLIRAAEIRASANLAATKMSECVLGQSKRVDFCGKGYHLMSFPQSAPHGVVFLHVTYVPAQEKNFTTAPAICHDGKAHFPREGVFVSNGTHWFVTQRNFYEPQIITTDNTFVSGNCDVVIGIVNNTVYDPLQPELDSFKEELDKYFKNHTSPDVDLGDISGINASVVNIQKEIDRLNEVAKNLNESLIDLQELGKYEQYIKWPWYIWLGFIAGLIAIVMVTIMLCCMTSCCSCLKGCCSCGSCCKFDEDDSEPVLKGVKLHYT

SEQ ID NO: 319 - protein, 1273 aa, Artificial Sequence
  SARS-CoV-2/Portugal/PT0034/2020__EPI_ISL_418019 spike protein (1-1273)
MFVFLVLLPLVSSQCVNLTTRTQLPPAYTNSFTRGVYYPDKVFRSSVLHSTQDLFLPFFSNVTWFHAIHVSGTNGTKRFDNPVLPFNDGVYFASTEKSNIIRGWIFGTTLDSKTQSLLIVNNATNVVIKVCEFQFCNDPFLGVYYHKNNKSWMESEFRVYSSANNCTFEYVSQPFLMDLEGKQGNFKNLREFVFKNIDGYFKIYSKHTPINLVRDLPQGFSALEPLVDLPIGINITRFQTLLALHRSYLTPGDSSSGWTAGAAAYYVGYLQPRTFLLKYNENGTITDAVDCALDPLSETKCTLKSFTVEKGIYQTSNFRVQPTESIVRFPNITNLCPFGEVFNATRFASVYAWNRKRISNCVADYSVLYNSASFSTFKCYGVSPTKLNDLCFTNVYADSFVIRGDEVRQIAPGQTGKIADYNYKLPDDFTGCVIAWNSNNLDSKVGGNYNYLYRLFRKSNLKPFERDISTEIYQAGSTPCNGVEGFNCYFPLQSYGFQPTNGVGYQPYRVVVLSFELLHAPATVCGPKKSTNLVKNKCVNFNFNGLTGTGVLTESNKKFLPFQQFGRDIADTTDAVRDPQTLEILDITPCSFGGVSVITPGTNTSNQVAVLYQGVNCTEVPVAIHADQLTPTWRVYSTGSNVFQTRAGCLIGAEHVNNSYECDIPIGAGICASYQTQTNSPRRARSVASQSIIAYTMSLGAENSVAYSNNSIAIPTNFTISVTTEILPVSMTKTSVDCTMYICGDSTECSNLLLQYGSFCTQLNRALTGIAVEQDKNTQEVFAQVKQIYKTPPIKDFGGFNFSQILPDPSKPSKRSFIEDLLFNKVTLADAGFIKQYGDCLGDIAARDLICAQKFNGLTVLPPLLTDEMIAQYTSALLAGTITSGWTFGAGAALQIPFAMQMAYRFNGIGVTQNVLYENQKLIANQFNSAIGKIQDSLSSTASALGKLQDVVNQNAQALNTLVKQLSSNFGAISSVLNDILSRLDKVEAEVQIDRLITGRLQSLQTYVTQQLIRAAEIRASANLAATKMSECVLGQSKRVDFCGKGYHLMSFPQSAPHGVVFLHVTYVPAQEKNFTTAPAICHDGKAHFPREGVFVSNGTHWFVTQRNFYEPQIITTDNTFVSGNCDVVIGIVNNTVYDPLQPELDSFKEELDKYFKNHTSPDVDLGDISGINASVVNIQKEIDRLNEVAKNLNESLIDLQELGKYEQYIKWPWYIWLGFIAGLIAIVMVTIMLCCITSCCSCLKGCCSCGSCCKFDEDDSEPVLKGVKLHYT

SEQ ID NO: 320 - protein, 1273 aa, Artificial Sequence
  SARS-CoV-2/Iceland/202/2020__EPI_ISL_417750 spike protein (1-1273)
MFVFLVLLPLVSSQCVNLTTRTQLPPAYTNSFTRGVYYPDKVFRSSVLHSTQDLFLPFFSNVTWFHAIHVSGTNGTKRFDNPVLPFNDGVYFASTEKSNIIRGWIFGTTLDSKTQSLLIVNNATNVVIKVCEFQFCNDPFLGVYYHKNNKSWMESEFRVYSSANNCTFEYVSQPFLMDLEGKQGNFKNLREFVFKNIDGYFKIYSKHTPINLVRDLPQGFSALEPLVDLPIGINITRFQTLLALHRSYLTPGDSSSGWTAGAAAYYVGYLQPRTFLLKYNENGTITDAVDCALDPLSETKCTLKSFTVEKGIYQTSNFRVQPTESIVRFPNITNLCPFGEVFNATRFASVYAWNRKRISNCVADYSVLYNSASFSTFKCYGVSPTKLNDLCFTNVYADSFVIRGDEVRQIAPGQTGKIADYNYKLPDDFTGCVIAWNSNNLDSKVGGNYNYLYRLFRKSNLKPFERDISTEIYQAGSTPCNGVEGFNCYFPLQSYGFQPTNGVGYQPYRVVVLSFELLHAPATVCGPKKSTNLVKNKCVNFNFNGLTGTGVLTESNKKFLPFQQFGRDIADTTDAVRDPQTLEILDITPCSFGGVSVITPGTNTSNQVAVLYQDVNCTEVPVAIHADQLTPTWRVYSTGSNVFQTRAGCLIGAEHVNNSYECDIPIGAGICASYQTQTNSPRRARSVASQSIIAYTMSLGAENSVAYSNNSIAIPTNFTISVTTEILPVSMTKTSVDCTMYICGDSTECSNLLLQYGSFCTQLNRALTGIAVEQDKNTQEVFAQVKQIYKTPPIKDFGGFNFSQILPDPSKPSKRSFIEDLLFNKVTLADAGFIKQYGDCLGDIAARDLICAQKFNGLTVLPPLLTDEMIAQYTSALLAGTITSGWTFGAGAALQIPFAMQMAYRFNGIGVTQNVLYENQKLIANQFNSAIGKIQDSLSSTASALGKLQDVVNQNAQALNTLVKQLSSNFGAISSVLNDILSRLDKVEAEVQIDRLITGRLQSLQTYVTQQLIRAAEIRASANLAATKMSECVLGQSKRVDFCGKGYHLMSFPQSAPHGVVFLHVTYVPAQEKNFTTAPAICHDGKAHFPREGVFVSNGTHWFVTQRNFYEPQIITTDNTFVSGNCDVVIGIVNNTVYDPLQPELDSFKEELDKYFKNHTSPDVDLGDIPGINASVVNIQKEIDRLNEVAKNLNESLIDLQELGKYEQYIKWPWYIWLGFIAGLIAIVMVTIMLCCMTSCCSCLKGCCSCGSCCKFDEDDSEPVLKGVKLHYT

SEQ ID NO: 321 - protein, 1273 aa, Artificial Sequence
  SARS-CoV-2/USA/WA-UW261/2020__EPI_ISL_418046 spike protein (1-1273)
MFVFLVLLPLVSSQCVNLTTRTQLPPAYTNSFTRGVYYPDKVFRSSVLHSTQDLFLPFFSNVTWFHAIHVSGTNGTKRFDNPVLPFNDGVYFASTEKSNIIRGWIFGTTLDSKTQSLLIVNNATNVVIKVCEFQFCNDPFLGVYYHKNNKSWMESEFRVYSSANNCTFEYVSQPFLMDLEGKQGNFKNLREFVFKNIDGYFKIYSKHTPINLVRDLPQGFSALEPLVDLPIGINITRFQTLLALHRSYLTPGDSSSGWTAGAAAYYVGYLQPRTFLLKYNENGTITDAVDCALDPLSETKCTLKSFTVEKGIYQTSNFRVQPTESIVRFPNITNLCPFGEVFNATRFTSVYAWNRKRISNCVADYSVLYNSASFSTFKCYGVSPTKLNDLCFTNVYADSFVIRGDEVRQIAPGQTGKIADYNYKLPDDFTGCVIAWNSNNLDSKVGGNYNYLYRLFRKSNLKPFERDISTEIYQAGSTPCNGVEGFNCYFPLQSYGFQPTNGVGYQPYRVVVLSFELLHAPATVCGPKKSTNLVKNKCVNFNFNGLTGTGVLTESNKKFLPFQQFGRDIADTTDAVRDPQTLEILDITPCSFGGVSVITPGTNTSNQVAVLYQDVNCTEVPVAIHADQLTPTWRVYSTGSNVFQTRAGCLIGAEHVNNSYECDIPIGAGICASYQTQTNSPRRARSVASQSIIAYTMSLGAENSVAYSNNSIAIPTNFTISVTTEILPVSMTKTSVDCTMYICGDSTECSNLLLQYGSFCTQLNRALTGIAVEQDKNTQEVFAQVKQIYKTPPIKDFGGFNFSQILPDPSKPSKRSFIEDLLFNKVTLADAGFIKQYGDCLGDIAARDLICAQKFNGLTVLPPLLTDEMIAQYTSALLAGTITSGWTFGAGAALQIPFAMQMAYRFNGIGVTQNVLYENQKLIANQFNSAIGKIQDSLSSTASALGKLQDVVNQNAQALNTLVKQLSSNFGAISSVLNDILSRLDKVEAEVQIDRLITGRLQSLQTYVTQQLIRAAEIRASANLAATKMSECVLGQSKRVDFCGKGYHLMSFPQSAPHGVVFLHVTYVPAQEKNFTTAPAICHDGKAHFPREGVFVSNGTHWFVTQRNFYEPQIITTDNTFVSGNCDVVIGIVNNTVYDPLQPELDSFKEELDKYFKNHTSPDVDLGDISGINASVVNIQKEIDRLNEVAKNLNESLIDLQELGKYEQYIKWPWYIWLGFIAGLIAIVMVTIMLCCMTSCCSCLKGCCSCGSCCKFDEDDSEPVLKGVKLHYT

SEQ ID NO: 322 - protein, 1273 aa, Artificial Sequence
  SARS-CoV-2/Portugal/PT0035/2020__EPI_ISL_418020 spike protein (1-1273)
MFVFLVLLPLVSSQCVNLTTRTQLPPAYTNSFTRGVYYPDKVFRSSVLHSTQDLFLPFFSNVTWFHAIHVSGTNGTKRFDNPVLPFNDGVYFASTEKSNIIRGWIFGTTLDSKTQSLLIVNNATNVVIKVCEFQFCNDPFLGVYYHKNNKSWMESEFRVYSSANNCTFEYVSQPFLMDLEGKQGNFKNLREFVFKNIDGYFKIYSKHTPINLVRDLPQGFSALEPLVDLPIGINITRFQTLLALHRSYLTPGDSSSGWTAGAAAYYVGYLQPRTFLLKYNENGTITDAVDCALDPLSETKCTLKSFTVEKGIYQTSNFRVQPTESIVRFPNITNLCPFGEVFNATRFASVYAWNRKRISNCVADYSVLYNSASFSTFKCYGVSPTKLNDLCFTNVYADSFVIRGDEVRQIAPGQTGKIADYNYKLPDDFTGCVIAWNSNNLDSKVGGNYNYLYRLFRKSNLKPFERDISTEIYQAGSTPCNGVEGFNCYFPLQSYGFQPTNGVGYQPYRVVVLSFELLHAPATVCGPKKSTNLVKNKCVNFNFNGLTGTGVLTESNKKFLPFQQFGRDIADTTDAVRDPQTLEILDITPCSFGGVSVITPGTNTSNQVAVLYQDVNCTEVPVAIHADQLTPTWRVYSTGSNVFQTRAGCLIGAEHVNNSYECDIPIGAGICASYQTQTNSPRRARSVASQSIIAYTMSLGAENSVAYSNNSIAIPTNFTISVTTEILPVSMTKTSVDCTMYICGDSTECSNLLLQYGSFCTQLNRALTGIAVEQDKNTQEVFAQVKQIYKTPPIKDFGGFNFSQILPDPSKPSKRSFIEDLLFNKVTLADAGFIKQYGDCLGDISARDLICAQKFNGLTVLPPLLTDEMIAQYTSALLAGTITSGWTFGAGAALQIPFAMQMAYRFNGIGVTQNVLYENQKLIANQFNSAIGKIQDSLSSTASALGKLQDVVNQNAQALNTLVKQLSSNFGAISSVLNDILSRLDKVEAEVQIDRLITGRLQSLQTYVTQQLIRAAEIRASANLAATKMSECVLGQSKRVDFCGKGYHLMSFPQSAPHGVVFLHVTYVPAQEKNFTTAPAICHDGKAHFPREGVFVSNGTHWFVTQRNFYEPQIITTDNTFVSGNCDVVIGIVNNTVYDPLQPELDSFKEELDKYFKNHTSPDVDLGDISGINASVVNIQKEIDRLNEVAKNLNESLIDLQELGKYEQYIKWPWYIWLGFIAGLIAIVMVTIMLCCMTSCCSCLKGCCSCGSCCKFDEDDSEPVLKGVKLHYT

SEQ ID NO: 323 - protein, 1273 aa, Artificial Sequence
  SARS-CoV-2/USA/NY-NYUMC7/2020__EPI_ISL_418192 spike protein (1-1273)
MFVFLVLLPLVSSQCVNLTTRTQLPPAYTNSFTRGVYYPDKVFRSSVLHSTQDLFLPFFSNVTWFHAIHVSGTNGTKRFDNPVLPFNDGVYFASTEKSNIIRGWIFGTTLDSKTQSLLIVNNATNVVIKVCEFQFCNDPFLGVYHHKNNKSWMESEFRVYSSANNCTFEYVSQPFLMDLEGKQGNFKNLREFVFKNIDGYFKIYSKHTPINLVRDLPQGFSALEPLVDLPIGINITRFQTLLALHRSYLTPGDSSSGWTAGAAAYYVGYLQPRTFLLKYNENGTITDAVDCALDPLSETKCTLKSFTVEKGIYQTSNFRVQPTESIVRFPNITNLCPFGEVFNATRFASVYAWNRKRISNCVADYSVLYNSASFSTFKCYGVSPTKLNDLCFTNVYADSFVIRGDEVRQIAPGQTGKIADYNYKLPDDFTGCVIAWNSNNLDSKVGGNYNYLYRLFRKSNLKPFERDISTEIYQAGSTPCNGVEGFNCYFPLQSYGFQPTNGVGYQPYRVVVLSFELLHAPATVCGPKKSTNLVKNKCVNFNFNGLTGTGVLTESNKKFLPFQQFGRDIADTTDAVRDPQTLEILDITPCSFGGVSVITPGTNTSNQVAVLYQGVNCTEVPVAIHADQLTPTWRVYSTGSNVFQTRAGCLIGAEHVNNSYECDIPIGAGICASYQTQTNSPRRARSVASQSIIAYTMSLGAENSVAYSNNSIAIPTNFTISVTTEILPVSMTKTSVDCTMYICGDSTECSNLLLQYGSFCTQLNRALTGIAVEQDKNTQEVFAQVKQIYKTPPIKDFGGFNFSQILPDPSKPSKRSFIEDLLFNKVTLADAGFIKQYGDCLGDIAARDLICAQKFNGLTVLPPLLTDEMIAQYTSALLAGTITSGWTFGAGAALQIPFAMQMAYRFNGIGVTQNVLYENQKLIANQFNSAIGKIQDSLSSTASALGKLQDVVNQNAQALNTLVKQLSSNFGAISSVLNDILSRLDKVEAEVQIDRLITGRLQSLQTYVTQQLIRAAEIRASANLAATKMSECVLGQSKRVDFCGKGYHLMSFPQSAPHGVVFLHVTYVPAQEKNFTTAPAICHDGKAHFPREGVFVSNGTHWFVTQRNFYEPQIITTDNTFVSGNCDVVIGIVNNTVYDPLQPELDSFKEELDKYFKNHTSPDVDLGDISGINASVVNIQKEIDRLNEVAKNLNESLIDLQELGKYEQYIKWPWYIWLGFIAGLIAIVMVTIMLCCMTSCCSCLKGCCSCGSCCKFDEDDSEPVLKGVKLHYT

SEQ ID NO: 324 - protein, 1273 aa, Artificial Sequence
  SARS-CoV-2/Iceland/189/2020__EPI_ISL_417709 spike protein (1-1273)
MFVFLVLLPLVSSQCVNLTTRTQLPPAYTNSFTRGVYYPDKVFRSSVLHSTQDLFLPFFSNVTWFHAIHVSGTNGTKRFDNPVLPFNDGVYFASTEKSNIIRGWIFGTTLDSKTQSLLIVNNATNVVIKVCEFQFCNDPFLGVYYHKNNKSWMESEFRVYSSANNCTFEYVSQPFLMDLEGKQGNFKNLREFVFKNIDGYFKIYSKHTPINLVRDLPQGFSALEPLVDLPIGINITRFQTLLALHRSYLTPGDSSSGWTAGAAAYYVGYLQPRTFLLKYNENGTITDAVDCALDPLSETKCTLKSFTVEKGIYQTSNFRVQPTESIVRFPNITNLCPFGEVFNATRFASVYAWNRKRISNCVADYSVLYNSASFSTFKCYGVSPTKLNDLCFTNVYADSFVIRGDEVRQIAPGQTGKIADYNYKLPDDFTGCVIAWNSNNLDSKVGGNYNYLYRLFRKSNLKPFERDISTEIYQAGSTPCNGVEGFNCYFPLQSYGFQPTNGVGYQPYRVVVLSFELLHAPATVCGPKKSTNLVKNKCVNFNFNGLTGTGVLTESNKKFLPFQQFGRDIADTTDAVRDPQTLEILDITPCSFGGVSVITPGTNTSNQVAVLYQGVNCTEVPVAIHADQLTPTWRVYSTGSNVFQTRAGCLIGAEHVNNSYECDIPIGAGICASYQTQTNSPRRARSVASQSIIAYTMSLGAENSVAYSNNSIAIPTNFTISVTTEILPVSMTKTSVDCTMYICGDSTECSNLLLQYGSFCTQLNRALTGIAVEQDKNTQEVFAQVKQIYKTPPIKDFGGFNFSQILPDPSKPSKRSFIEDLLFNKVTLADAGFTKQYGDCLGDIAARDLICAQKFNGLTVLPPLLTDEMIAQYTSALLAGTITSGWTFGAGAALQIPFAMQMAYRFNGIGVTQNVLYENQKLIANQFNSAIGKIQDSLSSTASALGKLQDVVNQNAQALNTLVKQLSSNFGAISSVLNDILSRLDKVEAEVQIDRLITGRLQSLQTYVTQQLIRAAEIRASANLAATKMSECVLGQSKRVDFCGKGYHLMSFPQSAPHGVVFLHVTYVPAQEKNFTTAPAICHDGKAHFPREGVFVSNGTHWFVTQRNFYEPQIITTDNTFVSGNCDVVIGIVNNTVYDPLQPELDSFKEELDKYFKNHTSPDVDLGDISGINASVVNIQKEIDRLNEVAKNLNESLIDLQELGKYEQYIKWPWYIWLGFIAGLIAIVMVTIMLCCMTSCCSCLKGCCSCGSCCKFDEDDSEPVLKGVKLHYT

SEQ ID NO: 325 - protein, 1273 aa, Artificial Sequence
  SARS-CoV-2/Australia/NSW56/2020__EPI_ISL_417408 spike protein (1-1273)
MFVFLVLLPLVSSQCVNLTTRTQLPPAYTNSFTRGVYYPDKVFRSSVLHSTQDLFLPFFSNVTWFHAIHVSGTNGTKRFDNPVLPFNDGVYFASTEKSNIIRGWIFGTTLDSKTQSLLIVNNATNVVIKVCEFQFCNDPFLGVYYHKNNKSWMESEFRVYSSANNCTFEYVSQPFLMDLEGKQGNFKNLREFVFKNIDGYFKIYSKHTPINLVRDLPQGFSALEPLVDLPIGINITRFQTLLALHRSYLTPGDSSSGWTAGAAAYYVGYLQPRTFLLKYNENGTITDAVDCALDPLSETKCTLKSFTVEKGIYQTSNFRVQPTESIVRFPNITNLCPFGEVFNATRFASVYAWNRKRISNCVADYSVLYNSASFSTFKCYGVSPTKLNDLCFTNVYADSFVIRGDEVRQIAPGQTGKIADYNYKLPDDFTGCVIAWNSNNLDSKVGGNYNYLYRLFRKSNLKPFERDISTEIYQAGSTPCNGVEGFNCYFPLQSYGFQPTNGVGYQPYRVVVLSFELLHAPATVCGPKKSTNLVKNKCVNFNFNGLTGTGVLTESNKKFLPFQQFGRDIADTTDAVRDPQTLEILDITPCSFGGVSVITPGTNTSNQVAVLYQDVNCTEVPVAIHADQLTPTWRVYSTGSNVFQTRAGCLIGAEHVNNSYECDIPIGAGICASYQTQTNSPRRARSVASQSIIAYTMSLGAENSVAYSNNSIAIPTNFTISVTTEILPVSMTKTSVDCTMYICGDSTECSNLLLQYGSFCTQLNRALTGIAVEQDKNTQEVFAQVKQIYKTPPIKDFGGFNFSQILPDSSKPSKRSFIEDLLFNKVTLADAGFIKQYGDCLGDIAARDLICAQKFNGLTVLPPLLTDEMIAQYTSALLAGTITSGWTFGAGAALQIPFAMQMAYRFNGIGVTQNVLYENQKLIANQFNSAIGKIQDSLSSTASALGKLQDVVNQNAQALNTLVKQLSSNFGAISSVLNDILSRLDKVEAEVQIDRLITGRLQSLQTYVTQQLIRAAEIRASANLAATKMSECVLGQSKRVDFCGKGYHLMSFPQSAPHGVVFLHVTYVPAQEKNFTTAPAICHDGKAHFPREGVFVSNGTHWFVTQRNFYEPQIITTDNTFVSGNCDVVIGIVNNTVYDPLQPELDSFKEELDKYFKNHTSPDVDLGDISGINASVVNIQKEIDRLNEVAKNLNESLIDLQELGKYEQYIKWPWYIWLGFIAGLIAIVMVTIMLCCMTSCCSCLKGCCSCGSCCKFDEDDSEPVLKGVKLHYT

SEQ ID NO: 326 - protein, 1273 aa, Artificial Sequence
  SARS-CoV-2/Iceland/280/2020__EPI_ISL_417608 spike protein (1-1273)
MFVFLVLLPLVSSQCVNLTTRTQLPPAYTNSFTRGVYYPDKVFRSSVLHSTQDLFLPFFSNVTWFHAIHVSGTNGTKRFDNPVLPFNDGVYFASTEKSNIIRGWIFGTTLDSKTQSLLIVNNATNVVIKVCEFQFCNDPFLGVYYHKNNKSWMESEFRVYSSANNCTFEYVSQPFLMDLEGKQGNFKNLREFVFKNIDGYFKIYSKHTPINLVRDLPQGFSALEPLVDLPIGINITRFQTLLALHRSYLTPGDSSSGWTAGAAAYYVGYLQPRTFLLKYNENGTITDAVDCALDPLSETKCTLKSFTVEKGIYQTSNFRVQPTESIVRFPNITNLCPFGEVFNATRFASVYAWNRKRISNCVADYSVLYNSASFSTFKCYGVSPTKLNDLCFTNVYADSFVIRGDEVRQIAPGQTGKIADYNYKLPDDFTGCVIAWNSNNLDSKVGGNYNYLYRLFRKSNLKPFERDISTEIYQAGSTPCNGVEGFNCYFPLQSYGFQPTNGVGYQPYRVVVLSFELLHAPATVCGPKKSTNLVKNKCVNFNFNGLTGTGVLTESNKKFLPFQQFGRDIADTTDAVRDPQTLEILDITPCSFGGVSVITPGTNTSNQVAVLYQGVNCTEVPVAIHADQLTPTWRVYSTGSNVFQTRAGCLIGAEHVNNSYECDIPIGAGICASYHTQTNSPRRARSVASQSIIAYTMSLGAENSVAYSNNSIAIPTNFTISVTTEILPVSMTKTSVDCTMYICGDSTECSNLLLQYGSFCTQLNRALTGIAVEQDKNTQEVFAQVKQIYKTPPIKDFGGFNFSQILPDPSKPSKRSFIEDLLFNKVTLADAGFIKQYGDCLGDIAARDLICAQKFNGLTVLPPLLTDEMIAQYTSALLAGTITSGWTFGAGAALQIPFAMQMAYRFNGIGVTQNVLYENQKLIANQFNSAIGKIQDSLSSTASALGKLQDVVNQNAQALNTLVKQLSSNFGAISSVLNDILSRLDKVEAEVQIDRLITGRLQSLQTYVTQQLIRAAEIRASANLAATKMSECVLGQSKRVDFCGKGYHLMSFPQSAPHGVVFLHVTYVPAQEKNFTTAPAICHDGKAHFPREGVFVSNGTHWFVTQRNFYEPQIITTDNTFVSGNCDVVIGIVNNTVYDPLQPELDSFKEELDKYFKNHTSPDVDLGDISGINASVVNIQKEIDRLNEVAKNLNESLIDLQELGKYEQYIKWPWYIWLGFIAGLIAIVMVTIMLCCMTSCCSCLKGCCSCGSCCKFDEDDSEPVLKGVKLHYT

SEQ ID NO: 327 - protein, 1273 aa, Artificial Sequence
  SARS-CoV-2/Iceland/247/2020__EPI_ISL_417575 spike protein (1-1273)
MFVFLVLLPLVSSQCVNLTTRTQLPPAYTNSFTRGVYYPDKVFRSSVLHSTQDLFLPFFSNVTWFHAIHVSGTNGTKRFDNPVLPFNDGVYFASTEKSNIIRGWIFGTTLDSKTQSLLIVNNATNVVIKVCEFQFCNDPFLGVYYHKNNKSWMESEFRVYSSANNCTFEYVSQPFLMDLEGKQGNFKNLREFVFKNIDGYFKIYSKHTPINLVRDLPQGFSALEPLVDLPIGINITRFQTLLALHRSYLTPGDSSSGWTAGAAAYYVGYLQPRTFLLKYNENGTITDAVDCALDPLSETKCTLKSFTVEKGIYQTSNFRVQPTESIVRFPNITNLCPFGEVFNATRFASVYAWNRKRISNCVADYSVLYNSASFSTFKCYGVSPTKLNDLCFTNVYADSFVIRGDEVRQIAPGQTGKIADYNYKLPDDFTGCVIAWNSNNLDSKVGGNYNYLYRLFRKSNLKPFERDISTEIYQAGSTPCNGVEGFNCYFPLQSYGFQPTNGVGYQPYRVVVLSFELLHAPATVCGPKKSTNLVKNKCVNFNFNGLTGTGVLTESNKKFLPFQQFGRDIADTTDAVRDPQTLEILDITPCSFGGVSVITPGTNTSNQVAVLYQGVNCTEVPVAIHADQLTPTWRVYSTGSNVFQTRAGCLIGAEHVNNSYECDIPIGAGICASYQTQTNSPRRARSVASQSIIAYTMSLGAENSVAYSNNSIAIPTNFTISVTTEILPVSMTKTSVDCTMYICGDSTECSNLLLQYGSFCTQLNRALTGIAVEQDKNTQEVFAQVKQIYKTPPIKDFGGFNFSQILPDPSKPSKRSFIEDLLFNKVTLADAGFIKQYGDCLGDIAARDLICAQKFNGLTVLPPLLTDEMIAQYTSALLAGTITSGWTFGAGAALQIPFAMQMAYRFNGIGVTQNVLYENQKLIANQFNSAIGKIQDSLSSTASALGKLQDVVNQNAQALNTLVKQLSSNFGAISSVLNDILSRLDKVEAEVQIDRLITGRLQSLQTYVTQQLIRAAEIRASANLAATKMSECVLGQSKRVDFCGKGYHLMSFPQSAPHGVVFLHVTYVPAQEKNFTTAPAICHDGKAHFPREGVFVSNGTHWFVTQRNFYEPQIITTDNTFVSGNCDVVIGIVNNTVYDPLQPELDSFKEELDKYFKNHTSPDVDLGDISGINASVVNIQKEIDRLNEVAKNLNESLIDLQELGKYEQYIKWPWYIWLGFIAGLIAIVIVTIMLCCMTSCCSCLKGCCSCGSCCKFDEDDSEPVLKGVKLHYT

SEQ ID NO: 328 - protein, 1273 aa, Artificial Sequence
  SARS-CoV-2/Iceland/238/2020__EPI_ISL_417566 spike protein (1-1273)
MFVFLVLLPLVSSQCVNLTTRTQLPPAYTNSFTRGVYYPDKVFRSSVLHSTQDLFLPFFSNVTWFHAIHVSGTNGTKRFDNPVLPFNDGVYFASTEKSNIIRGWIFGTTLDSKTQSLLIVNNATNVVIKVCEFQFCNDPFLGVYYHKNNKSWMESEFRVYSSANNCTFEYVSQPFLMDLEGKQGNFKNLREFVFKNIDGYFKIYSKHTPINLVRDLPQGFSALEPLVDLPIGINITRFQTLLALHRSYLTPGDSSSGWTAGAAAYYVGYLQPRTFLLKYNENGTITDAVDCALDPLSETKCTLKSFTVEKGIYQTSNFRVQPTESIVRFPNITNLCPFGEVFNATRFASVYAWNRKRISNCVADYSVLYNSASFSTFKCYGVSPTKLNDLCFTNVYADSFVIRGDEVRQIAPGQTGKIADYNYKLPDDFTGCVIAWNSNNLDSKVGGNYNYLYRLFRKSNLKPFERDISTEIYQAGSTPCNGVEGFNCYFPLQSYGFQPTNGVGYQPYRVVVLSFELLHAPATVCGPKKSTNLVKNKCVNFNFNGLTGTGVLTESNKKFLPFQQFGRDIADTTDAVRDPQTLEILDITPCSFGGVSVITPGTNTSNQVAVLYQGVNCTEVPVAIHADQLTPTWRVYSTGSNVFQTRAGCLIGAEHVNNSYECDIPIGAGICASYQTQTNSPRRARSVASQSIIAYTMSLGAENSVAYSNNSIAIPTNFTISVTTEILPVSMTKTSVDCTMYICGDSTECSNLLLQYGSFCTQLNRALTGIAVEQDKNTQEVFAQVKQIYKTPPIKDFGGFNFSQILPDPSKPSKRSFIEDLLFNKVTLADVGFIKQYGDCLGDIAARDLICAQKFNGLTVLPPLLTDEMIAQYTSALLAGTITSGWTFGAGAALQIPFAMQMAYRFNGIGVTQNVLYENQKLIANQFNSAIGKIQDSLSSTASALGKLQDVVNQNAQALNTLVKQLSSNFGAISSVLNDILSRLDKVEAEVQIDRLITGRLQSLQTYVTQQLIRAAEIRASANLAATKMSECVLGQSKRVDFCGKGYHLMSFPQSAPHGVVFLHVTYVPAQEKNFTTAPAICHDGKAHFPREGVFVSNGTHWFVTQRNFYEPQIITTDNTFVSGNCDVVIGIVNNTVYDPLQPELDSFKEELDKYFKNHTSPDVDLGDISGINASVVNIQKEIDRLNEVAKNLNESLIDLQELGKYEQYIKWPWYIWLGFIAGLIAIVMVTIMLCCMTSCCSCLKGCCSCGSCCKFDEDDSEPVLKGVKLHYT

SEQ ID NO: 329 - protein, 1273 aa, Artificial Sequence
  SARS-CoV-2/Greece/16/2020__EPI_ISL_418265 spike protein (1-1273)
MFVFLVLLPLVSSQCVNLTTRTQLPPAYTNSFTRGVYYPDKVFRSSVLHSTQDLFLPFFSNVTWFHAIHVSGTNGTKRFDNPVLPFNDGVYFASTEKSNIIRGWIFGTTLDSKTQSLLIVNNATNVVIKVCEFQFCNDPFLGVYYHKNNKSWMESEFRVYSSANNCTFEYVSQPFLMDLEGKQGNFKNLREFVFKNVDGYFKIYSKHTPINLVRDLPQGFSALEPLVDLPIGINITRFQTLLALHRSYLTPGDSSSGWTAGAAAYYVGYLQPRTFLLKYNENGTITDAVDCALDPLSETKCTLKSFTVEKGIYQTSNFRVQPTESIVRFPNITNLCPFGEVFNATRFASVYAWNRKRISNCVADYSVLYNSASFSTFKCYGVSPTKLNDLCFTNVYADSFVIRGDEVRQIAPGQTGKIADYNYKLPDDFTGCVIAWNSNNLDSKVGGNYNYLYRLFRKSNLKPFERDISTEIYQAGSTPCNGVEGFNCYFPLQSYGFQPTNGVGYQPYRVVVLSFELLHAPATVCGPKKSTNLVKNKCVNFNFNGLTGTGVLTESNKKFLPFQQFGRDIADTTDAVRDPQTLEILDITPCSFGGVSVITPGTNTSNQVAVLYQDVNCTEVPVAIHADQLTPTWRVYSTGSNVFQTRAGCLIGAEHVNNSYECDIPIGAGICASYQTQTNSPRRARSVASQSIIAYTMSLGAENSVAYSNNSIAIPTNFTISVTTEILPVSMTKTSVDCTMYICGDSTECSNLLLQYGSFCTQLNRALTGIAVEQDKNTQEVFAQVKQIYKTPPIKDFGGFNFSQILPDPSKPSKRSFIEDLLFNKVTLADAGFIKQYGDCLGDIAARDLICAQKFNGLTVLPPLLTDEMIAQYTSALLAGTITSGWTFGAGAALQIPFAMQMAYRFNGIGVTQNVLYENQKLIANQFNSAIGKIQDSLSSTASALGKLQDVVNQNAQALNTLVKQLSSNFGAISSVLNDILSRLDKVEAEVQIDRLITGRLQSLQTYVTQQLIRAAEIRASANLAATKMSECVLGQSKRVDFCGKGYHLMSFPQSAPHGVVFLHVTYVPAQEKNFTTAPAICHDGKAHFPREGVFVSNGTHWFVTQRNFYEPQIITTDNTFVSGNCDVVIGIVNNTVYDPLQPELDSFKEELDKYFKNHTSPDVDLGDISGINASVVNIQKEIDRLNEVAKNLNESLIDLQELGKYEQYIKWPWYIWLGFIAGLIAIVMVTIMLCCMTSCCSCLKGCCSCGSCCKFDEDDSEPVLKGVKLHYT

SEQ ID NO: 330 - protein, 1273 aa, Artificial Sequence
  SARS-CoV-2/Iceland/319/2020__EPI_ISL_417648 spike protein (1-1273)
MFVFLVLLPLVSSQCVNLTTRTQLPPAYTNSFTRGVYYPDKVFRSSVLHSTQDLFLPFFSNVTWFHAIHVSGTNGTKRFDNPVLPFNDGVYFASTEKSNIIRGWIFGTTLDSKTQSLLIVNNATNVVIKVCEFQFCNDPFLGVYYHKNNKSWMESEFRVYSSANNCTFEYVSQPFLIDLEGKQGNFKNLREFVFKNIDGYFKIYSKHTPINLVRDLPQGFSALEPLVDLPIGINITRFQTLLALHRSYLTPGDSSSGWTAGAAAYYVGYLQPRTFLLKYNENGTITDAVDCALDPLSETKCTLKSFTVEKGIYQTSNFRVQPTESIVRFPNITNLCPFGEVFNATRFASVYAWNRKRISNCVADYSVLYNSASFSTFKCYGVSPTKLNDLCFTNVYADSFVIRGDEVRQIAPGQTGKIADYNYKLPDDFTGCVIAWNSNNLDSKVGGNYNYLYRLFRKSNLKPFERDISTEIYQAGSTPCNGVEGFNCYFPLQSYGFQPTNGVGYQPYRVVVLSFELLHAPATVCGPKKSTNLVKNKCVNFNFNGLTGTGVLTESNKKFLPFQQFGRDIADTTDAVRDPQTLEILDITPCSFGGVSVITPGTNTSNQVAVLYQGVNCTEVPVAIHADQLTPTWRVYSTGSNVFQTRAGCLIGAEHVNNSYECDIPIGAGICASYQTQTNSPRRARSVASQSIIAYTMSLGAENSVAYSNNSIAIPTNFTISVTTEILPVSMTKTSVDCTMYICGDSTECSNLLLQYGSFCTQLNRALTGIAVEQDKNTQEVFAQVKQIYKTPPIKDFGGFNFSQILPDPSKPSKRSFIEDLLFNKVTLADAGFIKQYGDCLGDIAARDLICAQKFNGLTVLPPLLTDEMIAQYTSALLAGTITSGWTFGAGAALQIPFAMQMAYRFNGIGVTQNVLYENQKLIANQFNSAIGKIQDSLSSTASALGKLQDVVNQNAQALNTLVKQLSSNFGAISSVLNDILSRLDKVEAEVQIDRLITGRLQSLQTYVTQQLIRAAEIRASANLAATKMSECVLGQSKRVDFCGKGYHLMSFPQSAPHGVVFLHVTYVPAQEKNFTTAPAICHDGKAHFPREGVFVSNGTHWFVTQRNFYEPQIITTDNTFVSGNCDVVIGIVNNTVYDPLQPELDSFKEELDKYFKNHTSPDVDLGDISGINASVVNIQKEIDRLNEVAKNLNESLIDLQELGKYEQYIKWPWYIWLGFIAGLIAIVMVTIMLCCMTSCCSCLKGCCSCGSCCKFDEDDSEPVLKGVKLHYT

SEQ ID NO: 331 - protein, 1273 aa, Artificial Sequence
  SARS-CoV-2/Congo/94/2020__EPI_ISL_417947 spike protein (1-1273)
MFVFLVLLPLVSSQCVNLTTRTQLPPAYTNSFTRGVYYPDKVFRSSVLHSTQDLFLPFFSNVTWFHAIHVSGTNGTKRFDNPVLPFNDGVYFASTEKSNIIRGWIFGTTLDSKTQSLLIVNNATNVVIKVCEFQFCNDPFLGVYYHKNNKSWMESEFRVYSSANNCTFEYVSQPFLMDLEGKQGNFKNLREFVFKNIDGYFKIYSKHTPINLVRDLPQGFSALEPLVDLPIGINITRFQTLLALHRSYLTPGDSSSGWTAGAAAYYVGYLQPRTFLLKYNENGTITDAVDCALDPLSETKCTLKSFTVEKGIYQTSNFRVQPTESIVRFPNITNLCPFGEVFNATRFASVYAWNRKRISNCVADYSVLYNSASFSTFKCYGVSPTKLNDLCFTNVYADSFVIRGDEVRQIAPGQTGKIADYNYKLPDDFTGCVIAWNSNNLDSKVGGNYNYLYRLFRKSNLKPFERDISTEIYQAGSTPCNGVEGFNCYFPLQSYGFQPTNGVGYQPYRVVVLSFELLHAPATVCGPKKSTNLVKNKCVNFNFNGLTGTGVLTESNKKFLPFQQFGRDIADTTDAVRDPQTLEILDITPCSFGGVSVITPGTNTSNQVAVLYQGVNCTEVPVAIHADQLTPTWRVYSTGSNVFQTRAGCLIGAEHVNNSYECDIPIGAGICASYQTQTNSPRRARSVASQSIIAYTMSLGAENSVAYSNNSIAIPTNFTISVTTEILPVSMTKTSVDCTMYICGDSTECSNLLLQYGSFCTQLNRALTGIAVEQDKNTQEVFAQVKQIYKTPPIKDFGGFNFSQILPDPSKPSKRSFIEDILFNKVTLADAGFIKQYGDCLGDIAARDLICAQKFNGLTVLPPLLTDEMIAQYTSALLAGTITSGWTFGAGAALQIPFAMQMAYRFNGIGVTQNVLYENQKLIANQFNSAIGKIQDSLSSTASALGKLQDVVNQNAQALNTLVKQLSSNFGAISSVLNDILSRLDKVEAEVQIDRLITGRLQSLQTYVTQQLIRAAEIRASANLAATKMSECVLGQSKRVDFCGKGYHLMSFPQSAPHGVVFLHVTYVPAQEKNFTTAPAICHDGKAHFPREGVFVSNGTHWFVTQRNFYEPQIITTDNTFVSGNCDVVIGIVNNTVYDPLQPELDSFKEELDKYFKNHTSPDVDLGDISGINASVVNIQKEIDRLNEVAKNLNESLIDLQELGKYEQYIKWPWYIWLGFIAGLIAIVMVTIMLCCMTSCCSCLKGCCSCGSCCKFDEDDSEPVLKGVKLHYT

SEQ ID NO: 332 - protein, 1273 aa, Artificial Sequence
  SARS-CoV-2/Congo/158/2020__EPI_ISL_417950 spike protein (1-1273)
MFVFLVLLPLVSSQCVNLTTRTQLPPAYTNSFTRGVYYPDKVFRSSVLHSTQDLFLPFFSNVTWFHAIHVSGTNGTKRFDNPVLPFNDGVYFASTEKSNIIRGWIFGTTLDSKTQSLLIVNNATNVVIKVCEFQFCNDPFLGVYYHKNNKSWMESEFRVYSSANNCTFEYVSQPFLMDLEGKQGNFKNLREFVFKNIDGYFKIYSKHTPINLVRDLPQGFSALEPLVDLPIGINITRFQTLLALHRSYLTPGDSSSGWTAGAAAYYVGYLQPRTFLLKYNENGTITDAVDCALDPLSETKCTLKSFTVEKGIYQTSNFRVQPTESIVRFPNITNLCPFGEVFNATRFASVYAWNRKRISNCVADYSVLYNSASFSTFKCYGVSPTKLNDLCFTNVYADSFVIRGDEVRQIAPGQTGKIADYNYKLPDDFTGCVIAWNSNNLDSKVGGNYNYLYRLFRKSNLKPFERDISTEIYQAGSTPCNGVEGFNCYFPLQSYGFQPTNGVGYQPYRVVVLSFELLHAPATVCGPKKSTNLVKNKCVNFNFNGLTGTGVLTESNKKFLPFQQFGRDIADTTDAVRDPQTLEILDITPCSFGGVSVITPGTNTSNQVAVLYQDVNCTEVPVAIHADQLTPTWRVYSTGSNVFQTRAGCLIGAEHVNNSYECDIPIGAGICASYQTQTNSPRRARSVASQSIIAYTMSLGAENSVAYSNNSIAIPTNFTISVTTEILPVSMTKTSVDCTMYICGDSTECSNLLLQYGSFCTQLNRALTGIAVEQDKNTQEVFAQVKQIYKTPPIKDFGGFNFSQILPDPSKPSKRSFIEDLLFNKVTLADAGFIKQYGDCLGDIAARDLICAQKFNGLTVLPPLLTDEMIAQYTSALLAGTITSGWTFGAGAALQIPFAMQMAYRFNGIGVTQNVLYENQKLIANQFNSAIGKIQDSLSSTASALGKLQDVVNQNAQALNTLVKQLSSNFGAISSVLNDILSRLDKVEAEVQIDRLITGRLQSLQTYVTQQLIRAAEIRASANLAATKMSECVLGQSKRVDFCGKGYHLMSFPQSAPHGVVFLHVTYVPAQEKNFTTAPAICHDGKAHFPREGVFVSNGTHWFVTQRNFYEPQIITTDNTFLSGNCDVVIGIVNNTVYDPLQPELDSFKEELDKYFKNHTSPDVDLGDISGINASVVNIQKEIDRLNEVAKNLNESLIDLQELGKYEQYIKWPWYIWLGFIAGLIAIVMVTIMLCCMTSCCSCLKGCCSCGSCCKFDEDDSEPVLKGVKLHYT

SEQ ID NO: 333 - protein, 1273 aa, Artificial Sequence
  SARS-CoV-2/USA/UT-00034/2020__EPI_ISL_417977 spike protein (1-1273)
MFVFLVLLPLVSSQCVNLTTRTQLPPAYTNSFTRGVYYPDKVFRSSVLHSTQDLFLPFFSNVTWFHAIHVSGTNGTKRFDNPVLPFNDGVYFASTEKSNIIRGWIFGTTLDSKTQSLLIVNNATNVVIKVCEFQFCNDPFLGVYYYKNNKSWMESEFRVYSSANNCTFEYVSQPFLMDLEGKQGNFKNLREFVFKNIDGYFKIYSKHTPINLVRDLPQGFSALEPLVDLPIGINITRFQTLLALHRSYLTPGDSSSGWTAGAAAYYVGYLQPRTFLLKYNENGTITDAVDCALDPLSETKCTLKSFTVEKGIYQTSNFRVQPTESIVRFPNITNLCPFGEVFNATRFASVYAWNRKRISNCVADYSVLYNSASFSTFKCYGVSPTKLNDLCFTNVYADSFVIRGDEVRQIAPGQTGKIADYNYKLPDDFTGCVIAWNSNNLDSKVGGNYNYLYRLFRKSNLKPFERDISTEIYQAGSTPCNGVEGFNCYFPLQSYGFQPTNGVGYQPYRVVVLSFELLHAPATVCGPKKSTNLVKNKCVNFNFNGLTGTGVLTESNKKFLPFQQFGRDIADTTDAVRDPQTLEILDITPCSFGGVSVITPGTNTSNQVAVLYQGVNCTEVPVAIHADQLTPTWRVYSTGSNVFQTRAGCLIGAEHVNNSYECDIPIGAGICASYQTQTNSPRRARSVASQSIIAYTMSLGAENSVAYSNNSIAIPTNFTISVTTEILPVSMTKTSVDCTMYICGDSTECSNLLLQYGSFCTQLNRALTGIAVEQDKNTQEVFAQVKQIYKTPPIKDFGGFNFSQILPDPSKPSKRSFIEDLLFNKVTLADAGFIKQYGDCLGDIAARDLICAQKFNGLTVLPPLLTDEMIAQYTSALLAGTITSGWTFGAGAALQIPFAMQMAYRFNGIGVTQNVLYENQKLIANQFNSAIGKIQDSLSSTASALGKLQDVVNQNAQALNTLVKQLSSNFGAISSVLNDILSRLDKVEAEVQIDRLITGRLQSLQTYVTQQLIRAAEIRASANLAATKMSECVLGQSKRVDFCGKGYHLMSFPQSAPHGVVFLHVTYVPAQEKNFTTAPAICHDGKAHFPREGVFVSNGTHWFVTQRNFYEPQIITTDNTFVSGNCDVVIGIVNNTVYDPLQPELDSFKEELDKYFKNHTSPDVDLGDISGINASVVNIQKEIDRLNEVAKNLNESLIDLQELGKYEQYIKWPWYIWLGFIAGLIAIVMVTIMLCCMTSCCSCLKGCCSCGSCCKFDEDDSEPVLKGVKLHYT

SEQ ID NO: 334 - protein, 1273 aa, Artificial Sequence
  SARS-CoV-2/USA/UT-00033/2020__EPI_ISL_417976 spike protein (1-1273)
MFVFLVLLPLVSSQCVNLTTRTQLPPAYTNSFTRGVYYPDKVFRSSVLHSTQDLFLPFFSNVTWFHAIHVSGTNGTKRFDNPVLPFNDGVYFASTEKSNIIRGWIFGTTLDSKTQSLLIVNNATNVVIKVCEFQFCNDPFLGVYYHKNNKSWMESEFRVYSSANNCTFEYVSQPFLMDLEGKQGNFKNLREFVFKNIDGYFKIYSKHTPINLVRDLPQGFSALEPLVDLPIGINITRFQTLLALHRSYLTPGDSSSGLTAGAAAYYVGYLQPRTFLLKYNENGTITDAVDCALDPLSETKCTLKSFTVEKGIYQTSNFRVQPTESIVRFPNITNLCPFGEVFNATRFASVYAWNRKRISNCVADYSVLYNSASFSTFKCYGVSPTKLNDLCFTNVYADSFVIRGDEVRQIAPGQTGKIADYNYKLPDDFTGCVIAWNSNNLDSKVGGNYNYLYRLFRKSNLKPFERDISTEIYQAGSTPCNGVEGFNCYFPLQSYGFQPTNGVGYQPYRVVVLSFELLHAPATVCGPKKSTNLVKNKCVNFNFNGLTGTGVLTESNKKFLPFQQFGRDIADTTDAVRDPQTLEILDITPCSFGGVSVITPGTNTSNQVAVLYQGVNCTEVPVAIHADQLTPTWRVYSTGSNVFQTRAGCLIGAEHVNNSYECDIPIGAGICASYQTQTNSPRRARSVASQSIIAYTMSLGAENSVAYSNNSIAIPTNFTISVTTEILPVSMTKTSVDCTMYICGDSTECSNLLLQYGSFCTQLNRALTGIAVEQDKNTQEVFAQVKQIYKTPPIKDFGGFNFSQILPDPSKPSKRSFIEDLLFNKVTLADAGFIKQYGDCLGDIAARDLICAQKFNGLTVLPPLLTDEMIAQYTSALLAGTITSGWTFGAGAALQIPFAMQMAYRFNGIGVTQNVLYENQKLIANQFNSAIGKIQDSLSSTASALGKLQDVVNQNAQALNTLVKQLSSNFGAISSVLNDILSRLDKVEAEVQIDRLITGRLQSLQTYVTQQLIRAAEIRASANLAATKMSECVLGQSKRVDFCGKGYHLMSFPQSAPHGVVFLHVTYVPAQEKNFTTAPAICHDGKAHFPREGVFVSNGTHWFVTQRNFYEPQIITTDNTFVSGNCDVVIGIVNNTVYDPLQPELDSFKEELDKYFKNHTSPDVDLGDISGINASVVNIQKEIDRLNEVAKNLNESLIDLQELGKYEQYIKWPWYIWLGFIAGLIAIVMVTIMLCCMTSCCSCLKGCCSCGSCCKFDEDDSEPVLKGVKLHYT

SEQ ID NO: 335 - protein, 1273 aa, Artificial Sequence
  SARS-CoV-2/USA/WI-13/2020__EPI_ISL_417516 spike protein (1-1273)
MFVFLVLLPLVSSQCVNLTTRTQLPPAYTNSFTRGVYYPDKVFRSSVLHSTQDLFLPFFSNVTWFHAIHVSGTNGTKRFDNPVLPFNDGVYFASTEKSNIIRGWIFGTTLDSKTQSLLIVNNATNVVIKVCEFQFCNDPFLGVYYHKNNKSWMESEFRVYSSANNCTFEYVSQPFLMDLEGKQGNFKNLREFVFKNIDGYFKIYSKHTPINLVRDLPQGFSALEPLVDLPIGINITRFQTLLALHRSYLTPGDSSSGWTAGAAAYYVGYLQPRTFLLKYNENGTITDAVDCALDPLSETKCTLKSFTVEKGIYQTSNFRVLPTESIVRFPNITNLCPFGEVFNATRFASVYAWNRKRISNCVADYSVLYNSASFSTFKCYGVSPTKLNDLCFTNVYADSFVIRGDEVRQIAPGQTGKIADYNYKLPDDFTGCVIAWNSNNLDSKVGGNYNYLYRLFRKSNLKPFERDISTEIYQAGSTPCNGVEGFNCYFPLQSYGFQPTNGVGYQPYRVVVLSFELLHAPATVCGPKKSTNLVKNKCVNFNFNGLTGTGVLTESNKKFLPFQQFGRDIADTTDAVRDPQTLEILDITPCSFGGVSVITPGTNTSNQVAVLYQGVNCTEVPVAIHADQLTPTWRVYSTGSNVFQTRAGCLIGAEHVNNSYECDIPIGAGICASYQTQTNSPRRARSVASQSIIAYTMSLGAENSVAYSNNSIAIPTNFTISVTTEILPVSMTKTSVDCTMYICGDSTECSNLLLQYGSFCTQLNRALTGIAVEQDKNTQEVFAQVKQIYKTPPIKDFGGFNFSQILPDPSKPSKRSFIEDLLFNKVTLADAGFIKQYGDCLGDIAARDLICAQKFNGLTVLPPLLTDEMIAQYTSALLAGTITSGWTFGAGAALQIPFAMQMAYRFNGIGVTQNVLYENQKLIANQFNSAIGKIQDSLSSTASALGKLQDVVNQNAQALNTLVKQLSSNFGAISSVLNDILSRLDKVEAEVQIDRLITGRLQSLQTYVTQQLIRAAEIRASANLAATKMSECVLGQSKRVDFCGKGYHLMSFPQSAPHGVVFLHVTYVPAQEKNFTTAPAICHDGKAHFPREGVFVSNGTHWFVTQRNFYEPQIITTDNTFVSGNCDVVIGIVNNTVYDPLQPELDSFKEELDKYFKNHTSPDVDLGDISGINASVVNIQKEIDRLNEVAKNLNESLIDLQELGKYEQYIKWPWYIWLGFIAGLIAIVMVTIMLCCMTSCCSCLKGCCSCGSCCKFDEDDSEPVLKGVKLHYT

SEQ ID NO: 336 - protein, 1272 aa, Artificial Sequence
  SARS-CoV-2/India/1-27/2020__EPI_ISL_413522 spike protein (1-1272)
MFVFLVLLPLVSSQCVNLTTRTQLPPAYTNSFTRGVYYPDKVFRSSVLHSTQDLFLPFFSNVTWFHAIHVSGTNGTKRFDNPVLPFNDGVYFASTEKSNIIRGWIFGTTLDSKTQSLLIVNNATNVVIKVCEFQFCNDPFLGVYHKNNKSWMESEFRVYSSANNCTFEYVSQPFLMDLEGKQGNFKNLREFVFKNIDGYFKIYSKHTPINLVRDLPQGFSALEPLVDLPIGINITRFQTLLALHRSYLTPGDSSSGWTAGAAAYYVGYLQPRTFLLKYNENGTITDAVDCALDPLSETKCTLKSFTVEKGIYQTSNFRVQPTESIVRFPNITNLCPFGEVFNATRFASVYAWNRKRISNCVADYSVLYNSASFSTFKCYGVSPTKLNDLCFTNVYADSFVIRGDEVIQIAPGQTGKIADYNYKLPDDFTGCVIAWNSNNLDSKVGGNYNYLYRLFRKSNLKPFERDISTEIYQAGSTPCNGVEGFNCYFPLQSYGFQPTNGVGYQPYRVVVLSFELLHAPATVCGPKKSTNLVKNKCVNFNFNGLTGTGVLTESNKKFLPFQQFGRDIADTTDAVRDPQTLEILDITPCSFGGVSVITPGTNTSNQVAVLYQDVNCTEVPVAIHADQLTPTWRVYSTGSNVFQTRAGCLIGAEHVNNSYECDIPIGAGICASYQTQTNSPRRARSVASQSIIAYTMSLGAENSVAYSNNSIAIPTNFTISVTTEILPVSMTKTSVDCTMYICGDSTECSNLLLQYGSFCTQLNRALTGIAVEQDKNTQEVFAQVKQIYKTPPIKDFGGFNFSQILPDPSKPSKRSFIEDLLFNKVTLADAGFIKQYGDCLGDIAARDLICAQKFNGLTVLPPLLTDEMIAQYTSALLAGTITSGWTFGAGAALQIPFAMQMAYRFNGIGVTQNVLYENQKLIANQFNSAIGKIQDSLSSTASALGKLQDVVNQNAQALNTLVKQLSSNFGAISSVLNDILSRLDKVEAEVQIDRLITGRLQSLQTYVTQQLIRAAEIRASANLAATKMSECVLGQSKRVDFCGKGYHLMSFPQSAPHGVVFLHVTYVPAQEKNFTTAPAICHDGKAHFPREGVFVSNGTHWFVTQRNFYEPQIITTDNTFVSGNCDVVIGIVNNTVYDPLQPELDSFKEELDKYFKNHTSPDVDLGDISGINASVVNIQKEIDRLNEVAKNLNESLIDLQELGKYEQYIKWPWYIWLGFIAGLIAIVMVTIMLCCMTSCCSCLKGCCSCGSCCKFDEDDSEPVLKGVKLHYT

SEQ ID NO: 337 - protein, 1267 aa, Artificial Sequence
  SARS-CoV-2/pangolin/Guangxi/P4L/2017__EPI_ISL_410538 spike protein (1-1267)
MFVFLFVLPLVSSQCVNLTTRTGIPPGYTNSSTRGVYYPDKVFRSSILHLTQDLFLPFFSNVTWFNTINYQGGFKKFDNPVLPFNDGVYFASTEKSNIIRGWIFGTTLDARTQSLLIVNNATNVVIKVCEFQFCTDPFLGVYYHNNNKTWVENEFRVYSSANNCTFEYISQPFLMDLEGKQGNFKNLREFVFKNVDGYFKIYSKHTPIDLVRDLPRGFAALEPLVDLPIGINITRFQTLLALHRSYLTPGNLESGWTTGAAAYYVGYLQQRTFLLSYNQNGTITDAVDCSLDPLSETKCTLKSLTVEKGIYQTSNFRVQPTISIVRFPNITNLCPFGEVFNASKFASVYAWNRKRISNCVADYSVLYNSTSFSTFKCYGVSPTKLNDLCFTNVYADSFVVKGDEVRQIAPGQTGVIADYNYKLPDDFTGCVIAWNSVKQDALTGGNYGYLYRLFRKSKLKPFERDISTEIYQAGSTPCNGQVGLNCYYPLERYGFHPTTGVNYQPFRVVVLSFELLNGPATVCGPKLSTTLVKDKCVNFNFNGLTGTGVLTTSKKQFLPFQQFGRDISDTTDAVRDPQTLEILDITPCSFGGVSVITPGTNTSNQVAVLYQDVNCTEVPMAIHAEQLTPAWRVYSAGANVFQTRAGCLVGAEHVNNSYECDIPVGAGICASYHSMSSLRSVNQRSIIAYTMSLGAENSVAYSNNSIAIPTNFTISVTTEILPVSMTKTSVDCTMYICGDSIECSNLLLQYGSFCTQLNRALTGIAVEQDKNTQEVFAQVKQIYKTPPIKDFGGFNFSQILPDPSKPSKRSFIEDLLFNKVTLADAGFIKQYGDCLGDIAARDLICAQKFNGLTVLPPLLTDEMIAQYTSALLAGTITSGWTFGAGAALQIPFAMQMAYRFNGIGVTQNVLYENQKLIANQFNSAIGKIQDSLSSTASALGKLQDVVNQNAQALNTLVKQLSSNFGAISSVLNDILSRLDKVEAEVQIDRLITGRLQSLQTYVTQQLIRAAEIRASANLAATKMSECVLGQSKRVDFCGKGYHLMSFPQSAPHGVVFLHVTYVPAQEKNFTTAPAICHEGKAHFPREGVFVSNGTHWFITQRNFYEPQIITTDNTFVSGSCDVVIGIVNNTVYDPLQPELDSFKEELDKYFKNHTSPDVDLGDISGINASVVNIQKEIDRLNEVAKNLNESPIDLQELGKYEQYIKWPWYIWLGFIAGLIAIIMVTIMLCCMTSCCSCLKGCCSCGSCCKFDEDDSEPVLKGVKLHYT

SEQ ID NO: 338 - protein, 1267 aa, Artificial Sequence
  SARS-CoV-2/pangolin/Guangxi/P5L/2017__EPI_ISL_410540 spike protein (1-1267)
MFVFLFVLPLVSSQCVNLTTRTGIPPGYTNSSTRGVYYPDKVFRSSILHLTQDLFLPFFSNVTWFNTINYQGGFKKFDNPVLPFNDGVYFASTEKSNIIRGWIFGTTLDARTQSLLIVNNATNVVIKVCEFQFCTDPFLGVYYHNNNKTWVENEFRVYSSANNCTFEYISQPFLMDLEGKQGNFKNLREFVFKNVDGYFKIYSKHTPIDLVRDLPRGFAALEPLVDLPIGINITRFQTLLALHRSYLTPGKLESGWTTGAAAYYVGYLQQRTFLLSYNQNGTITDAVDCSLDPLSETKCTLKSLTVEKGIYQTSNFRVQPTISIVRFPNITNLCPFGEVFNASKFASVYAWNRKRISNCVADYSVLYNSTSFSTFKCYGVSPTKLNDLCFTNVYADSFVVKGDEVRQIAPGQTGVIADYNYKLPDDFTGCVIAWNSVKQDALTGGNYGYLYRLFRKSKLKPFERDISTEIYQAGSTPCNGQVGLNCYYPLERYGFHPTTGVNYQPFRVVVLSFELLNGPATVCGPKLSTTLVKDKCVNFNFNGLTGTGVLTTSKKQFLPFQQFGRDISDTTDAVRDPQTLEILDITPCSFGGVSVITPGTNTSNQVAVLYQDVNCTEVPMAIHAEQLTPAWRVYSAGANVFQTRAGCLVGAEHVNNSYECDIPVGAGICASYHSMSSFRSVNQRSIIAYTMSLGAENSVAYSNNSIAIPTNFTISVTTEILPVSMTKTSVDCTMYICGDSIECSNLLLQYGSFCTQLNRALTGIAVEQDKNTQEVFAQVKQIYKTPPIKDFGGFNFSQILPDPSKPSKRSFIEDLLFNKVTLADAGFIKQYGDCLGDIAARDLICAQKFNGLTVLPPLLTDEMIAQYTSALLAGTITSGWTFGAGAALQIPFAMQMAYRFNGIGVTQNVLYENQKLIANQFNSAIGKIQDSLSSTASALGKLQDVVNQNAQALNTLVKQLSSNFGAISSVLNDILSRLDKVEAEVQIDRLITGRLQSLQTYVTQQLIRAAEIRASANLAATKMSECVLGQSKRVDFCGKGYHLMSFPQSAPHGVVFLHVTYVPAQEKNFTTAPAICHEGKAHFPREGVFVSNGTHWFITQRNFYEPQIITTDNTFVSGSCDVVIGIVNNTVYDPLQPELDSFKEELDKYFKNHTSPDVDLGDISGINASVVNIQKEIDRLNEVAKNLNESLIDLQELGKYEQYIKWPWYIWLGFIAGLIAIIMVTIMLCCMTSCCSCLKGCCSCGSCCKFDEDDSEPVLKGVKLHYT

SEQ ID NO: 339 - protein, 1267 aa, Artificial Sequence
  SARS-CoV-2/pangolin/Guangxi/P5E/2017__EPI_ISL_410541 spike protein (1-1267)
MFVFLFVLPLVSSQCVNLTTRTGIPPGYTNSSTRGVYYPDKVFRSSILHLTQDLFLPFFSNVTWFNTITYQGGSKKFDNPVLPFNDGVYFASTEKSNIIRGWIFGTTLDARTQSLLIVNNATNVVIKVCEFQFCTDPFLGVYYHNNNKTWVENEFRVYSSANNCTFEYISQPFLMDLEGKQGNFKNLREFVFKNVDGYFKIYSKHTPIDLVRDLPRGFAALEPLVDLPIGINITRFQTLLALHRSYLTPGKLESGWTTGAAAYYVGYLQQRTFLLSYNQNGTITDAVDCSLDPLSETKCTLKSLTVEKGIYQTSNFRVQPTISIVRFPNITNLCPFGEVFNASKFASVYAWNRKRISNCVADYSVLYNSTSFSTFKCYGVSPTKLNDLCFTNVYADSFVVKGDEVRQIAPGQTGVIADYNYKLPDDFTGCVIAWNSVKQDALTGDNYGYLYRLFRKSKLKPFERDISTEIYQAGSTPCNGQVGLNCYYPLERYGFHPTTGVNYQPFRVVVLSFELLNGPATVCGPKLSTTLVKDKCVNFNFNGLTGTGVLTTSKKQFLPFQQFGRDISDTTDAVRDPQTLEILDITPCSFGGVSVITPGTNTSNQVAVLYQDVNCTEVPMAIHAEQLTPAWRVYSAGANVFQTRAGCLVGAEHVNNSYECDIPVGAGICASYHSMSSFRSVNQRSIIAYTMSLGAENSVAYSNNSIAIPTNFTISVTTEILPVSMTKTSVDCTMYICGDSIECSNLLLQYGSFCTQLNRALTGIAVEQDKNTQEVFAQVKQIYKTPPIKDFGGFNFSQILPDPSKPSKRSFIEDLLFNKVTLADAGFIKQYGDCLGDIAARDLICAQKFNGLTVLPPLLTDEMIAQYTSALLAGTITSGWTFGAGAALQIPFAMQMAYRFNGIGVTQNVLYENQKLIANQFNSAIGKIQDSLSSTASALGKLQDVVNQNAQALNTLVKQLSSNFGAISSVLNDILSRLDKVEAEVQIDRLITGRLQSLQTYVTQQLIRAAEIRASANLAATKMSECVLGQSKRVDFCGKGYHLMSFPQSAPHGVVFLHVTYVPAQEKNFTTAPAICHEGKAHFPREGVFVSNGTHWFITQRNFYEPQIITTDNTFVSGSCDVVIGIVNNTVYDPLQPELDSFKEELDKYFKNHTSPDVDLGDISGINASVVNIQKEIDRLNEVAKNLNESLIDLQELGKYEQYIKWPWYIWLGFIAGLIAIIMVTIMLCCMTSCCSCLKGCCSCGSCCKFDEDDSEPVLKGVKLHYT

SEQ ID NO: 340 - protein, 1265 aa, Artificial Sequence
  SARS-CoV-2/pangolin/Guangxi/P1E/2017__EPI_ISL_410539 spike protein (1-1265)
MFVFLFVLPLVSSQCVNLTTRTGIQPGYTNSSTRGVYYPDKVFRSSILHLTQDLFLPFFSNVTWFNTINYQGGFKKFDNPVLPFNDGVYFASTEKSNIIRGWIFGTTLDARTQSLLIVNNATNVVIKVCEFQFCTDPFLGVYYHNNNKTWVENEFRVYSSANNCTFEYISQPFLMDLEGKQGNFKNLREFVFKNVDGYFKIYSKHTPIDLVRDLPRGFAALEPLVDLPIGINITRFQTLLALHRSYLTPGKLESGWTTGAAAYYVGYLQQRTFLLSYNQNGTITDAVDCSLDPLSETKCTLKSLTVEKGIYQTSNFRVQPTISIVRFPNITNLCPFGEVFNASKFASVYAWNRKRISNCVADYSVLYNSTSFSTFKCYGVSPTKLNDLCFTNVYADSFVVKGDEVRQIAPGQTGVIADYNYKLPDDFTGCVIAWNSVKQDALTGGNYLYRLFRKSKLKPFERDISTEIYQAGSTPCNGQVGLNCYYPLERYGFHPTTGVNYQPFRVVVLSFELLNGPATVCGPKLSTTLVKDKCVNFNFNGLTGTGVLTTSKKQFLPFQQFGRDISDTTDAVRDPQTLEILDITPCSFGGVSVITPGTNTSNQVAVLYQDVNCTEVPMAIHAEQLTPAWRVYSAGANVFQTRAGCLVGAEHVNNSYECDIPVGAGICASYHSMSSLRSVNQRSIIAYTMSLGAENSVAYSNNSIAIPTNFTISVTTEILPVSMTKTSVDCTMYICGDSIECSNLLLQYGSFCTQLNRALTGIAVEQDKNTQEVFAQVKQIYKTPPIKDFGGFNFSQILPDPSKPSKRSFIEDLLFNKVTLADAGFIKQYGDCLGDIAARDLICAQKFNGLTVLPPLLTDEMIAQYTSALLAGTITSGWTFGAGAALQIPFAMQMAYRFNGIGVTQNVLYENQKLIANQFNSAIGKIQDSLSSTASALGKLQDVVNQNAQALNTLVKQLSSNFGAISSVLNDILSRLDKVEAEVQIDRLITGRLQSLQTYVTQQLIRAAEIRASANLAATKMSECVLGQSKRVDFCGKGYHLMSFPQSAPHGVVFLHVTYVPAQEKNFTTAPAICHEGKAHFPREGVFVSNGTHWFITQRNFYEPQIITTDNTFVSGSCDVVIGIVNNTVYDPLQPELDSFKEELDKYFKNHTSPDVDLGDISGINASVVNIQKEIDRLNEVAKNLNESLIDLQELGKYEQYIKWPWYIWLGFIAGLIAIIMVTIMLCCMTSCCSCLKGCCSCGSCCKFDEDDSEPVLKGVKLHYT

SEQ ID NO: 341 - protein, 1273 aa, Artificial Sequence; identical to SEQ ID NO: 10
  SARS-CoV-2/Wuhan/WIV05/2019__EPI_ISL_402128 spike protein (1-1273)(K986P_V987P)

SEQ ID NO: 342 - protein, 1269 aa, Artificial Sequence; identical to SEQ ID NO: 11
  SARS-CoV-2/bat/Yunnan/RaTG13/2013__EPI_ISL_402131 spike protein (1-1269)(K982P_V983P)

SEQ ID NO: 343 - protein, 1273 aa, Artificial Sequence; identical to SEQ ID NO: 12
  SARS-CoV-2/Wuhan/HBCDC-HB-01/2019__EPI_ISL_402132 spike protein (1-1273)(K986P_V987P)

SEQ ID NO: 344 - protein, 1273 aa, Artificial Sequence; identical to SEQ ID NO: 13
  SARS-CoV-2/Guangdong/20SF028/2020__EPI_ISL_403936 spike protein (1-1273)(K986P_V987P)

SEQ ID NO: 345 - protein, 1273 aa, Artificial Sequence; identical to SEQ ID NO: 14
  SARS-CoV-2/Shenzhen/SZTH-001/2020__EPI_ISL_406592 spike protein (1-1273)(K986P_V987P)

SEQ ID NO: 346 - protein, 1273 aa, Artificial Sequence; identical to SEQ ID NO: 15
  SARS-CoV-2/Shenzhen/SZTH-004/2020__EPI_ISL_406595 spike protein (1-1273)(K986P_V987P)

SEQ ID NO: 347 - protein, 1273 aa, Artificial Sequence; identical to SEQ ID NO: 16
  SARS-CoV-2/France/IDF0372/2020__EPI_ISL_406596 spike protein (1-1273)(K986P_V987P)

SEQ ID NO: 348 - protein, 1273 aa, Artificial Sequence; identical to SEQ ID NO: 17
  SARS-CoV-2/Australia/VIC01/2020__EPI_ISL_406844 spike protein (1-1273)(K986P_V987P)

SEQ ID NO: 349 - protein, 1273 aa, Artificial Sequence; identical to SEQ ID NO: 18
  SARS-CoV-2/Germany/BavPat1/2020__EPI_ISL_406862 spike protein (1-1273)(K986P_V987P)

SEQ ID NO: 350 - protein, 1273 aa, Artificial Sequence
  SARS-CoV-2/Wuhan/HBCDC-HB-02/2020__EPI_ISL_412978 spike protein (1-1273)(K986P_V987P)
MFVFLVLLPLVSSQCVNLTTRTQLPPAYTNSFTRGVYYPDKVFRSSVLHSTQDLFLPFFSNVTWFHAIHVSGTNGTKRFDNPVLPFNDGVYFASTEKSNIIRGWIFGTTLDSKTQSLLIVNNATNVVIKVCEFQFCNDPFLGVYYHKNNKSWMESEFRVYSSANNCTFEYVSQPFLMDLEGKQGNFKNLREFVFKNIDGYFKIYSKHTPINLVRDLPQGFSALEPLVDLPIGINITRFQTLLALHRSYLTPGDSSSGWTAGAAAYYVGYLQPRTFLLKYNENGTITDAVDCALDPLSETKCTLKSFTVEKGIYQTSNFRVQPTESIVRFPNITNLCPFGEVFNATRFASVYAWNRKRISNCVADYSVLYNSASFSTFKCYGVSPTKLNDLCFTNVYADSFVIRGDEVRQIAPGQTGKIADYNYKLPDDFTGCVIAWNSNNLDSKVGGNYNYLYRLFRKSNLKPFERDISTEIYQAGSTPCNGVEGFNCYFPLQSYGFQPTNGVGYQPYRVVVLSFELLHAPATVCGPKKSTNLVKNKCVNFNFNGLTGTGVLTESNKKFLPFQQFGRDIADTTDAVRDPQTLEILDITPCSFGGVSVITPGTNTSNQVAVLYQDVNCTEVPVAIHADQLTPTWRVYSTGSNVFQTRAGCLIGAEHVNNSYECDIPIGAGICASYQTQTNSPRRARSVASQSIIAYTMSLGAENSVAYSNNSIAIPTNFTISVTTEILPVSMTKTSVDCTMYICGDSTECSNFLLQYGSFCTQLNRALTGIAVEQDKNTQEVFAQVKQIYKTPPIKDFGGFNFSQILPDPSKPSKRSFIEDLLFNKVTLADAGFIKQYGDCLGDIAARDLICAQKFNGLTVLPPLLTDEMIAQYTSALLAGTITSGWTFGAGAALQIPFAMQMAYRFNGIGVTQNVLYENQKLIANQFNSAIGKIQDSLSSTASALGKLQDVVNQNAQALNTLVKQLSSNFGAISSVLNDILSRLDPPEAEVQIDRLITGRLQSLQTYVTQQLIRAAEIRASANLAATKMSECVLGQSKRVDFCGKGYHLMSFPQSAPHGVVFLHVTYVPAQEKNFTTAPAICHDGKAHFPREGVFVSNGTHWFVTQRNFYEPQIITTDNTFVSGNCDVVIGIVNNTVYDPLQPELDSFKEELDKYFKNHTSPDVDLGDISGINASVVNIQKEIDRLNEVAKNLNESLIDLQELGKYEQYIKWPWYIWLGFIAGLIAIVMVTIMLCCMTSCCSCLKGCCSCGSCCKFDEDDSEPVLKGVKLHYT

SEQ ID NO: 351 - protein, 1273 aa, Artificial Sequence
  SARS-CoV-2/Australia/QLD02/2020__EPI_ISL_407896 spike protein (1-1273)(K986P_V987P)
MFVFLVLLPLVSSQCVNLTTRTQLPPAYTNSFTRGVYYPDKVFRSSVLHSTQDLFLPFFSNVTWFHAIHVSGTNGTKRFDNPVLPFNDGVYFASTEKSNIIRGWIFGTTLDSKTQSLLIVNNATNVVIKVCEFQFCNDPFLGVYYHKNNKSWMESEFRVYSSANNCTFEYVSQPFLMDLEGKQGNFKNLREFVFKNIDGYFKIYSKHTPINLVRDLPQGFSALEPLVDLPIGINITRFQTLLALHRSYLTPGDSSSGWTAGAAAYYVGYLQPRTFLLKYNENGTITDAVDCALDPLSETKCTLKSFTVEKGIYQTSNFRVQPTESIVRFPNITNLCPFGEVFNATRFASVYAWNRKRISNCVADYSVLYNSASFSTFKCYGVSPTKLNDLCFTNVYADSFVIRGDEVRQIAPGQTGKIADYNYKLPDDFTGCVIAWNSNNLDSKVGGNYNYLYRLFRKSNLKPFERDISTEIYQAGSTPCNGVEGFNCYFPLQSYGFQPTNGVGYQPYRVVVLSFELLHAPATVCGPKKSTNLVKNKCVNFNFNGLTGTGVLTESNKKFLPFQQFGRDIADTTDAVRDPQTLEILDITPCSFGGVSVITPGTNTSNQVAVLYQDVNCTEVPVAIHADQLTPTWRVYSTGSNVFQTRAGCLIGAEHVNNSYECDIPIGAGICASYQTQTNSPRRARSVASQSIIAYTMSLGAENSVAYSNNSIAIPTNFTISVTTEILPVSMTKTSVDCTMYICGDSTECSNLLLQYGSFCTQLNRALTGIAVEQDKNTQEVFAQVKQIYKTPPIKDFGGFNFSQILPDPSKPSKRSFIEDLLFNKVTLADAGFIKQYGDCLGDIAARDLICAQKFNGLTVLPPLLTDEMIAQYTSALLAGTITSGWTFGAGAALQIPFAMQMAYRFNGIGVTQNVLYENQKLIANQFNSAIGKIQDSLSSTASALGKLQDVVNQNAQALNTLVKQLSSNFGAISSVLNDILSRLDPPEAEVQIDRLITGRLQSLQTYVTQQLIRAAEIRASANLAATKMSECVLGQSKRVDFCGKGYHLMSFPQSAPHGVVFLHVTYVPAQEKNFTTAPAICHDGKAHFPREGVFVSNGTHWFVTQRNFYEPQIITTDNTFVSGNCDVVIGIVNNTVYDPLQLELDSFKEELDKYFKNHTSPDVDLGDISGINASVVNIQKEIDRLNEVAKNLNESLIDLQELGKYEQYIKWPWYIWLGFIAGLIAIVMVTIMLCCMTSCCSCLKGCCSCGSCCKFDEDDSEPVLKGVKLHYT

SEQ ID NO: 352 - protein, 1273 aa, Artificial Sequence
  SARS-CoV-2/India/1-31/2020__EPI_ISL_413523 spike protein (1-1273)(K986P_V987P)
MFVFLVLLPLVSSQCVNLTTRTQLPPAYTNSFTRGVYYPDKVFRSSVLHSTQDLFLPFFSNVTWFHAIHVSGTNGTKRFDNPVLPFNDGVYFASTEKSNIIRGWIFGTTLDSKTQSLLIVNNATNVVIKVCEFQFCNDPFLGVYYHKNNKSWMESEFRVYSSANNCTFEYVSQPFLMDLEGKQGNFKNLREFVFKNIDGYFKIYSKHTPINLVRDLPQGFSALEPLVDLPIGINITRFQTLLALHRSYLTPGDSSSGWTAGAAAYYVGYLQPRTFLLKYNENGTITDAVDCALDPLSETKCTLKSFTVEKGIYQTSNFRVQPTESIVRFPNITNLCPFGEVFNATRFASVYAWNRKRISNCVADYSVLYNSASFSTFKCYGVSPTKLNDLCFTNVYADSFVIRGDEVRQIAPGQTGKIADYNYKLPDDFTGCVIAWNSNNLDSKVGGNYNYLYRLFRKSNLKPFERDISTEIYQAGSTPCNGVEGFNCYFPLQSYGFQPTNGVGYQPYRVVVLSFELLHAPATVCGPKKSTNLVKNKCVNFNFNGLTGTGVLTESNKKFLPFQQFGRDIADTTDAVRDPQTLEILDITPCSFGGVSVITPGTNTSNQVAVLYQDVNCTEVPVAIHADQLTPTWRVYSTGSNVFQTRAGCLIGAEHVNNSYECDIPIGAGICASYQTQTNSPRRARSVASQSIIAYTMSLGAENSVAYSNNSIAIPTNFTISVTTEILPVSMTKTSVDCTMYICGDSTECSNLLLQYGSFCTQLNRALTGIAVEQDKNTQEVFAQVKQIYKTPPIKDFGGFNFSQILPDPSKPSKRSFIEDLLFNKVTLADAGFIKQYGDCLGDIAARDLICAQKFNGLTVLPPLLTDEMIAQYTSALLAGTITSGWTFGAGAALQIPFAMQMAYRFNGIGVTQNVLYENQKLIANQFNSVIGKIQDSLSSTASALGKLQDVVNQNAQALNTLVKQLSSNFGAISSVLNDILSRLDPPEAEVQIDRLITGRLQSLQTYVTQQLIRAAEIRASANLAATKMSECVLGQSKRVDFCGKGYHLMSFPQSAPHGVVFLHVTYVPAQEKNFTTAPAICHDGKAHFPREGVFVSNGTHWFVTQRNFYEPQIITTDNTFVSGNCDVVIGIVNNTVYDPLQPELDSFKEELDKYFKNHTSPDVDLGDISGINASVVNIQKEIDRLNEVAKNLNESLIDLQELGKYEQYIKWPWYIWLGFIAGLIAIVMVTIMLCCMTSCCSCLKGCCSCGSCCKFDEDDSEPVLKGVKLHYT

SEQ ID NO: 353 - protein, 1273 aa, Artificial Sequence
  SARS-CoV-2/Guangdong/GD2020087-P0008/2020__EPI_ISL_413863 spike protein (1-1273)(K986P_V987P)
MFVFLVLLPLVSSQCVNLTTRTQLPPAYTNSFTRGVYYPDKVFRSSVLHSTQDLFLPFFSNVTWFHAIHVSGTNGTKRFDNPVLPFNDGVYFASTEKSNIIRGWIFGTTLDSKTQSLLIVNNATNVVIKVCEFQFCNDPFLGVYYHKNNKSWMESEFRVYSSANNCTFEYVSQPFLMDLEGKQGNFKNLREFVFKNIDGYFKIYSKHTPINLVRDLPQGFSALEPLVDLPIGINITRFQTLLALHRSYLTPGDSSSGWTAGAAAYYVGYLQPRTFLLKYNENGTITDAVDCALDPLSETKCTLKSFTVEKGIYQTSNFRVQPTESIVRFPNITNLCPFGEVFNATRFASVYAWNRKRISNCVADYSVLYNSASFSTFKCYGVSPTKLNDLCFTNVYADSFVIRGDEVREIAPGQTGKIADYNYKLPDDFTGCVIAWNSNNLDSKVGGNYNYLYRLFRKSNLKPFERDISTEIYQAGSTPCNGVEGFNCYFPLQSYGFQPTNGVGYQPYRVVVLSFELLHAPATVCGPKKSTNLVKNKCVNFNFNGLTGTGVLTESNKKFLPFQQFGRDIADTTDAVRDPQTLEILDITPCSFGGVSVITPGTNTSNQVAVLYQDVNCTEVPVAIHADQLTPTWRVYSTGSNVFQTRAGCLIGAEHVNNSYECDIPIGAGICASYQTQTNSPRRARSVASQSIIAYTMSLGAENSVAYSNNSIAIPTNFTISVTTEILPVSMTKTSVDCTMYICGDSTECSNLLLQYGSFCTQLNRALTGIAVEQDKNTQEVFAQVKQIYKTPPIKDFGGFNFSQILPDPSKPSKRSFIEDLLFNKVTLADAGFIKQYGDCLGDIAARDLICAQKFNGLTVLPPLLTDEMIAQYTSALLAGTITSGWTFGAGAALQIPFAMQMAYRFNGIGVTQNVLYENQKLIANQFNSAIGKIQDSLSSTASALGKLQDVVNQNAQALNTLVKQLSSNFGAISSVLNDILSRLDPPEAEVQIDRLITGRLQSLQTYVTQQLIRAAEIRASANLAATKMSECVLGQSKRVDFCGKGYHLMSFPQSAPHGVVFLHVTYVPAQEKNFTTAPAICHDGKAHFPREGVFVSNGTHWFVTQRNFYEPQIITTDNTFVSGNCDVVIGIVNNTVYDPLQPELDSFKEELDKYFKNHTSPDVDLGDISGINASVVNIQKEIDRLNEVAKNLNESLIDLQELGKYEQYIKWPWYIWLGFIAGLIAIVMVTIMLCCMTSCCSCLKGCCSCGSCCKFDEDDSEPVLKGVKLHYT

SEQ ID NO: 354 - protein, 1273 aa, Artificial Sequence
  SARS-CoV-2/Sweden/01/2020__EPI_ISL_411951 spike protein (1-1273)(K986P_V987P)
MFVFLVLLPLVSSQCVNLTTRTQLPPAYTNSFTRGVYYPDKVFRSSVLHSTQDLFLPFFSNVTWFHAIHVSGTNGTKRFDNPVLPFNDGVYFASTEKSNIIRGWIFGTTLDSKTQSLLIVNNATNVVIKVCEFQFCNDPFLGVYYHKNNKSWMESEFRVYSSANNCTFEYVSQPFLMDLEGKQGNFKNLREFVFKNIDGYFKIYSKHTPINLVRDLPQGFSALEPLVDLPIGINITRFQTLLALHRSYLTPGDSSSGWTAGAAAYYVGYLQPRTFLLKYNENGTITDAVDCALDPLSETKCTLKSFTVEKGIYQTSNFRVQPTESIVRFPNITNLCPFGEVFNATRFASVYAWNRKRISNCVADYSVLYNSASFSTFKCYGVSPTKLNDLCFTNVYADSFVIRGDEVRQIAPGQTGKIADYNYKLPDDFTGCVIAWNSNNLDSKVGGNYNYLYRLFRKSNLKPFERDISTEIYQAGSTPCNGVEGFNCYFPLQSYGFQPTNGVGYQPYRVVVLSFELLHAPATVCGPKKSTNLVKNKCVNFNFNGLTGTGVLTESNKKFLPFQQFGRDIADTTDAVRDPQTLEILDITPCSFGGVSVITPGTNTSNQVAVLYQDVNCTEVPVAIHADQLTPTWRVYSTGSNVFQTRAGCLIGAEHVNNSYECDIPIGAGICASYQTQTNSPRRARSVASQSIIAYTMSLGAENSVAYSNNSIAIPTNFTISVTTEILPVSMTKTSVDCTMYICGDSTECSNLLLQYGSFCTQLNRALTGIAVEQDKNTQEVFAQVKQIYKTPPIKDCGGFNFSQILPDPSKPSKRSFIEDLLFNKVTLADAGFIKQYGDCLGDIAARDLICAQKFNGLTVLPPLLTDEMIAQYTSALLAGTITSGWTFGAGAALQIPFAMQMAYRFNGIGVTQNVLYENQKLIANQFNSAIGKIQDSLSSTASALGKLQDVVNQNAQALNTLVKQLSSNFGAISSVLNDILSRLDPPEAEVQIDRLITGRLQSLQTYVTQQLIRAAEIRASANLAATKMSECVLGQSKRVDFCGKGYHLMSFPQSAPHGVVFLHVTYVPAQEKNFTTAPAICHDGKAHFPREGVFVSNGTHWFVTQRNFYEPQIITTDNTFVSGNCDVVIGIVNNTVYDPLQPELDSFKEELDKYFKNHTSPDVDLGDISGINASVVNIQKEIDRLNEVAKNLNESLIDLQELGKYEQYIKWPWYIWLGFIAGLIAIVMVTIMLCCMTSCCSCLKGCCSCGSCCKFDEDDSEPVLKGVKLHYT

SEQ ID NO: 355 - protein, 1273 aa, Artificial Sequence
  SARS-CoV-2/Tianmen/HBCDC-HB-07/2020__EPI_ISL_412983 spike protein (1-1273)(K986P_V987P)
MFVFLVLLPLVSSQCVNLTTRTQLPPAYTNSFTRGVYYPDKVFRSSVLHSTQDLFLPFFSNVTWFHAIHVSGTNGTKRFDNPVLPFNDGVYFASTEKSNIIRGWIFGTTLDSKTQSLLIVNNATNVVIKVCEFQFCNDPFLGVYYHKNNKSWMESEFRVYSSANNCTFEYVSQPFLMDLEGKQGNFKNLREFVFKNIDGYFKIYSKHTPINLVRDLPQGFSALEPLVDLPIGINITRFQTLLALHRSYLTPGDSSSGWTAGAAAYYVGYLQPRTFLLKYNENGTITDAVDCALDPLSETKCTLKSFTVEKGIYQTSNFRVQPTESIVRFPNITNLCPFGEVFNATRFASVYAWNRKRISNCVADYSVLYNSASFSTFKCYGVSPTKLNDLCFTNVYADSFVIRGDEVRQIAPGQTGKIADYNYKLPDDFTGCVIAWNSNNLDSKVGGNYNYLYRLFRKSNLKPFERDISTEIYQAGSTPCNGVEGFNCYFPLQSYGFQPTNGVGYQPYRVVVLSFELLHAPATVCGPKKSTNLVKNKCVNFNFNGLTGTGVLTESNKKFLPFQQFGRDIADTTDAVRDPQTLEILDITPCSFGGVSVITPGTNTSNQVAVLYQDLNCTEVPVAIHADQLTPTWRVYSTGSNVFQTRAGCLIGAEHVNNSYECDIPIGAGICASYQTQTNSPRRARSVASQSIIAYTMSLGAENSVAYSNNSIAIPTNFTISVTTEILPVSMTKTSVDCTMYICGDSTECSNLLLQYGSFCTQLNRALTGIAVEQDKNTQEVFAQVKQIYKTPPIKDFGGFNFSQILPDPSKPSKRSFIEDLLFNKVTLADAGFIKQYGDCLGDIAARDLICAQKFNGLTVLPPLLTDEMIAQYTSALLAGTITSGWTFGAGAALQIPFAMQMAYRFNGIGVTQNVLYENQKLIANQFNSAIGKIQDSLSSTASALGKLQDVVNQNAQALNTLVKQLSSNFGAISSVLNDILSRLDPPEAEVQIDRLITGRLQSLQTYVTQQLIRAAEIRASANLAATKMSECVLGQSKRVDFCGKGYHLMSFPQSAPHGVVFLHVTYVPAQEKNFTTAPAICHDGKAHFPREGVFVSNGTHWFVTQRNFYEPQIITTDNTFVSGNCDVVIGIVNNTVYDPLQPELDSFKEELDKYFKNHTSPDVDLGDISGINASVVNIQKEIDRLNEVAKNLNESLIDLQELGKYEQYIKWPWYIWLGFIAGLIAIVMVTIMLCCMTSCCSCLKGCCSCGSCCKFDEDDSEPVLKGVKLHYT

SEQ ID NO: 356 - protein, 1273 aa, Artificial Sequence
  SARS-CoV-2/Hong Kong/case42_VM20002493/2020__EPI_ISL_414527 spike protein (1-1273)(K986P_V987P)
MFVFLVLLPLVSSQCVNLTTRTQLPPAYTNSFTRGVYYPDKVFRSSVLHSTQDLFLPFFSNVTWFHAIHVSGTNGTKRFDNPVLPFNDGVYFASTEKSNIIRGWIFGTTLDSKTQSLLIVNNATNVVIKVCEFQFCNDPFLGVYYHKNNKSWMESEFRVYSSANNCTFEYVSQPFLMDLEGKQGNFKNLREFVFKNIDGYFKIYSKHTPINLVRDLPQGFSALEPLVDLPIGINITRFQTLLALHRSYLTPGDSSSGWTAGAAAYYVGYLQPRTFLLKYNENGTITDAVDCALDPLSETKCTLKSFTVEKGIYQTSNFRVQPTESIVRFPNITNLCPFGEVFNATRFASVYAWNRKRISNCVADYSVLYNSASFSTFKCYGVSPTKLNDLCFTNVYADSFVIRGDEVRQIAPGQTGKIADYNYKLPDDFTGCVIAWNSNNLDSKVGGNYNYLYRLFRKSNLKPFERDISTEIYQAGSTPCNGVEGFNCYFPLQSYGFQPTNGVGYQPYRVVVLSFELLHAPATVCGPKKSTNLVKNKCVNFNFNGLTGTGVLTESNKKFLPFQQFGRDIADTTDAVRDPQTLEILDITPCSFGGVSVITPGTNTSNQVAVLYQDVNCTEVPVAIHADQLTPTWRVYSTGSNVFQTRAGCLIGAEHVNNSYECDIPIGAGICASYQTQTNSPRRARSVASQSIIAYTMSLGAENSVAYSNNSIAIPTNFAISVTTEILPVSMTKTSVDCTMYICGDSTECSNLLLQYGSFCTQLNRALTGIAVEQDKNTQEVFAQVKQIYKTPPIKDFGGFNFSQILPDPSKPSKRSFIEDLLFNKVTLADAGFIKQYGDCLGDIAARDLICAQKFNGLTVLPPLLTDEMIAQYTSALLAGTITSGWTFGAGAALQIPFAMQMAYRFNGIGVTQNVLYENQKLIANQFNSAIGKIQDSLSSTASALGKLQDVVNQNAQALNTLVKQLSSNFGAISSVLNDILSRLDPPEAEVQIDRLITGRLQSLQTYVTQQLIRAAEIRASANLAATKMSECVLGQSKRVDFCGKGYHLMSFPQSAPHGVVFLHVTYVPAQEKNFTTAPAICHDGKAHFPREGVFVSNGTHWFVTQRNFYEPQIITTDNTFVSGNCDVVIGIVNNTVYDPLQPELDSFKEELDKYFKNHTSPDVDLGDISGINASVVNIQKEIDRLNEVAKNLNESLIDLQELGKYEQYIKWPWYIWLGFIAGLIAIVMVTIMLCCMTSCCSCLKGCCSCGSCCKFDEDDSEPVLKGVKLHYT

SEQ ID NO: 357 - protein, 1273 aa, Artificial Sequence
  SARS-CoV-2/USA/CruiseA-23/2020__EPI_ISL_414482 spike protein (1-1273)(K986P_V987P)
MFVFLVLLPLVSSQCVNLTTRTQLPPAYTNSFTRGVYYPDKVFRSSVLHSTQDLFLPFFSNVTWFHAIHVSGTNGTKRFDNPVLPFNDGVYFASTEKSNIIRGWIFGTTLDSKTQSLLIVNNATNVVIKVCEFQFCNDPFLGVYYHKNNKSWMESEFRVYSSANNCTFEYVSQPFLMDLEVKQGNFKNLREFVFKNIDGYFKIYSKHTPINLVRDLPQGFSALEPLVDLPIGINITRFQTLLALHRSYLTPGDSSSGWTAGAAAYYVGYLQPRTFLLKYNENGTITDAVDCALDPLSETKCTLKSFTVEKGIYQTSNFRVQPTESIVRFPNITNLCPFGEVFNATRFASVYAWNRKRISNCVADYSVLYNSASFSTFKCYGVSPTKLNDLCFTNVYADSFVIRGDEVRQIAPGQTGKIADYNYKLPDDFTGCVIAWNSNNLDSKVGGNYNYLYRLFRKSNLKPFERDISTEIYQAGSTPCNGVEGFNCYFPLQSYGFQPTNGVGYQPYRVVVLSFELLHAPATVCGPKKSTNLVKNKCVNFNFNGLTGTGVLTESNKKFLPFQQFGRDIADTTDAVRDPQTLEILDITPCSFGGVSVITPGTNTSNQVAVLYQDVNCTEVPVAIHADQLTPTWRVYSTGSNVFQTRAGCLIGAEHVNNSYECDIPIGAGICASYQTQTNSPRRARSVASQSIIAYTMSLGAENSVAYSNNSIAIPTNFTISVTTEILPVSMTKTSVDCTMYICGDSTECSNLLLQYGSFCTQLNRALTGIAVEQDKNTQEVFAQVKQIYKTPPIKDFGGFNFSQILPDPSKPSKRSFIEDLLFNKVTLADAGFIKQYGDCLGDIAARDLICAQKFNGLTVLPPLLTDEMIAQYTSALLAGTITSGWTFGAGAALQIPFAMQMAYRFNGIGVTQNVLYENQKLIANQFNSAIGKIQDSLSSTASALGKLQDVVNQNAQALNTLVKQLSSNFGAISSVLNDILSRLDPPEAEVQIDRLITGRLQSLQTYVTQQLIRAAEIRASANLAATKMSECVLGQSKRVDFCGKGYHLMSFPQSAPHGVVFLHVTYVPAQEKNFTTAPAICHDGKAHFPREGVFVSNGTHWFVTQRNFYEPQIITTDNTFVSGNCDVVIGIVNNTVYDPLQPELDSFKEELDKYFKNHTSPDVDLGDISGINASVVNIQKEIDRLNEVAKNLNESLIDLQELGKYEQYIKWPWYIWLGFIAGLIAIVMVTIMLCCMTSCCSCLKGCCSCGSCCKFDEDDSEPVLKGVKLHYT

SEQ ID NO: 358 - protein, 1273 aa, Artificial Sequence
  SARS-CoV-2/Hong Kong/case85_VM20002868/2020__EPI_ISL_414519 spike protein (1-1273)(K986P_V987P)
MFVFLVLVPLVSSQCVNLTTRTQLPPAYTNSFTRGVYYPDKVFRSSVLHSTQDLFLPFFSNVTWFHAIHVSGTNGTKRFDNPVLPFNDGVYFASTEKSNIIRGWIFGTTLDSKTQSLLIVNNATNVVIKVCEFQFCNDPFLGVYYHKNNKSWMESEFRVYSSANNCTFEYVSQPFLMDLEGKQGNFKNLREFVFKNIDGYFKIYSKHTPINLVRDLPQGFSALEPLVDLPIGINITRFQTLLALHRSYLTPGDSSSGWTAGAAAYYVGYLQPRTFLLKYNENGTITDAVDCALDPLSETKCTLKSFTVEKGIYQTSNFRVQPTESIVRFPNITNLCPFGEVFNATRFASVYAWNRKRISNCVADYSVLYNSASFSTFKCYGVSPTKLNDLCFTNVYADSFVIRGDEVRQIAPGQTGKIADYNYKLPDDFTGCVIAWNSNNLDSKVGGNYNYLYRLFRKSNLKPFERDISTEIYQAGSTPCNGVEGFNCYFPLQSYGFQPTNGVGYQPYRVVVLSFELLHAPATVCGPKKSTNLVKNKCVNFNFNGLTGTGVLTESNKKFLPFQQFGRDIADTTDAVRDPQTLEILDITPCSFGGVSVITPGTNTSNQVAVLYQDVNCTEVPVAIHADQLTPTWRVYSTGSNVFQTRAGCLIGAEHVNNSYECDIPIGAGICASYQTQTNSPRRARSVASQSIIAYTMSLGAENSVAYSNNSIAIPTNFTISVTTEILPVSMTKTSVDCTMYICGDSTECSNLLLQYGSFCTQLNRALTGIAVEQDKNTQEVFAQVKQIYKTPPIKDFGGFNFSQILPDPSKPSKRSFIEDLLFNKVTLADAGFIKQYGDCLGDIAARDLICAQKFNGLTVLPPLLTDEMIAQYTSALLAGTITSGWTFGAGAALQIPFAMQMAYRFNGIGVTQNVLYENQKLIANQFNSAIGKIQDSLSSTASALGKLQDVVNQNAQALNTLVKQLSSNFGAISSVLNDILSRLDPPEAEVQIDRLITGRLQSLQTYVTQQLIRAAEIRASANLAATKMSECVLGQSKRVDFCGKGYHLMSFPQSAPHGVVFLHVTYVPAQEKNFTTAPAICHDGKAHFPREGVFVSNGTHWFVTQRNFYEPQIITTDNTFVSGNCDVVIGIVNNTVYDPLQPELDSFKEELDKYFKNHTSPDVDLGDISGINASVVNIQKEIDRLNEVAKNLNESLIDLQELGKYEQYIKWPWYIWLGFIAGLIAIVMVTIMLCCMTSCCSCLKGCCSCGSCCKFDEDDSEPVLKGVKLHYT

SEQ ID NO: 359 - protein, 1273 aa, Artificial Sequence
  SARS-CoV-2/England/200990660/2020__EPI_ISL_414523 spike protein (1-1273)(K986P_V987P)
MFVFLVLLPLVSSQCVNLTTRTQLPPAYTNSFTRGVYYPDKVFRSSVLHSTQDLFLPFFSNVTWFHAIHVSGTNGTKRFDNPVLPFNDGVYFASTEKSNIIRGWIFGTTLDSKTQSLLIVNNATNVVIKVCEFQFCNDPFLGVYYHKNNKSWMESEFRVYSSANNCTFEYVSQPFLMDLEGKQGNFKNLREFVFKNIDGYFKIYSKHTPINLVRDLPQGFSALEPLVDLPIGINITRFQTLLALHRSYLTPGDSSSGWTAGAAAYYVGYLQPRTFLLKYNENGTITDAVDCALDPLSETKCTLKSFTVEKGIYQTSNFRVQPTESIVRFPNITNLCPFGEVFNATRFASVYAWNRKRISNCVADYSVLYNSASFSTFKCYGVSPTKLNDLCFTNVYADSFVIRGDEVRQIAPGQTGKIADYNYKLPDDFTGCVIAWNSNNLDSKVGGNYNYLYRLFRKSNLKPFERDISTEIYQAGSTPCNGVEGFNCYFPLQSYGFQPTNGVGYQPYRVVVLSFELLHAPATVCGPKKSTNLVKNKCVNFNFNGLTGTGVLTESNKKFLPFQQFGRDIADTTDAVRDPQTLEILDITPCSFGGVSVITPGTNTSNQVAVLYQGVNCTEVPVAIHADQLTPTWRVYSTGSNVFQTRAGCLIGAEHVNNSYECDIPIGAGICASYQTQTNSPRRARSVASQSIIAYTMSLGAENSVAYSNNSIAIPTNFTISVTTEILPVSMTKTSVDCTMYICGDSTECSNLLLQYGSFCTQLNRALTGIAVEQDKNTQEVFAQVKQIYKTPPIKDFGGFNFSQILPDPSKPSKRSFIEDLLFNKVTLADAGFIKQYGDCLGDIAARDLICAQKFNGLTVLPPLLTDEMIAQYTSALLAGTITSGWTFGAGAALQIPFAMQMAYRFNGIGVTQNVLYENQKLIANQFNSAIGKIQDSLSSTASALGKLQDVVNQNAQALNTLVKQLSSNFGAISSVLNDILSRLDPPEAEVQIDRLITGRLQSLQTYVTQQLIRAAEIRASANLAATKMSECVLGQSKRVDFCGKGYHLMSFPQSAPHGVVFLHVTYVPAQEKNFTTAPAICHDGKAHFPREGVFVSNGTHWFVTQRNFYEPQIITTDNTFVSGNCDVVIGIVNNTVYDPLQPELDSFKEELDKYFKNHTSPDVDLGDISGINASVVNIQKEIDRLNEVAKNLNESLIDLQELGKYEQYIKWPWYIWLGFIAGLIAIVMVTIMLCCMTSCCSCLKGCCSCGSCCKFDEDDSELVLKGVKLHYT

SEQ ID NO: 360 - protein, 1273 aa, Artificial Sequence
  SARS-CoV-2/Australia/NSW09/2020__EPI_ISL_413595 spike protein (1-1273)(K986P_V987P)
MFVFLVLLPLVSSQCVNLTTRTQLPPAYTNSFTRGVYYPDKVFRSSVLHSTQDLFLPFFSNVTWFHAIHVSGTNGTKRFDNPVLPFNDGVYFASTEKSNIIRGWIFGTTLDSKTQSLLIVNNATNVVIKVCEFQFCNDPFLGVYYHKNNKSWMESEFRVYSSANNCTFEYVSQPFLMDLEGKQGNFKNLREFVFKNIDGYFKIYSKHTPINLVRDLPQGFSALEPLVDLPIGINITRFQTLLALHRSYLTPGDSSSGWTAGAAAYYVGYLQPRTFLLKYNENGTITDAVDCALDPLSETKCTLKSFTVEKGIYQTSNFRVQPTESIVRFPNITNLCPFGEVFNATRFASVYAWNRKRISNCVADYSVLYNSASFSTFKCYGVSPTKLNDLCFTNVYADSFVIRGDEVRQIAPGQTGKIADYNYKLPDDFTGCVIAWNSNNLDSKVGGNYNYLYRLFRKSNLKPFERDISTEIYQAGSTPCNGVEGFNCYFPLQSYGFQPTNGVGYQPYRVVVLSFELLHAPATVCGPKKSTNLVKNKCVNFNFNGLTGTGVLTESNKKFLPFQQFGRDIADTTDAVRDPQTLEILDITPCSFGGVSVITPGTNTSNQVAVLYQDVNCTEVPVAIHADQLTPTWRVYSTGSNVFQTRAGCLIGAEHVNNSYECDIPIGAGICASYQTQTNSPRRARSVASQSIIAYTMSLGAENSVAYSNNSIAIPTNFTISVTTEILPVSMTKTSVDCTMYICGDSTECSNLLLQYGSFCTQLNRALTGIAVEQDKNTQEVFAQVKQIYKTPPIKDFGGFNFSQILPDPSKPSKRSFIEDLLFNKVTLADAGFIKQYGDCLGDIAARDLICAQKFNGLTVLPPLLTDEMIAQYTSALLAGTITSGWTFGAGAALQIPFAMQMAYRFNGIGVTQNVLYENQKLIANQFNSAIGKIQDSLSFTASALGKLQDVVNQNAQALNTLVKQLSSNFGAISSVLNDILSRLDPPEAEVQIDRLITGRLQSLQTYVTQQLIRAAEIRASANLAATKMSECVLGQSKRVDFCGKGYHLMSFPQSAPHGVVFLHVTYVPAQEKNFTTAPAICHDGKAHFPREGVFVSNGTHWFVTQRNFYEPQIITTDNTFVSGNCDVVIGIVNNTVYDPLQPELDSFKEELDKYFKNHTSPDVDLGDISGINASVVNIQKEIDRLNEVAKNLNESLIDLQELGKYEQYIKWPWYIWLGFIAGLIAIVMVTIMLCCMTSCCSCLKGCCSCGSCCKFDEDDSEPVLKGVKLHYT

SEQ ID NO: 361 - protein, 1273 aa, Artificial Sequence
  SARS-CoV-2/Australia/NSW10/2020__EPI_ISL_413596 spike protein (1-1273)(K986P_V987P)
MFVFLVLLPLVSSQCVNLTTRTQLPPAYTNSFTRGVYYPDKVFRSSVLHSTQDLFLPFFSNVTWFHAIHVSGTNGTKRFDNPVLPFNDGVYFASTEKSNIIRGWIFGTTLDSKTQSLLIVNNATNVVIKVCEFQFCNDPFLGVYYHKNNKSWMESEFRVYSSANNCTFEYVSQPFLMDLEGKQGNFKNLREFVFKNIDGYFKIYSKHTPINLVRDLPQGFSALEPLVDLPIGINITRFQTLLALHRSYLTPGDSSSGWTAGAAAYYVGYLQPRTFLLKYNENGTITDAVDCALDPLSETKCTLKSFTVEKGIYQTSNFRVQPTESIVRFPNITNLCPFGEVFNATRFASVYAWNRKRISNCVADYSVLYNSASFSTFKCYGVSPTKLNDLCFTNVYADSFVIRGDEVRQIAPGQTGKIADYNYKLPDDFTGCVIAWNSNNLDSKVGGNYNYLYRLFRKSNLKPFERDISTEIYQAGSTPCNGVEGFNCYFPLQSYGFQPTNGVGYQPYRVVVLSFELLHAPATVCGPKKSTNLVKNKCVNFNFNGLTGTGVLTESNKKFLPFQQFGRDIADTTDAVRDPQTLEILDITPCSFGGVSVITPGTNTSNQVAVLYQDVNCTEVPVAIHADQLTPTWRVYSTGSNVFQTRAGCLIGAEHVNNSYECDIPIGAGICASYQTQTNSPRRARSVASQSIIAYTMSLGAENSVAYSNNSIAIPTNFTISVTTEILPVSMTKTSVDCTMYICGDSTECSNLLLQYGSFCTQLNRALTGIAVEQDKNTQEVFAQVKQIYKTPPIKDFGGFNFSQILPDPSKPSKRSFIEDLLFNKVTLADAGFIKQYGDCLGDIAARDLICAQKFNGLTVLPPLLTDEMIAQYTSALLAGTITSGWTFGAGAALQIPFAMQMAYRFNGIGVTQNVLYENQKLIANQFNSAIGKIQDSLSSTASALGKLQDVVNQNAQALNTLVKQLSSNFGAISSVLNDILSRLDPPEAEVQIDRLITGRLQSLQTYVTQQLIRAAEIRASANLAATKMSECVLGQSKRVDFCGKGYHLMSFPQSAPHGVVFLHVTYVPAQEKNFTTAPAICHDGKAHFPREGVFVSNGTHWFVTQRNFYEPQIITTDNTFVSGNCDVVIGIVNNTVYDPLQPELDSFKEELDKYFKNHTSPDVDLGDISGINASVVNIQKEIDRLNEVAKNLNESLIDLQELGKYEQYIKWPWYIWLGFIAGLIAIVMVTIMLCCMTSCCSCLKGCCSCGSCFKFDEDDSEPVLKGVKLHYT

SEQ ID NO: 362 - protein, 1273 aa, Artificial Sequence
  SARS-CoV-2/Switzerland/1000477797/2020__EPI_ISL_413023 spike protein (1-1273)(K986P_V987P)
MFVFLVLLPLVSSQCVNLTTRTQLPPAYTNSFTRGVYYPDKVFRSSVLHSTQDLFLPFFSNVTWFHAIHVSGTNGTKRFDNPVLPFNDGVYFASTEKSNIIRGWIFGTTLDSKTQSLLIVNNATNVVIKVCEFQFCNDPFLGVYYHKNNKSWMESEFRVYSSANNCTFEYVSQPFLMDLEGKQGNFKNLREFVFKNIDGYFNIYSKHTPINLVRDLPQGFSALEPLVDLPIGINITRFQTLLALHRSYLTPGDSSSGWTAGAAAYYVGYLQPRTFLLKYNENGTITDAVDCALDPLSETKCTLKSFTVEKGIYQTSNFRVQPTESIVRFPNITNLCPFGEVFNATRFASVYAWNRKRISNCVADYSVLYNSASFSTFKCYGVSPTKLNDLCFTNVYADSFVIRGDEVRQIAPGQTGKIADYNYKLPDDFTGCVIAWNSNNLDSKVGGNYNYLYRLFRKSNLKPFERDISTEIYQAGSTPCNGVEGFNCYFPLQSYGFQPTNGVGYQPYRVVVLSFELLHAPATVCGPKKSTNLVKNKCVNFNFNGLTGTGVLTESNKKFLPFQQFGRDIADTTDAVRDPQTLEILDITPCSFGGVSVITPGTNTSNQVAVLYQGVNCTEVPVAIHADQLTPTWRVYSTGSNVFQTRAGCLIGAEHVNNSYECDIPIGAGICASYQTQTNSPRRARSVASQSIIAYTMSLGAENSVAYSNNSIAIPTNFTISVTTEILPVSMTKTSVDCTMYICGDSTECSNLLLQYGSFCTQLNRALTGIAVEQDKNTQEVFAQVKQIYKTPPIKDFGGFNFSQILPDPSKPSKRSFIEDLLFNKVTLADAGFIKQYGDCLGDIAARDLICAQKFNGLTVLPPLLTDEMIAQYTSALLAGTITSGWTFGAGAALQIPFAMQMAYRFNGIGVTQNVLYENQKLIANQFNSAIGKIQDSLSSTASALGKLQDVVNQNAQALNTLVKQLSSNFGAISSVLNDILSRLDPPEAEVQIDRLITGRLQSLQTYVTQQLIRAAEIRASANLAATKMSECVLGQSKRVDFCGKGYHLMSFPQSAPHGVVFLHVTYVPAQEKNFTTAPAICHDGKAHFPREGVFVSNGTHWFVTQRNFYEPQIITTDNTFVSGNCDVVIGIVNNTVYDPLQPELDSFKEELDKYFKNHTSPDVDLGDISGINASVVNIQKEIDRLNEVAKNLNESLIDLQELGKYEQYIKWPWYIWLGFIAGLIAIVMVTIMLCCMTSCCSCLKGCCSCGSCCKFDEDDSEPVLKGVKLHYT

SEQ ID NO: 363 - protein, 1273 aa, Artificial Sequence
  SARS-CoV-2/Belgium/BA-02291/2020__EPI_ISL_415159 spike protein (1-1273)(K986P_V987P)
MFVFLVLLPLVSSQCVNLTTRTQLPPAYTNSFTRGVYYPDKVFRSSVLHSTQDLFLPFFSNVTWFHAIHVSGTNGTKRFDNPVLPFNDGVYFASTEKSNIIRGWIFGTTLDSKTQSLLIVNNATNVVIKVCEFQFCNDPFLGVYYHKNNKSWMESEFRVYSSANNCTFEYVSQPFLMDLEGKQGNFKNLREFVFKNIDGYFKIYSKHTPINLVRDLPQGFSALEPLVDLPIGINITRFQTLLALHRSYLTPGDSSSGWTAGAAAYYVGYLQPRTFLLKYNENGTITDAVDCALDPLSETKCTLKSFTVEKGIYQTSNFRVQPTESIVRFPNITNLCPFGEVFNATRFASVYAWNRKRISNCVADYSVLYNSASFSTFKCYGVSPTKLNDLCFTNVYADSFVIRGDEVRQIAPGQTGKIADYNYKLPDDFTGCVIAWNSNNLDSKVGGNYNYLYRLFRRSNLKPFERDISTEIYQAGSTPCNGVEGFNCYFPLQSYGFQPTNGVGYQPYRVVVLSFELLPAPATVCGPKKSTNLVKNKCVNFNFNGLTGTGVLTESNKKFLPFQQFGRDIADTTDAVRDPQTLEILDITPCSFGGVSVITPGTNTSNQVAVLYQGVNCTEVPVAIHADQLTPTWRVYSTGSNVFQTRAGCLIGAEHVNNSYECDIPIGAGICASYQTQTNSPRRARSVASQSIIAYTMSLGAENSVAYSNNSIAIPTNFTISVTTEILPVSMTKTSVDCTMYICGDSTECSNLLLQYGSFCTQLNRALTGIAVEQDKNTQEVFAQVKQIYKTPPIKDFGGFNFSQILPDPSKPSKRSFIEDLLFNKVTLADAGFIKQYGDCLGDIAARDLICAQKFNGLTVLPPLLTDEMIAQYTSALLAGTITSGWTFGAGAALQIPFAMQMAYRFNGIGVTQNVLYENQKLIANQFNSAIGKIQDSLSSAAPALGKLQDVVNQNAQALNTLVKQLSSNFGAISSVLNDILSRLDPPEAEVQIDRLITGRLQSLQTYVTQQLIRAAEIRASANLAATKMSECVLGQSKRVDFCGKGYHLMSFPQSAPHGVVFLHVTYVPAQEKNFTTAPAICHDGKAHFPREGVFVSNGTHWFVTQRNFYEPQIITTDNTFVSGNCDVVIGIVNNTVYDPLQPELDSFKEELDKYFKNHTSPDVDLGDISGINASVVNIQKEIDRLNEVAKNLNESLIDLQELGKYEQYIKWPWYIWLGFIAGLIAIVMVTIMLCCMTSCCSCLKGCCSCGSCCKFDEDDSEPVLKGVKLHYT

SEQ ID NO: 364 - protein, 1273 aa, Artificial Sequence
  SARS-CoV-2/USA/WA8-UW5/2020__EPI_ISL_413486 spike protein (1-1273)(K986P_V987P)
MFVFLVLLPLVSSQCVNLTTRTQLPPAYTNSFTRGVYYPDKVFRSSVLHSTQDLFLPFFSNVTWFHAIHVSGTNGTKRFDNPVLPFNDGVYFASTEKSNIIRGWIFGTTLDSKTQSLLIVNNATNVVIKVCEFQFCNDPFLGVYYHKNNKSWMESEFRVYSSANNCTFEYVSQPFLMDLEGKQGNFKNLREFVFKNIDGYFKIYSKHTPINLVRDLPQGFSALEPLVDLPIGINITRFQTLLALHRSYLTPGDSSSGWTAGAAAYYVGYLQPRTFLLKYNENGTITDAVDCALDPLSETKCTLKSFTVEKGIYQTSNFRVQPTESIVRFPNITNLCPFGEVFNATRFASVYAWNRKRISNCVADYSVLYNSASFSTFKCYGVSPTKLNDLCFTNVYADSFVIRGDEVRQIAPGQTGKIADYNYKLPDDFTGCVIAWNSNNLDSKVGGNYNYLYRLFRKSNLKPFERDISTEIYQAGSTPCNGVEGFNCYFPLQSYGFQPTNGVGYQPYRVVVLSFELLHAPATVCGPKKSTNLVKNKCVNFNFNGLTGTGVLTESNKKFLPFQQFGRDIADTTDAVRDPQTLEILDITPCSFGGVSVITPGTNTSNQVAVLYQDVNCTEVPVAIHADQLTPTWRVYSTGSNVFQTRAGCLIGAEYVNNSYECDIPIGAGICASYQTQTNSPRRARSVASQSIIAYTMSLGAENSVAYSNNSIAIPTNFTISVTTEILPVSMTKTSVDCTMYICGDSTECSNLLLQYGSFCTQLNRALTGIAVEQDKNTQEVFAQVKQIYKTPPIKDFGGFNFSQILPDPSKPSKRSFIEDLLFNKVTLADAGFIKQYGDCLGDIAARDLICAQKFNGLTVLPPLLTDEMIAQYTSALLAGTITSGWTFGAGAALQIPFAMQMAYRFNGIGVTQNVLYENQKLIANQFNSAIGKIQDSLSSTASALGKLQDVVNQNAQALNTLVKQLSSNFGAISSVLNDILSRLDPPEAEVQIDRLITGRLQSLQTYVTQQLIRAAEIRASANLAATKMSECVLGQSKRVDFCGKGYHLMSFPQSAPHGVVFLHVTYVPAQEKNFTTAPAICHDGKAHFPREGVFVSNGTHWFVTQRNFYEPQIITTDNTFVSGNCDVVIGIVNNTVYDPLQPELDSFKEELDKYFKNHTSPDVDLGDISGINASVVNIQKEIDRLNEVAKNLNESLIDLQELGKYEQYIKWPWYIWLGFIAGLIAIVMVTIMLCCMTSCCSCLKGCCSCGSCCKFDEDDSEPVLKGVKLHYT

SEQ ID NO: 365 - protein, 1273 aa, Artificial Sequence
  SARS-CoV-2/England/20102000506/2020__EPI_ISL_415147 spike protein (1-1273)(K986P_V987P)
MFVFLVLLPLVSSQCVNLTTRTQLPPAYTNSFTRGVYYPDKVFRSSVLHSTQDLFLPFFSNVTWFHAIHVSGTNGTKRFDNPVLPFNDGVYFASTEKSNIIRGWIFGTTLDSKTQSLLIVNNATNVVIKVCEFQFCNDPFLGVYYHKNNKSWMESEFRVYSSANNCTFEYVSQPFLMDLEGKQGNFKNLREFVFKNIDGYFKIYSKHTPINLVRDLPQGFSALEPLVDLPIGINITRFQTLLALHRSYLTPGDSSSGWTAGAAAYYVGYLQPRTFLLKYNENGTITDAVDCALDPLSETKCTLKSFTVEKGIYQTSNFRVQPTESIVRFPNITNLCPFGEVFNATRFASVYAWNRKRISNCVADYSVLYNSASFSTFKCYGVSPTKLNDLCFTNVYADSFVIRGDEVRQIAPGQTGKIADYNYKLPDDFTGCVIAWNSNNLDSKVGGNYNYLYRLFRKSNLKPFERDISTEIYQAGSTPCNGVEGFNCYFPLQSYGFQPTNGVGYQPYRVVVLSFELLHAPATVCGPKKSTNLVKNKCVNFNFNGLTGTGVLTESNKKFLPFQQFGRDIADTTDAVRDPQTLEILDITPCSFGGVSVITPGTNTSNQVAVLYQGVNCTEVPVAIHADQLTPTWRVYSTGSNVFQTRAGCLIGAEHVNNSYECDIPIGAGICASYQTQTNSPRRARSVASQSIIAYTMSLGAENSVAYSNNSIAIPTNFTISVTTEILPVSMTKTSVDCTMYICGDSTECSNLLLQYGSFCTQLNRALTGIAVEQDKNTQEVFAQVKQIYKTPPIKDFGGFNFSQILPDPSKPSKRSFIEDLLFNKVTLADAGFIKQYGYCLGDIAARDLICAQKFNGLTVLPPLLTDEMIAQYTSALLAGTITSGWTFGAGAALQIPFAMQMAYRFNGIGVTQNVLYENQKLIANQFNSAIGKIQDSLSSTASALGKLQDVVNQNAQALNTLVKQLSSNFGAISSVLNDILSRLDPPEAEVQIDRLITGRLQSLQTYVTQQLIRAAEIRASANLAATKMSECVLGQSKRVDFCGKGYHLMSFPQSAPHGVVFLHVTYVPAQEKNFTTAPAICHDGKAHFPREGVFVSNGTHWFVTQRNFYEPQIITTDNTFVSGNCDVVIGIVNNTVYDPLQPELDSFKEELDKYFKNHTSPDVDLGDISGINASVVNIQKEIDRLNEVAKNLNESLIDLQELGKYEQYIKWPWYIWLGFIAGLIAIVMVTIMLCCMTSCCSCLKGCCSCGSCCKFDEDDSEPVLKGVKLHYT

SEQ ID NO: 366 - protein, 1273 aa, Artificial Sequence
  SARS-CoV-2/Belgium/VAG-03013/2020__EPI_ISL_415155 spike protein (1-1273)(K986P_V987P)
MFVFLVLLPLVSSQCVNLTTRTQLPPAYTNSFTRGVYYPDKVFRSSVLHSTQDLFLPFFSNVTWFHAIHVSGTNGTKRFDNPVLPFNDGVYFASTEKSNIIRGWIFGTTLDSKTQSLLIVNNATNVVIKVCEFQFCNDPFLGVYYHKNNKSWMESEFRVYSSANNCTFEYVSQPFLMDLEGKQGNFKNLREFVFKNIDGYFKIYSKHTPINLVRDLPQGFSALEPLVDLPIGINITRFQTLLALHRSYLTPGDSSSGWTAGAAAYYVGYLQPRTFLLKYNENGTITDAVDCALDPLSETKCTLKSFTVEKGIYQTSNFRVQPTESIVRFPNITNLCPFGEVFNATRFASVYAWNRKRISNCVADYSVLYNSASFSTFKCYGVSPTKLNDLCFTNVYADSFVIRGDEVRQIAPGQTGKIADYNYKLPDDFTGCVIAWNSNNLDSKVGGNYNYLYRLFRKSNLKPFERDISTEIYQAGSTPCNGVEGFNCYFPLQSYGFQPTNGVGYQPYRVVVLSFELLHAPATVCGPKKSTNLVKNKCVNFNFNGLTGTGVLTESNKKFLPFQQFGRDIADTTDAVRDPQTLEILDITPCSFGGVSVITPGTNTSNQVAVLYQGVNCTEVPVAIHADQLTPTWRVYSTGSNVFQTRAGCLIGAEHVNNSYECDIPIGAGICASYQTQTNSPRRARSVASQSIIAYTMSLGAENSVAYSNNSIAIPTNFTISVTTEILPVSMTKTSVDCTMYICGDSTECSNLLLQYGSFCTQLNRALTGIAVEQDKNTQEVFAQVKQIYKTPPIKDFGGFNFSQILPDPSKPSKRSFIEDLLFNKVTLADAGFIKQYGDCLGDIAARDLICAQKFNGLTVLPPLLTDEMIAQYTSALLAGTITSGWTFGAGAALQIPFAMQMAYRFNGIGVTQNVLYENQKLIANQFNSAIGKIQDSLSSTATALGKLQDVVNQNAQALNTLVKQLSSNFGAISSVLNDILSRLDPPEAEVQIDRLITGRLQSLQTYVTQQLIRAAEIRASANLAATKMSECVLGQSKRVDFCGKGYHLMSFPQSAPHGVVFLHVTYVPAQEKNFTTAPAICHDGKAHFPREGVFVSNGTHWFVTQRNFYEPQIITTDNTFVSGNCDVVIGIVNNTVYDPLQPELDSFKEELDKYFKNHTSPDVDLGDISGINASVVNIQKEIDRLNEVAKNLNESLIDLQELGKYEQYIKWPWYIWLGFIAGLIAIVMVTIMLCCMTSCCSCLKGCCSCGSCCKFDEDDSEPVLKGVKLHYT

SEQ ID NO: 367 - protein, 1273 aa, Artificial Sequence
  SARS-CoV-2/Belgium/BC-03016/2020__EPI_ISL_415157 spike protein (1-1273)(K986P_V987P)
MFVFLVLLPLVSSQCVNLTTRTQLPPAYTNSFTRGVYYPDKVFRSSVLHSTQDLFLPFFSNVTWFHAIHVSGTNGTKRFDNPVLPFNDGVYFASTEKSNIIRGWIFGTTLDSKTQSLLIVNNATNVVIKVCEFQFCNDPFLGVYYHKNNKSWMESEFRVYSSANNCTFEYVSQPFLMDLEGKQGNFKNLREFVFKNIDGYFKIYSKHTPINLVRDLPQGFSALEPLVDLPIGINITRFQTLLALHRSYLTPGDSSSGWTAGAAAYYVGYLQPRTFLLKYNENGTITDAVDCALDPLSETKCTLKSFTVEKGIYQTSNFRVQPTESIVRFPNITNLCPFGEVFNATRFASVYAWNRKRISNCVADYSVLYNSASFSTFKCYGVSPTKLNDLCFTNVYADSFVIRGDEVRQIAPGQTGKIADYNYKLPDDFTGCVIAWNSNNLDSKVGGNYNYLYRLFRKSNLKPFERDISTEIYQAGSTPCNGVEGFNCYFPLQSYGFQPTNGVGYQPYRVVVLSFELLHAPATVCGPKKSTNLVKNKCVNFNFNGLTGTGVLTESNKKFLPFQQFGRDIADTTDAVRDPQTLEILDITPCSFGGVSVITPGTNTSNQVAVLYQGVNCTEVPVAIHADQLTPTWRVYSTGSNVFQTRAGCLIGAEHVNNSYECDIPIGAGICASYQTQTNSPRRARSVASQSIIAYTMSLGAENSVAYSNNSIAIPTNFTISVTTEILPVSMTKTSVDCTMYICGDSTECSNLLLQYGSFCTQLNRALTGIAVEQDKNTQEVFAQVKQIYKTPPIKDFGGFNFSQILPDPSKPSKRSFIEDLLFNKVTLADAGFIKQYGDCLGDIAARDLICAQKFNGLTVLPPLLTDEMIAQYTSALLAGTITSGWTFGAGAALQIPFAMQMAYRFNGIGVTQNVLYENQKLIANQFNSAIGKIQDSLSSTAPALGKLQDVVNQNAQALNTLVKQLSSNFGAISSVLNDILSRLDPPEAEVQIDRLITGRLQSLQTYVTQQLIRAAEIRASANLAATKMSECVLGQSKRVDFCGKGYHLMSFPQSAPHGVVFLHVTYVPAQEKNFTTAPAICHDGKAHFPREGVFVSNGTHWFVTQRNFYEPQIITTDNTFVSGNCDVVIGIVNNTVYDPLQPELDSFKEELDKYFKNHTSPDVDLGDISGINASVVNIQKEIDRLNEVAKNLNESLIDLQELGKYEQYIKWPWYIWLGFIAGLIAIVMVTIMLCCMTSCCSCLKGCCSCGSCCKFDEDDSEPVLKGVKLHYT

SEQ ID NO: 368 - protein, 1273 aa, Artificial Sequence
  SARS-CoV-2/Germany/BavPat3/2020__EPI_ISL_414521 spike protein (1-1273)(K986P_V987P)
MFVFLVLLPLVSSQCVNLTTRTQLPPAYTNSFTRGVYYPDKVFRSSVLHSTQDLFLPFFSNVTWFHAIHVSGTNGTKRFDNPVLPFNDGVYFASTEKSNIIRGWIFGTTLDSKTQSLLIVNNATNVVIKVCEFQFCNDPFLGVYYHKNNKSWMESEFRVYSSANNCTFEYVSQPFLMDLEGKQGNFKNLREFVFKNIDGYFKIYSKHTPINLVRDLPQGFSALEPLVDLPIGINITRFQTLLALHRSYLTPGDSSSGWTAGAAAYYVGYLQPRTFLLKYNENGTITDAVDCALDPLSETKCTLKSFTVEKGIYQTSNFRVQPTESIVRFPNITNLCPFGEVFNATRFASVYAWNRKRISNCVADYSVLYNSASFSTFKCYGVSPTKLNDLCFTNVYADSFVIRGDEVRQIAPGQTGKIADYNYKLPDDFTGCVIAWNSNNLDSKVGGNYNYLYRLFRKSNLKPFERDISTEIYQAGSTPCNGVEGFNCYFPLQSYGFQPTNGVGYQPYRVVVLSFELLHAPATVCGPKKSTNLVKNKCVNFNFNGLTGTGVLTESNKKFLPFQQFGRDIADTTDAVRDPQTLEILDITPCSFGGVSVITPGTNTSNQVAVLYQDVNCTEVPVAIHADQLTPTWRVYSTGSNVFQTRAGCLIGAEHVNNSYECDIPIGAGICASYQTQTNSPRRARSVASQSIIAYTMSLGAENSVAYSNNSIAIPTNFTISVTTEILPVSMTKTSVDCTMYICGDSTECSNLLLQYGSFCTQLNRALTGIAVEQDKNTQQVFAQVKQIYKTPPIKDFGGFNFSQILPDPSKPSKRSFIEDLLFNKVTLADAGFIKQYGDCLGDIAARDLICAQKFNGLTVLPPLLTDEMIAQYTSALLAGTITSGWTFGAGAALQIPFAMQMAYRFNGIGVTQNVLYENQKLIANQFNSAIGKIQDSLSSTASALGKLQDVVNQNAQALNTLVKQLSSNFGAISSVLNDILSRLDPPEAEVQIDRLITGRLQSLQTYVTQQLIRAAEIRASANLAATKMSECVLGQSKRVDFCGKGYHLMSFPQSAPHGVVFLHVTYVPAQEKNFTTAPAICHDGKAHFPREGVFVSNGTHWFVTQRNFYEPQIITTDNTFVSGNCDVVIGIVNNTVYDPLQPELDSFKEELDKYFKNHTSPDVDLGDISGINASVVNIQKEIDRLNEVAKNLNESLIDLQELGKYEQYIKWPWYIWLGFIAGLIAIVMVTIMLCCMTSCCSCLKGCCSCGSCCKFDEDDSEPVLKGVKLHYT

SEQ ID NO: 369 - protein, 1273 aa, Artificial Sequence
  SARS-CoV-2/France/HF1805/2020__EPI_ISL_414628 spike protein (1-1273)(K986P_V987P)
MFVFLVLLPLVSSQCVNLTTRTQLPPAYTNSFTRGVYYPDKVFRSSVLHSTQDLFLPFFSNVTWFHAIHVSGTNGTKRFDNPVLPFNDGVYFASTEKSNIIRGWIFGTTLDSKTQSLLIVNNATNVVIKVCEFQFCNDPFLGVYYHKNNKSWMESEFRVYSSANNCTFEYVSQPFLMDLEGKQGNFKNLREFVFKNIDGYFKIYSKHTPINLVRDLPQGFSALEPLVDLPIGINITRFQTLLALHRSYLTPGDSSSGWTAGAAAYYVGYLQPRTFLLKYNENGTITDAVDCALDPLSETKCTLKSFTVEKGIYQTSNFRVQPTESIVRFPNITNLCPFGEVFNATRFASVYAWNRKRISNCVADYSVLYNSASFSTFKCYGVSPTKLNDLCFTNVYADSFVIRGDEVRQIAPGQTGKIADYNYKLPDDFTGCVIAWNSNNLDSKVGGNYNYLYRLFRKSNLKPFERDISTEIYQAGSTPCNGVEGFNCYFPLQSYGFQPTNGVGYQPYRVVVLSFELLHAPATVCGPKKSTNLVKNKCVNFNFNGLTGTGVLTESNKKFLPFQQFGRDIADTTDAVRDPQTLEILDITPCSFGGVSVITPGTNTSNQVAVLYQGVNCTEVPVAIHADQLTPTWRVYSTGSNVFQTRAGCLIGAEHVNNSYECDIPIGAGICASYQTQTNSPRRARSVASQSIIAYTMSLGAENSVAYSNNSIAIPTNFTISVTTEILPVSMTKTSVDCTMYICGDSTECSNLLLQYGSFCTQLNRALTGIAVEQDKNTQEVFAQVKQIYKTPPIKDFGGFNFSQILPDPSKPSKRSFIEDLLFNKVTLADAGFIKQYGDCLGDIAARDLICAQKFNGLTVLPPLLTDEMIAQYTSALLAGTITSGWTFGAGAALQIPFAMQMAYRFNGIGVTQNVLYENQKLIANQFNSAIGKIQDSLSSTASALGKLQDVVNQNAQALNTLVKQLSSNFGAISSVLNDILSRLDPPEAEVQIDRLITGRLQSLQTYVTQQLIRAAEIRASANLAATKMSECVLGQSKRVDFCGKGYHLMSFPQSAPHGVVFLHVTYVPAQEKNFTTAPAICHDGKAHFPREGVFVSNGTHWFVTQRNFYEPQIITTDNTFVSGNCDVVIGVVNNTVYDPLQPELDSFKEELDKYFKNHTSPDVDLGDISGINASVVNIQKEIDRLNEVAKNLNESLIDLQELGKYEQYIKWPWYIWLGFIAGLIAIVMVTIMLCCMTSCCSCLKGCCSCGSCCKFDEDDSEPVLKGVKLHYT

SEQ ID NO: 370 - protein, 1273 aa, Artificial Sequence
  SARS-CoV-2/Netherlands/ZuidHolland_9/2020__EPI_ISL_414445 spike protein (1-1273)(K986P_V987P)
MFVFLVLLPLVSSQCVNLTTRTQLPPAYTNSFTRGVYYPDKVFRSSVLHSTQDLFLPFFSNVTWFHAIHVSGTNGTKRFDNPVLPFNDGVYFASTEKSNIIRGWIFGTTLDSKTQSLLIVNNATNVVIKVCEFQFCNDPFLGVYYHKNNKSWMESEFRVYSSANNCTFEYVSQPFLMDLEGKQGNFKNLREFVFKNIDGYFKIYSKHTPINLVRDLPQGFSALEPLVDLPIGINITRFQTLLALHRSYLTPGDSSSGWTAGAAAYYVGYLQPRTFLLKYNENGTITDAVDCALDPLSETKCTLKSFTVEKGIYQTSNFRVQPTESIVRFPNITNLCPFGEVFNATRFASVYAWNRKRISNCVADYSVLYNSASFSTFKCYGVSPTKLNDLCFTNVYADSFVIRGDEVRQIAPGQTGKIADYNYKLPDDFTGCVIAWNSNNLDSKVGGNYNYLYRLFRKSNLKPFERDISTEIYQAGSTPCNGVEGFNCYFPLQSYGFQPTNGVGYQPYRVVVLSFELLHAPATVCGPKKSTNLVKNKCVNFNFNGLTGTGVLTESNKKFLPFQQFGRDIADTTDAVRDPQTLEILDITPCSFGGVSVITPGTNTSNQVAVLYQGVNCTEVPVAIHADQLTPTWRVYSTGSNVFQTRAGCLIGAEHVNNSYECDIPIGAGICASYQTQTNSPRRARSVASQSIIAYTMSLGAENSVAYSNNSIAIPTNFTISVTTEILPVSMTKTSVDCTMYICGDSTECSNLLLQYGSFCTQLNRALTGIAVEQDKNTQEVFAQVKQIYKTPPIKDFGGFNFSQILPDPSKPSKRSFIEDLLFNKVTLADAGFIKQYGDCLGDIAARDLICVQKFNGLTVLPPLLTDEMIAQYTSALLAGTITSGWTFGAGAALQIPFAMQMAYRFNGIGVTQNVLYENQKLIANQFNSAIGKIQDSLSSTASALGKLQDVVNQNAQALNTLVKQLSSNFGAISSVLNDILSRLDPPEAEVQIDRLITGRLQSLQTYVTQQLIRAAEIRASANLAATKMSECVLGQSKRVDFCGKGYHLMSFPQSAPHGVVFLHVTYVPAQEKNFTTAPAICHDGKAHFPREGVFVSNGTHWFVTQRNFYEPQIITTDNTFVSGNCDVVIGIVNNTVYDPLQPELDSFKEELDKYFKNHTSPDVDLGDISGINASVVNIQKEIDRLNEVAKNLNESLIDLQELGKYEQYIKWPWYIWLGFIAGLIAIVMVTIMLCCMTSCCSCLKGCCSCGSCCKFDEDDSEPVLKGVKLHYT

SEQ ID NO: 371 - protein, 1273 aa, Artificial Sequence
  SARS-CoV-2/Finland/FIN03032020A/2020__EPI_ISL_413602 spike protein (1-1273)(K986P_V987P)
MFVFLVLLPLVSSQCVNLTTRTQLPPAYTNSFTRGVYYPDKVFRSSVLHSTQDLFLPFFSNVTWFHAIHVSGTNGTKRFDNPVLPFNDGVYFASTEKSNIIRGWIFGTTLDSKTQSLLIVNNATNVVIKVCEFQFCNDPFLGVYYHKNNKSWMESEFRVYSSANNCTFEYVSQPFLMDLEGKQGNFKNLREFVFKNIDGYFKIYSKHTPINLVRDLPQGFSALEPLVDLPIGINITRFQTLLALHRSYLTPGDSSSGWTAGAAAYYVGYLQPRTFLLKYNENGTITDAVDCALDPLSETKCTLKSFTVEKGIYQTSNFRVQPTESIVRFPNITNLCPFGEVFNATRFASVYAWNRKRISNCVADYSVLYNSASFSTFKCYGVSPTKLNDLCFTNVYADSFVIRGDEVRQIAPGQTGKIADYNYKLPDDFTGCVISWNSNNLDSKVGGNYNYLYRLFRKSNLKPFERDISTEIYQAGSTPCNGVEGFNCYFPLQSYGFQPTNGVGYQPYRVVVLSFELLHAPATVCGPKKSTNLVKNKCVNFNFNGLTGTGVLTESNKKFLPFQQFGRDIADTTDAVRDPQTLEILDITPCSFGGVSVITPGTNTSNQVAVLYQGVNCTEVPVAIHADQLTPTWRVYSTGSNVFQTRAGCLIGAEHVNNSYECDIPIGAGICASYQTQTNSPRRARSVASQSIIAYTMSLGAENSVAYSNNSIAIPTNFTISVTTEILPVSMTKTSVDCTMYICGDSTECSNLLLQYGSFCTQLNRALTGIAVEQDKNTQEVFAQVKQIYKTPPIKDFGGFNFSQILPDPSKPSKRSFIEDLLFNKVTLADAGFIKQYGDCLGDIAARDLICAQKFNGLTVLPPLLTDEMIAQYTSALLAGTITSGWTFGAGAALQIPFAMQMAYRFNGIGVTQNVLYENQKLIANQFNSAIGKIQDSLSSTASALGKLQDVVNQNAQALNTLVKQLSSNFGAISSVLNDILSRLDPPEAEVQIDRLITGRLQSLQTYVTQQLIRAAEIRASANLAATKMSECVLGQSKRVDFCGKGYHLMSFPQSAPHGVVFLHVTYVPAQEKNFTTAPAICHDGKAHFPREGVFVSNGTHWFVTQRNFYEPQIITTDNTFVSGNCDVVIGIVNNTVYDPLQPELDSFKEELDKYFKNHTSPDVDLGDISGINASVVNIQKEIDRLNEVAKNLNESLIDLQELGKYEQYIKWPWYIWLGFIAGLIAIVMVTIMLCCMTSCCSCLKGCCSCGSCCKFDEDDSEPVLKGVKLHYT

SEQ ID NO: 372 - protein, 1273 aa, Artificial Sequence
  SARS-CoV-2/France/GE1977/2020__EPI_ISL_414632 spike protein (1-1273)(K986P_V987P)
MFVFLVLLPLVSSQCVNLTTRTQLPPAYTNSFTRGVYYPDKVFRSSVLHSTQDLFLPFFSNVTWFHAIHVSGTNGTKRFDNPVLPFNDGVYFASTEKSNIIRGWIFGTTLDSKTQSLLIVNNATNVVIKVCEFQFCNDPFLGVYYHKNNKSWMESEFRVYSSANNCTFEYVSQPFLMDLEGKQGNFKNLREFVFKNIDGYFKIYSKHTPINLVRDLPQGFSALEPLVDLPIGINITRFQTLLALHRSYLTPGDSSSGWTAGAAAYYVGYLQPRTFLLKYNENGTITDAVDCALDPLSETKCTLKSFTVEKGIYQTSNFRVQPTESIVRFPNITNLCPFGEVFNATRFASVYAWNRKRISNCVADYSVLYNSASFSTFKCYGVSPTKLNDLCFTNVYADSFVIRGDEVRQIAPGQTGKIADYNYKLPDDFTGCVIAWNSNNLDSKVGGNYNYLYRLFRKSNLKPFERDISTEIYQAGSTPCNGVEGFNCYFPLQSYGFQPTNGVGYQPYRVVVLSFELLHAPATVCGPKKSTNLVKNKCVNFNFNGLTGTGVLTESNKKFLPFQQFGRDIADTTDAVRDPQTLEILDITPCSFGGVSVITPGTNTSNQVAVLYQGVNCTEVPVAIHADQLTPTWRVYSTGSNVFQTRAGCLIGAEHVNNSYECDIPIGAGICASYQTQTNSPRRARSVASQSIIAYTMSLGAENSVAYSNNSIAIPTNFTISVTTEILPVSMTKTSVDCTMYICGDSTECSNLLLQYGSFCTQLNRALTGIAVEQDKNTQEVFAQVKQIYKTPPIKDFGGFNFSQILPDPSKPSKRSFIEDLLFNKVTLADAGFIKQYGDCLGDIAARDLICAQKFNGLTVLPPLLTDEMIAQYTSALLAGTITSGWTFGAGAALQIPFAMQMAYRFNGIGVTQNVLYENQKLIANQFNSAIGKIQDSLFSTASALGKLQDVVNQNAQALNTLVKQLSSNFGAISSVLNDILSRLDPPEAEVQIDRLITGRLQSLQTYVTQQLIRAAEIRASANLAATKMSECVLGQSKRVDFCGKGYHLMSFPQSAPHGVVFLHVTYVPAQEKNFTTAPAICHDGKAHFPREGVFVSNGTHWFVTQRNFYEPQIITTDNTFVSGNCDVVIGIVNNTVYDPLQPELDSFKEELDKYFKNHTSPDVDLGDISGINASVVNIQKEIDRLNEVAKNLNESLIDLQELGKYEQYIKWPWYIWLGFIAGLIAIVMVTIMLCCMTSCCSCLKGCCSCGSCCKFDEDDSEPVLKGVKLHYT

SEQ ID NO: 373 - protein, 1273 aa, Artificial Sequence
  SARS-CoV-2/Finland/FIN-313/2020__EPI_ISL_414641 spike protein (1-1273)(K986P_V987P)
MFVFLVLLPLVSSQCVNLTTRTQLPPAYTNSFTRGVYYPDKVFRSSVLHSTQDLFLPFFSNVTWFHAIHVSGTNGTKRFDNPVLPFNDGVYFASTEKSNIIRGWIFGTTLDSKTQSLLIVNNATNVVIKVCEFQFCNDPFLGVYYHKNNKSWMESEFRVYSSANNCTFEYVSQPFLMDLEGKQGNFKNLREFVFKNIDGYFKIYSKHTPINLVRDLPQGFSALEPLVDLPIGINITRFKTLLALHRSYLTPGDSSSGWTAGAAAYYVGYLQPRTFLLKYNENGTITDAVDCALDPLSETKCTLKSFTVEKGIYQTSNFRVQPTESIVRFPNITNLCPFGEVFNATRFASVYAWNRKRISNCVADYSVLYNSASFSTFKCYGVSPTKLNDLCFTNVYADSFVIRGDEVRQIAPGQTGKIADYNYKLPDDFTGCVIAWNSNNLDSKVGGNYNYLYRLFRKSNLKPFERDISTEIYQAGSTPCNGVEGFNCYFPLQSYGFQPTNGVGYQPYRVVVLSFELLHAPATVCGPKKSTNLVKNKCVNFNFNGLTGTGVLTESNKKFLPFQQFGRDIADTTDAVRDPQTLEILDITPCSFGGVSVITPGTNTSNQVAVLYQGVNCTEVPVAIHADQLTPTWRVYSTGSNVFQTRAGCLIGAEHVNNSYECDIPIGAGICASYQTQTNSPRRARSVASQSIIAYTMSLGAENSVAYSNNSIAIPTNFTISVTTEILPVSMTKTSVDCTMYICGDSTECSNLLLQYGSFCTQLNRALTGIAVEQDKNTQEVFAQVKQIYKTPPIKDFGGFNFSQILPDPSKPSKRSFIEDLLFNKVTLADAGFIKQYGDCLGDIAARDLICAQKFNGLTVLPPLLTDEMIAQYTSALLAGTITSGWTFGAGAALQIPFAMQMAYRFNGIGVTQNVLYENQKLIANQFNSAIGKIQDSLSSTASALGKLQDVVNQNAQALNTLVKQLSSNFGAISSVLNDILSRLDPPEAEVQIDRLITGRLQSLQTYVTQQLIRAAEIRASANLAATKMSECVLGQSKRVDFCGKGYHLMSFPQSAPHGVVFLHVTYVPAQEKNFTTAPAICHDGKAHFPREGVFVSNGTHWFVTQRNFYEPQIITTDNTFVSGNCDVVIGIVNNTVYDPLQPELDSFKEELDKYFKNHTSPDVDLGDISGINASVVNIQKEIDRLNEVAKNLNESLIDLQELGKYEQYIKWPWYIWLGFIAGLIAIVMVTIMLCCMTSCCSCLKGCCSCGSCCKFDEDDSEPVLKGVKLHYT

SEQ ID NO: 374 - protein, 1273 aa, Artificial Sequence
  SARS-CoV-2/Netherlands/ZuidHolland_2/2020__EPI_ISL_414556 spike protein (1-1273)(K986P_V987P)
MFVFLVLLPLVSSQCVNLTTRTQLPPAYTNSFTRGVYYPDKVFRSSVLHSTQDLFLPFFSNVTWFHAIHVSGTNGTKRFDNPVLPFNDGVYFASTEKSNIIRGWIFGTTLDSKTQSLLIVNNATNVVIKVCEFQFCNDPFLGVYYHKNNKSWMESEFRVYSSANNCTFEYVSQPFLMDLEGKQGNFKNLREFVFKNIDGYFKIYSKHTPINLVRDLPQGFSALEPLVDLPIGINITRFQTLLALHRSYLTPGDSSSGWTAGAAAYYVGYLQPRTFLLKYNENGTITDAVDCALDPLSETKCTLKSFTVEKGIYQTSNFRVQPTESIVRFPNITNLCPFGEVFNATRFASVYAWNRKRISNCVADYSVLYNSASFSTFKCYGVSPTKLNDLCFTNVYADSFVIRGDEVRQIAPGQTGKIADYNYKLPDDFTGCVIAWNSNNLDSKVGGNYNYLYRLFRKSNLKPFERDISTEIYQAGSTPCNGVEGFNCYFPLQSYGFQPTNGVGYQPYRVVVLSFELLHAPATVCGPKKSTNLVKNKCVNFNFNGLTGTGVLTESNKKFLPFQQFGRDIADTTDAVRDPQTLEILDITPCSFGGVSVITPGTNTSNQVAVLYQGVNCTEVPVAIHADQLTPTWRVYSTGSNVFQTRAGCLIGAEHVNNSYECDIPIGAGICASYQTQTNSPRRARSVASQSIIAYTMSLGAENSVAYSNNSIAIPTNFTISVTTEILPVSMTKTSVDCTMYICGDSTECSNLLLQYGSFCTQLNRALTGIALEQDKNTQEVFAQVKQIYKTPPIKDFGGFNFSQILPDPSKPSKRSFIEDLLFNKVTLADAGFIKQYGDCLGDIAARDLICAQKFNGLTVLPPLLTDEMIAQYTSALLAGTITSGWTFGAGAALQIPFAMQMAYRFNGIGVTQNVLYENQKLIANQFNSAIGKIQDSLSSTASALGKLQDVVNQNAQALNTLVKQLSSNFGAISSVLNDILSRLDPPEAEVQIDRLITGRLQSLQTYVTQQLIRAAEIRASANLAATKMSECVLGQSKRVDFCGKGYHLMSFPQSAPHGVVFLHVTYVPAQEKNFTTAPAICHDGKAHFPREGVFVSNGTHWFVTQRNFYEPQIITTDNTFVSGNCDVVIGIVNNTVYDPLQPELDSFKEELDKYFKNHTSPDVDLGDISGINASVVNIQKEIDRLNEVAKNLNESLIDLQELGKYEQYIKWPWYIWLGFIAGLIAIVMVTIMLCCMTSCCSCLKGCCSCGSCCKFDEDDSEPVLKGVKLHYT

SEQ ID NO: 375 - protein, 1273 aa, Artificial Sequence
  SARS-CoV-2/USA/WA-UW31/2020__EPI_ISL_414618 spike protein (1-1273)(K986P_V987P)
MFVFLVLLPLVSSQCVNLTTRTQLPPAYTNSFTRGVYYPDKVFRSSVLHSTQDLFLPFFSNVTWFHAIHVSGTNGTKRFDNPVLPFNDGVYFASTEKSNIIRGWIFGTTLDSKTQSLLIVNNATNVVIKVCEFQFCNDPFLGVYYHKNNKSWMESEFRVYSSANNCTFEYVSQPFLMDLEGKQGNFKNLREFVFKNIDGYFKIYSKHTPINLVRDLPQGFSALEPLVDLPIGINITRFQTLLALHRSYLTPGDSSSGWTAGAAAYYVGYLQPRTFLLKYNENGTITDAVDCALDPLSETKCTLKSFTVEKGIYQTSNFRVQPTESIVRFPNITNLCPFGEVFNATRFASVYAWNRKRISNCVADYSVLYNSASFSTFKCYGVSPTKLNDLCFTNVYADSFVIRGDEVRQIAPGQTGKIADYNYKLPDDFTGCVIAWNSNNLDSKVGGNYNYLYRLFRKSNLKPFERDISTEIYQAGSTPCNGAEGFNCYFPLQSYGFQPTNGVGYQPYRVVVLSFELLHAPATVCGPKKSTNLVKNKCVNFNFNGLTGTGVLTESNKKFLPFQQFGRDIADTTDAVRDPQTLEILDITPCSFGGVSVITPGTNTSNQVAVLYQDVNCTEVPVAIHADQLTPTWRVYSTGSNVFQTRAGCLIGAEHVNNSYECDIPIGAGICASYQTQTNSPRRARSVASQSIIAYTMSLGAENSVAYSNNSIAIPTNFTISVTTEILPVSMTKTSVDCTMYICGDSTECSNLLLQYGSFCTQLNRALTGIAVEQDKNTQEVFAQVKQIYKTPPIKDFGGFNFSQILPDPSKPSKRSFIEDLLFNKVTLADAGFIKQYGDCLGDIAARDLICAQKFNGLTVLPPLLTDEMIAQYTSALLAGTITSGWTFGAGAALQIPFAMQMAYRFNGIGVTQNVLYENQKLIANQFNSAIGKIQDSLSSTASALGKLQDVVNQNAQALNTLVKQLSSNFGAISSVLNDILSRLDPPEAEVQIDRLITGRLQSLQTYVTQQLIRAAEIRASANLAATKMSECVLGQSKRVDFCGKGYHLMSFPQSAPHGVVFLHVTYVPAQEKNFTTAPAICHDGKAHFPREGVFVSNGTHWFVTQRNFYEPQIITTDNTFVSGNCDVVIGIVNNTVYDPLQPELDSFKEELDKYFKNHTSPDVDLGDISGINASVVNIQKEIDRLNEVAKNLNESLIDLQELGKYEQYIKWPWYIWLGFIAGLIAIVMVTIMLCCMTSCCSCLKGCCSCGSCCKFDEDDSEPVLKGVKLHYT

SEQ ID NO: 376 - protein, 1273 aa, Artificial Sequence
  SARS-CoV-2/South Korea/SNU01/2020__EPI_ISL_411929 spike protein (1-1273)(K986P_V987P)
MFVFLVLLPLVSSQCVNLTTRTQLPPAYTNSFTRGVYYPDKVFRSSVLHSTQDLFLPFFSNVTWFHAIHVSGTNGTKRFDNPVLPFNDGVYFASTEKSNIIRGWIFGTTLDSKTQSLLIVNNATNVVIKVCEFQFCNDPFLGVYYHKNNKSWMESEFRVYSSANNCTFEYVSQPFLMDLEGKQGNFKNLREFVFKNIDGYFKIYSKHTPINLVRDLPQGFWALEPLVDLPIGINITRFQTLLALHRSYLTPGDSSSGWTAGAAAYYVGYLQPRTFLLKYNENGTITDAVDCALDPLSETKCTLKSFTVEKGIYQTSNFRVQPTESIVRFPNITNLCPFGEVFNATRFASVYAWNRKRISNCVADYSVLYNSASFSTFKCYGVSPTKLNDLCFTNVYADSFVIRGDEVRQIAPGQTGKIADYNYKLPDDFTGCVIAWNSNNLDSKVGGNYNYLYRLFRKSNLKPFERDISTEIYQAGSTPCNGVEGFNCYFPLQSYGFQPTNGVGYQPYRVVVLSFELLHAPATVCGPKKSTNLVKNKCVNFNFNGLTGTGVLTESNKKFLPFQQFGRDIADTTDAVRDPQTLEILDITPCSFGGVSVITPGTNTSNQVAVLYQDVNCTEVPVAIHADQLTPTWRVYSTGSNVFQTRAGCLIGAEHVNNSYECDIPIGAGICASYQTQTNSPRRARSVASQSIIAYTMSLGAENSVAYSNNSIAIPTNFTISVTTEILPVSMTKTSVDCTMYICGDSTECSNLLLQYGSFCTQLNRALTGIAVEQDKNTQEVFAQVKQIYKTPPIKDFGGFNFSQILPDPSKPSKRSFIEDLLFNKVTLADAGFIKQYGDCLGDIAARDLICAQKFNGLTVLPPLLTDEMIAQYTSALLAGTITSGWTFGAGAALQIPFAMQMAYRFNGIGVTQNVLYENQKLIANQFNSAIGKIQDSLSSTASALGKLQDVVNQNAQALNTLVKQLSSNFGAISSVLNDILSRLDPPEAEVQIDRLITGRLQSLQTYVTQQLIRAAEIRASANLAATKMSECVLGQSKRVDFCGKGYHLMSFPQSAPHGVVFLHVTYVPAQEKNFTTAPAICHDGKAHFPREGVFVSNGTHWFVTQRNFYEPQIITTDNTFVSGNCDVVIGIVNNTVYDPLQPELDSFKEELDKYFKNHTSPDVDLGDISGINASVVNIQKEIDRLNEVAKNLNESLIDLQELGKYEQYIKWPWYIWLGFIAGLIAIVMVTIMLCCMTSCCSCLKGCCSCGSCCKFDEDDSEPVLKGVKLHYT

SEQ ID NO: 377 - protein, 1273 aa, Artificial Sequence
  SARS-CoV-2/China/WF0004/2020__EPI_ISL_413694 spike protein (1-1273)(K986P_V987P)
MFVFLVLLPLVSSQCVNLTTRTQLPPAYTNSFTRGVYYPDKVFRSSVLHSTQDLFLPFFSNVTWFHAIHVSGTNGTKRFDNPVLPFNDGVYFASTEKSNIIRGWIFGTTLDSKTQSLLIVNNATNVVIKVCEFQFCNDPFLGVYYHKNNKSWTESEFRVYSSANNCTFEYVSQPFLMDLEGKQGNFKNLREFVFKNIDGYFKIYSKHTPINLVRDLPQGFSALEPLVDLPIGINITRFQTLLALHRSYLTPGDSSSGWTAGAAAYYVGYLQPRTFLLKYNENGTITDAVDCALDPLSETKCTLKSFTVEKGIYQTSNFRVQPTESIVRFPNITNLCPFGEVFNATRFASVYAWNRKRISNCVADYSVLYNSASFSTFKCYGVSPTKLNDLCFTNVYADSFVIRGDEVRQIAPGQTGKIADYNYKLPDDFTGCVIAWNSNNLDSKVGGNYNYLYRLFRKSNLKPFERDISTEIYQAGSTPCNGVEGFNCYFPLQSYGFQPTNGVGYQPYRVVVLSFELLHAPATVCGPKKSTNLVKNKCVNFNFNGLTGTGVLTESNKKFLPFQQFGRDIADTTDAVRDPQTLEILDITPCSFGGVSVITPGTNTSNQVAVLYQDVNCTEVPVAIHADQLTPTWRVYSTGSNVFQTRAGCLIGAEHVNNSYECDIPIGAGICASYQTQTNSPRRARSVASQSIIAYTMSLGAENSVAYSNNSIAIPTNFTISVTTEILPVSMTKTSVDCTMYICGDSTECSNLLLQYGSFCTQLNRALTGIAVEQDKNTQEVFAQVKQIYKTPPIKDFGGFNFSQILPDPSKPSKRSFIEDLLFNKVTLADAGFIKQYGDCLGDIAARDLICAQKFNGLTVLPPLLTDEMIAQYTSALLAGTITSGWTFGAGAALQIPFAMQMAYRFNGIGVTQNVLYENQKLIANQFNSAIGKIQDSLSSTASALGKLQDVVNQNAQALNTLVKQLSSNFGAISSVLNDILSRLDPPEAEVQIDRLITGRLQSLQTYVTQQLIRAAEIRASANLAATKMSECVLGQSKRFDFCGKGYHLMSFPQSAPHGVVFLHVTYVPAQEKNFTTAPAICHDGKAHFPREGVFVSNGTHWFVTQRNFYEPQIITTDNTFVSGNCDVVIGIVNNTVYDPLQPELDSFKEELDKYFKNHTSPDVDLGDISGINASVVNIQKEIDRLNEVAKNLNESLIDLQELGKYEQYIKWPWYIWLGFIAGLIAIVMVTIMLCCMTSCCSCLKGCCSCGSCCKFDEDDSEPVLKGVKLHYT

SEQ ID NO: 378 - protein, 1273 aa, Artificial Sequence
  SARS-CoV-2/China/WF0028/2020__EPI_ISL_413791 spike protein (1-1273)(K986P_V987P)
MFVFLVLLPLVSSQCVNLTTRTQLPPAYTNSFTRGVYYPDKVFRSSVLHSTQDLFLPFFSNVTWFHAIHVSGTNGTKRFDNPVLPFNDGVYFASTEKSNIIRGWIFGTTLDSKTQSLLIVNNATNVVIKVCEFQFCNDPFLGVYYHKNNKSWMESEFRVYSSANNCTFEYVSQPFLMDLEGKQGNFKNLREFVFKNIDGYFKIYSKHTPINLVRDLPQGFSALEPLVDLPIGINITRFQTLLALHRSYLTPGDSSSGWTAGAAAYYVGYLQPRTFLLKYNENGTITDAVDCALDPLSETKCTLKSFTVEKGIYQTSNFRVQPTESIVRFPNITNLCPFGEVFNATRFASVYAWNRKRISNCVADYSVLYNSASFSTFKCYGVSPTKLNDLCFTNVYADSFVIRGDEVRQIAPGQTGKIADYNYKLPDDFTGCVIAWNSNNLDSKVGGNYNYLYRLFRKSNLKPFERDISTEIYQAGSTPCNGVEGFNCYFPLQSYGFQPTNGVGYQPYRVVVLSFELLHAPATVCGPKKSTNLVKNKCVNFNFNGLTGTGVLTESNKKFLPFQQFGRDIADTTDAVRDPQTLEILDITPCSFGGVSVITPGTNTSNQVAVLYQDVNCTEVPVAIHADQLTPTWRVYSTGSNVFQTRAGCLIGAEHVNNSYECDIPIGAGICASYQTQTNSPRRARSVASQSIIAYTMSLGAENSVAYSNNSIAIPTNFTISVTTEILPVSMTKTSVDCTMYICGDSTECSNLLLQYGSFCTQLNRALTGIAVEQDKNTQEVFAQVKQIYKTPPIKDFGGFNFSQILPDPSKPSKRSFIEDLLFNKVTLADAGFIKQYGDCLGDIAARDLICAQKFNGLTVLPPLLTDEMIAQYTSALLAGTITSGWTFGAGAALQIPFAMQMAYRFNGIGVTQNVLYENQKLIANQFNSAIGKIQDSLSSTASALGKLQDVVNQNAQALNTLVKQLSSNFGAISSVLNDILSRLDPPEAEVQIDRLITGRLQSLQTYVTQQLIRAAEIRASANLAATKMSECVLGQSKRVDFCGKGYHLMSFPQSAPHGVVFLHVTYVPAQEKNFTTAPAICHDGKAHFPREGVFVSNGTHWFVTQRNFYEPQIITTDNTFVSGNCDVVIGIVNNTVYDPLQPELESFKEELDKYFKNHTSPDVDLGDISGINASVVNIQKEIDRLNEVAKNLNESLIDLQELGKYEQYIKWPWYIWLGFIAGLIAIVMVTIMLCCMTSCCSCLKGCCSCGSCCKFDEDDSEPVLKGVKLHYT

SEQ ID NO: 379 - protein, 1273 aa, Artificial Sequence
  SARS-CoV-2/2019-nCoV/USA-CruiseA-18/2020__MT159716.1 spike protein (1-1273)(K986P_V987P)
MFVFLVLLPLVSSQCVNLTTRTQLPPAYTNSFTRGVYYPDKVFRSSVLHSTQDLFLPFFSNVTWFHAIHVSGTNGTKRFDNPVLPFNDGVYFASTEKSNIIRGWIFGTTLDSKTQSLLIVNNATNVVIKVCEFQFCNDPFLGVYYHKNNKSWMESELRVYSSANNCTFEYVSQPFLMDLEGKQGNFKNLREFVFKNIDGYFKIYSKHTPINLVRDLPQGFSALEPLVDLPIGINITRFQTLLALHRSYLTPGDSSSGWTAGAAAYYVGYLQPRTFLLKYNENGTITDAVDCALDPLSETKCTLKSFTVEKGIYQTSNFRVQPTESIVRFPNITNLCPFGEVFNATRFASVYAWNRKRISNCVADYSVLYNSASFSTFKCYGVSPTKLNDLCFTNVYADSFVIRGDEVRQIAPGQTGKIADYNYKLPDDFTGCVIAWNSNNLDSKVGGNYNYLYRLFRKSNLKPFERDISTEIYQAGSTPCNGVEGFNCYFPLQSYGFQPTNGVGYQPYRVVVLSFELLHAPATVCGPKKSTNLVKNKCVNFNFNGLTGTGVLTESNKKFLPFQQFGRDIADTTDAVRDPQTLEILDITPCSFGGVSVITPGTNTSNQVAVLYQDVNCTEVPVAIHADQLTPTWRVYSTGSNVFQTRAGCLIGAEHVNNSYECDIPIGAGICASYQTQTNSPRRARSVASQSIIAYTMSLGAENSVAYSNNSIAIPTNFTISVTTEILPVSMTKTSVDCTMYICGDSTECSNLLLQYGSFCTQLNRALTGIAVEQDKNTQEVFAQVKQIYKTPPIKDFGGFNFSQILPDPSKPSKRSFIEDLLFNKVTLADAGFIKQYGDCLGDIAARDLICAQKFNGLTVLPPLLTDEMIAQYTSALLAGTITSGWTFGAGAALQIPFAMQMAYRFNGIGVTQNVLYENQKLIANQFNSAIGKIQDSLSSTASALGKLQDVVNQNAQALNTLVKQLSSNFGAISSVLNDILSRLDPPEAEVQIDRLITGRLQSLQTYVTQQLIRAAEIRASANLAATKMSECVLGQSKRVDFCGKGYHLMSFPQSAPHGVVFLHVTYVPAQEKNFTTAPAICHDGKAHFPREGVFVSNGTHWFVTQRNFYEPQIITTDNTFVSGNCDVVIGIVNNTVYDPLQPELDSFKEELDKYFKNHTSPDVDLGDISGINASVVNIQKEIDRLNEVAKNLNESLIDLQELGKYEQYIKWPWYIWLGFIAGLIAIVMVTIMLCCMTSCCSCLKGCCSCGSCCKFDEDDSEPVLKGVKLHYT

SEQ ID NO: 380 - protein, 1273 aa, Artificial Sequence
  SARS-CoV-2/SARS-CoV-2/Yunnan-01/human/2020/CHN__MT049951.1 spike protein (1-1273)(K986P_V987P)
MFVFLVLLPLVSSQCVNLTTRTQLPPANTNSFTRGVYYPDKVFRSSVLHSTQDLFLPFFSNVTWFHAIHVSGTNGTKRFDNPVLPFNDGVYFASTEKSNIIRGWIFGTTLDSKTQSLLIVNNATNVVIKVCEFQFCNDPFLGVYYHKNNKSWMESEFRVYSSANNCTFEYVSQPFLMDLEGKQGNFKNLREFVFKNIDGYFKIYSKHTPINLVRDLPQGFSALEPLVDLPIGINITRFQTLLALHRSYLTPGDSSSGWTAGAAAYYVGYLQPRTFLLKYNENGTITDAVDCALDPLSETKCTLKSFTVEKGIYQTSNFRVQPTESIVRFPNITNLCPFGEVFNATRFASVYAWNRKRISNCVADYSVLYNSASFSTFKCYGVSPTKLNDLCFTNVYADSFVIRGDEVRQIAPGQTGKIADYNYKLPDDFTGCVIAWNSNNLDSKVGGNYNYLYRLFRKSNLKPFERDISTEIYQAGSTPCNGVEGFNCYFPLQSYGFQPTNGVGYQPYRVVVLSFELLHAPATVCGPKKSTNLVKNKCVNFNFNGLTGTGVLTESNKKFLPFQQFGRDIADTTDAVRDPQTLEILDITPCSFGGVSVITPGTNTSNQVAVLYQDVNCTEVPVAIHADQLTPTWRVYSTGSNVFQTRAGCLIGAEHVNNSYECDIPIGAGICASYQTQTNSPRRARSVASQSIIAYTMSLGAENSVAYSNNSIAIPTNFTISVTTEILPVSMTKTSVDCTMYICGDSTECSNLLLQYGSFCTQLNRALTGIAVEQDKNTQEVFAQVKQIYKTPPIKDFGGFNFSQILPDPSKPSKRSFIEDLLFNKVTLADAGFIKQYGDCLGDIAARDLICAQKFNGLTVLPPLLTDEMIAQYTSALLAGTITSGWTFGAGAALQIPFAMQMAYRFNGIGVTQNVLYENQKLIANQFNSAIGKIQDSLSSTASALGKLQDVVNQNAQALNTLVKQLSSNFGAISSVLNDILSRLDPPEAEVQIDRLITGRLQSLQTYVTQQLIRAAEIRASANLAATKMSECVLGQSKRVDFCGKGYHLMSFPQSAPHGVVFLHVTYVPAQEKNFTTAPAICHDGKAHFPREGVFVSNGTHWFVTQRNFYEPQIITTDNTFVSGNCDVVIGIVNNTVYDPLQPELDSFKEELDKYFKNHTSPDVDLGDISGINASVVNIQKEIDRLNEVAKNLNESLIDLQELGKYEQYIKWPWYIWLGFIAGLIAIVMVTIMLCCMTSCCSCLKGCCSCGSCCKFDEDDSEPVLKGVKLHYT

SEQ ID NO: 381 - protein, 1273 aa, Artificial Sequence
  SARS-CoV-2/USA/WA-UW292/2020__EPI_ISL_418077 spike protein (1-1273)(K986P_V987P)
MFVFLVLLPLVSSQCVNLTTRTQLPPAYTNSFTRGVYYPDKVFRSSVLHSTQDLFLPFFSNVTWFHAIHVSGTNGTKRFDNPVLPFNDGVYFASTEKSNIIRGWIFGTTLDSKTQSLLIVNNATNVVIKVCEFQFCNDPFLGVYYHKNNKSWMESEFRVYSSANNCTFEYVSQPFLMDLEGKQGNFKNLREFVFKNIDGYFKIYSKHTPINLVRDLPQGFSALEPLVDLPIGINITRFQTLLALHRSYLTPGDSSSGWTAGAAAYYVGYLQPRTFLLKYNENGTITDAVDCALDPLSETKCTLKSFTVEKGIYQTSNFRVQPTESIVRFPNITNLCPFGEVFNATRFASVYAWNRKRISNCVADYSVLYNSASFSTFKCYGVSPTKLNDLCFTNVYADSFVIRGDEVRQIAPGQTGKIADYNYKLPDDFTGCVIAWNSNNLDSKVGGNYNYLYRLFRKSNLKPFERDISTEIYQASSTPCNGVEGFNCYFPLQSYGFQPTNGVGYQPYRVVVLSFELLHAPATVCGPKKSTNLVKNKCVNFNFNGLTGTGVLTESNKKFLPFQQFGRDIADTTDAVRDPQTLEILDITPCSFGGVSVITPGTNTSNQVAVLYQDVNCTEVPVAIHADQLTPTWRVYSTGSNVFQTRAGCLIGAEHVNNSYECDIPIGAGICASYQTQTNSPRRARSVASQSIIAYTMSLGAENSVAYSNNSIAIPTNFTISVTTEILPVSMTKTSVDCTMYICGDSTECSNLLLQYGSFCTQLNRALTGIAVEQDKNTQEVFAQVKQIYKTPPIKDFGGFNFSQILPDPSKPSKRSFIEDLLFNKVTLADAGFIKQYGDCLGDIAARDLICAQKFNGLTVLPPLLTDEMIAQYTSALLAGTITSGWTFGAGAALQIPFAMQMAYRFNGIGVTQNVLYENQKLIANQFNSAIGKIQDSLSSTASALGKLQDVVNQNAQALNTLVKQLSSNFGAISSVLNDILSRLDPPEAEVQIDRLITGRLQSLQTYVTQQLIRAAEIRASANLAATKMSECVLGQSKRVDFCGKGYHLMSFPQSAPHGVVFLHVTYVPAQEKNFTTAPAICHDGKAHFPREGVFVSNGTHWFVTQRNFYEPQIITTDNTFVSGNCDVVIGIVNNTVYDPLQPELDSFKEELDKYFKNHTSPDVDLGDISGINASVVNIQKEIDRLNEVAKNLNESLIDLQELGKYEQYIKWPWYIWLGFIAGLIAIVMVTIMLCCMTSCCSCLKGCCSCGSCCKFDEDDSEPVLKGVKLHYT

SEQ ID NO: 382 - protein, 1273 aa, Artificial Sequence
  SARS-CoV-2/Iceland/192/2020__EPI_ISL_417819 spike protein (1-1273)(K986P_V987P)
MFVFFVLLPLVSSQCVNLTTRTQLPPAYTNSFTRGVYYPDKVFRSSVLHSTQDLFLPFFSNVTWFHAIHVSGTNGTKRFDNPVLPFNDGVYFASTEKSNIIRGWIFGTTLDSKTQSLLIVNNATNVVIKVCEFQFCNDPFLGVYYHKNNKSWMESEFRVYSSANNCTFEYVSQPFLMDLEGKQGNFKNLREFVFKNIDGYFKIYSKHTPINLVRDLPQGFSALEPLVDLPIGINITRFQTLLALHRSYLTPGDSSSGWTAGAAAYYVGYLQPRTFLLKYNENGTITDAVDCALDPLSETKCTLKSFTVEKGIYQTSNFRVQPTESIVRFPNITNLCPFGEVFNATRFASVYAWNRKRISNCVADYSVLYNSASFSTFKCYGVSPTKLNDLCFTNVYADSFVIRGDEVRQIAPGQTGKIADYNYKLPDDFTGCVIAWNSNNLDSKVGGNYNYLYRLFRKSNLKPFERDISTEIYQAGSTPCNGVEGFNCYFPLQSYGFQPTNGVGYQPYRVVVLSFELLHAPATVCGPKKSTNLVKNKCVNFNFNGLTGTGVLTESNKKFLPFQQFGRDIADTTDAVRDPQTLEILDITPCSFGGVSVITPGTNTSNQVAVLYQGVNCTEVPVAIHADQLTPTWRVYSTGSNVFQTRAGCLIGAEHVNNSYECDIPIGAGICASYQTQTNSPRRARSVASQSIIAYTMSLGAENSVAYSNNSIAIPTNFTISVTTEILPVSMTKTSVDCTMYICGDSTECSNLLLQYGSFCTQLNRALTGIAVEQDKNTQEVFAQVKQIYKTPPIKDFGGFNFSQILPDPSKPSKRSFIEDLLFNKVTLADAGFIKQYGDCLGDIAARDLICAQKFNGLTVLPPLLTDEMIAQYTSALLAGTITSGWTFGAGAALQIPFAMQMAYRFNGIGVTQNVLYENQKLIANQFNSAIGKIQDSLSSTASALGKLQDVVNQNAQALNTLVKQLSSNFGAISSVLNDILSRLDPPEAEVQIDRLITGRLQSLQTYVTQQLIRAAEIRASANLAATKMSECVLGQSKRVDFCGKGYHLMSFPQSAPHGVVFLHVTYVPAQEKNFTTAPAICHDGKAHFPREGVFVSNGTHWFVTQRNFYEPQIITTDNTFVSGNCDVVIGIVNNTVYDPLQPELDSFKEELDKYFKNHTSPDVDLGDISGINASVVNIQKEIDRLNEVAKNLNESLIDLQELGKYEQYIKWPWYIWLGFIAGLIAIVMVTIMLCCMTSCCSCLKGCCSCGSCCKFDEDDSEPVLKGVKLHYT

SEQ ID NO: 383 - protein, 1273 aa, Artificial Sequence
  SARS-CoV-2/Belgium/ULG-6939/2020__EPI_ISL_417020 spike protein (1-1273)(K986P_V987P)
MFVFLVLLPLVSSQCVNLTTRTQLPPAYTNSFTRGVYYPDKVFRSSVLHSTQDLFLPFFSNVTWFHAIHVSGTNGTKRFDNPVLPFNDGVYFASTEKSNIIRGWIFGTTLDSKTQSLLIVNNATNVVIKVCEFQFCNDPFLGVYYHKNNKSWMESEFRVYSSANNCTFEYVSQPFLMDLEGKQGNFKNLREFVFKNIDGYFKIYSKHTPINLVRDLPQGFSALEPLVDLPIGINITRFQTLLALHRSYLTPGDSSSGWTAGAAAYYVGYLQPRTFLLKYNENGTITDAVDCALDPLSETKCTLKSFTVEKGIYQTSNFRVQPTESIVRFPNITNLCPFGEVFNATRFASVYAWNRKRISNCVADYSVLYNSASFSTFKCYGVSPTKLNDLCFTNVYADSFVIRGDEVRQIAPGQTGKIADYNYKLPDDFTGCVIAWNSNNLDSKVGGNYNYLYRLFRKSNLKPFERDISTEIYQAGSTPCNGVEGFNCYFPLQSYGFQPTNGVGYQPYRVVVLSFELLHAPATVCGPKKSTNLVKNKCVNFNFNGLTGTGVLTESNKKFLPFQQFGRDIADTTDAVRDPQTLEILDITPCSFGGVSVITPGTNTSNQVAVLYQGVNCTEVPVAIHADQLTPTWRVYSTGSNVFQTRAGCLIGAEHVNNSYECDIPIGAGICASYQTQTNSPRRARSVASQSIIAYTMSLGAENSVVYSNNSIAIPTNFTISVTTEILPVSMTKTSVDCTMYICGDSTECSNLLLQYGSFCTQLNRALTGIAVEQDKNTQEVFAQVKQIYKTPPIKDFGGFNFSQILPDPSKPSKRSFIEDLLFNKVTLADAGFIKQYGDCLGDIAARDLICAQKFNGLTVLPPLLTDEMIAQYTSALLAGTITSGWTFGAGAALQIPFAMQMAYRFNGIGVTQNVLYENQKLIANQFNSAIGKIQDSLSSTASALGKLQDVVNQNAQALNTLVKQLSSNFGAISSVLNDILSRLDPPEAEVQIDRLITGRLQSLQTYVTQQLIRAAEIRASANLAATKMSECVLGQSKRVDFCGKGYHLMSFPQSAPHGVVFLHVTYVPAQEKNFTTAPAICHDGKAHFPREGVFVSNGTHWFVTQRNFYEPQIITTDNTFVSGNCDVVIGIVNNTVYDPLQPELDSFKEELDKYFKNHTSPDVDLGDISGINASVVNIQKEIDRLNEVAKNLNESLIDLQELGKYEQYIKWPWYIWLGFIAGLIAIVMVTIMLCCMTSCCSCLKGCCSCGSCCKFDEDDSEPVLKGVKLHYT

SEQ ID NO: 384 - protein, 1273 aa, Artificial Sequence
  SARS-CoV-2/France/HF2496/2020__EPI_ISL_418231 spike protein (1-1273)(K986P_V987P)
MFVFLVLLPLVSSQCVNLTTRTQLPPAYTNSFTRGVYYPDKVFRSSVLHSTQDLFLPFFSNVTWFHAIHVSGTNGTKRFDNPVLPFNDGVYFASTEKSNIIRGWIFGTTLDSKTQSLLIVNNATNVVIKVCEFQFCNDPFLGVYYHKNNKSWMESEFRVYSSANNCTFEYVSQPFLMDLEGKQGNFKNLREFVFKNIDGYFKIYSKHTPINLVRDLPQGFSALEPLVDLPIGINITRFQTLLALHRSYLTPGDSSSGWTAGAAAYYVGYLQPRTFLLKYNENGTITDAVDCALDPLSETKCTLKSFTVEKGIYQTSNFRVQPTESIVRFPNITNLCPFGEVFNATRFASVYAWNRKRISNCVADYSVLYNSASFSTFKCYGVSPTKLNDLCFTNVYADSFVIRGDEVRQIAPGQTGKIADYNYKLPDDFTGCVIAWNSNNLDSKVGGNYNYLYRLFRKSNLKPFERDISTEIYQAGSTPCNGVEGFNCYFPLQSYGFQPTNGVGYQPYRVVVLSFELLHAPATVCGPKKSTNLVKNKCVNFNFNGLTGTGVLTESNKKFLPFQQFGRDIADTTDAVRDPQTLEILDITPCSFGGVSVITPGTNTSNQVAVLYQGVNCTEVPVAIHADQLTPTWRVYSTGSNVFQTRAGCLIGAEHVNNSYECDIPIGAGICASYQTQTNSPRRARSVASQSIIAYTMSLGAENSVAYSNNSIAIPTNFTISVTTEILPVSMTKTSVDCTMYICGDSTECSNLLLQYGSFCTQLNRALTGIAVEQDKNTQEVFAQVKQIYKTPPIKDFGGFNFSQILPDPSKPSKRSFIEDLLFNKVTLADAGFIKQYGDCLGDIVARDLICAQKFNGLTVLPPLLTDEMIAQYTSALLAGTITSGWTFGAGAALQIPFAMQMAYRFNGIGVTQNVLYENQKLIANQFNSAIGKIQDSLSSTASALGKLQDVVNQNAQALNTLVKQLSSNFGAISSVLNDILSRLDPPEAEVQIDRLITGRLQSLQTYVTQQLIRAAEIRASANLAATKMSECVLGQSKRVDFCGKGYHLMSFPQSAPHGVVFLHVTYVPAQEKNFTTAPAICHDGKAHFPREGVFVSNGTHWFVTQRNFYEPQIITTDNTFVSGNCDVVIGIVNNTVYDPLQPELDSFKEELDKYFKNHTSPDVDLGDISGINASVVNIQKEIDRLNEVAKNLNESLIDLQELGKYEQYIKWPWYIWLGFIAGLIAIVMVTIMLCCMTSCCSCLKGCCSCGSCCKFDEDDSEPVLKGVKLHYT

SEQ ID NO: 385 - protein, 1273 aa, Artificial Sequence
  SARS-CoV-2/USA/WA-UW291/2020__EPI_ISL_418076 spike protein (1-1273)(K986P_V987P)
MFVFLVLLPLVSSQCVNLTTRTQLPPAYTNSFTRGVYYPDKVFRSSVLHSTQDLFLPFFSNVTWFHAIHVSGTNGTKRFDNPVLPFNDGVYFASTEKSNIIRGWIFGTTLDSKTQSLLIVNNATNVVIKVCEFQFCNDPFLGVYYHKNNKSWMESEFRVYSSANNCTFEYVSQPFLMDLEGKQGNFKNLREFVFKNIDGYFKIYSKHTPINLVRDLPQGFSALEPLVDLPIGINITRFQTLLALHRSYLTPGDSSSGWTAGAAAYYVGYLQPRTFLLKYNENGTITDAVDCALDPLSETKCTLKSFTVEKGIYQTSNFRVQPTESIVRFPNITNLCPFGEVFNATRFASVYAWNRKRISNCVADYSVLYNSASFSTFKCYGVSPTKLNDLCFTNVYADSFVIRGDEVRQIAPGQTGKIADYNYKLPDDFTGCVIAWNSNNLDSKVGGNYNYLYRLFRKSNLKPFERDISTEIYQAGSTPCNGVEGFNCYFPLQSYGFQPTNGVGYQPYRVVVLSFELLHAPATVCGPKKSTNLVKNKCVNFNFNGLTGTGVLTESNKKFLPFQQFGRDIADTTDAVRDPQTLEILDITPCSFGGVSVITPGTNTSNQVAVLYQGVNCTEVPVAIHADQLTPTWRVYSTGSNVFQTRAGCLIGAEHVNNSYECDIPIGAGICASYQTQTNSPRRARSVASQSIIAYTMSLGAENSVAYSNNSIAIPTNFTISVTTEILPVSMTKTSVDCTMYICGDSTECSNLLLQYGSFCTQLNRALTGIAVEQDKNTQEVFAQVKQIYKTPPIKDFGGFNFSQILPDPSKPSKRSFIEDLLFNKVTLADAGFIKQYGDCLGDIAARDLICAQKFNGLTVLPPLLTDEMIAQYTSALLAGTITSGWTFGAGAALQIPFAMQMAYRFNGIGVTQNVLYENQKLIANQFNSAIGKIQYSLSSTASALGKLQDVVNQNAQALNTLVKQLSSNFGAISSVLNDILSRLDPPEAEVQIDRLITGRLQSLQTYVTQQLIRAAEIRASANLAATKMSECVLGQSKRVDFCGKGYHLMSFPQSAPHGVVFLHVTYVPAQEKNFTTAPAICHDGKAHFPREGVFVSNGTHWFVTQRNFYEPQIITTDNTFVSGNCDVVIGIVNNTVYDPLQPELDSFKEELDKYFKNHTSPDVDLGDISGINASVVNIQKEIDRLNEVAKNLNESLIDLQELGKYEQYIKWPWYIWLGFIAGLIAIVMVTIMLCCMTSCCSCLKGCCSCGSCCKFDEDDSEPVLKGVKLHYT

SEQ ID NO: 386 - protein, 1273 aa, Artificial Sequence
  SARS-CoV-2/Portugal/PT0034/2020__EPI_ISL_418019 spike protein (1-1273)(K986P_V987P)
MFVFLVLLPLVSSQCVNLTTRTQLPPAYTNSFTRGVYYPDKVFRSSVLHSTQDLFLPFFSNVTWFHAIHVSGTNGTKRFDNPVLPFNDGVYFASTEKSNIIRGWIFGTTLDSKTQSLLIVNNATNVVIKVCEFQFCNDPFLGVYYHKNNKSWMESEFRVYSSANNCTFEYVSQPFLMDLEGKQGNFKNLREFVFKNIDGYFKIYSKHTPINLVRDLPQGFSALEPLVDLPIGINITRFQTLLALHRSYLTPGDSSSGWTAGAAAYYVGYLQPRTFLLKYNENGTITDAVDCALDPLSETKCTLKSFTVEKGIYQTSNFRVQPTESIVRFPNITNLCPFGEVFNATRFASVYAWNRKRISNCVADYSVLYNSASFSTFKCYGVSPTKLNDLCFTNVYADSFVIRGDEVRQIAPGQTGKIADYNYKLPDDFTGCVIAWNSNNLDSKVGGNYNYLYRLFRKSNLKPFERDISTEIYQAGSTPCNGVEGFNCYFPLQSYGFQPTNGVGYQPYRVVVLSFELLHAPATVCGPKKSTNLVKNKCVNFNFNGLTGTGVLTESNKKFLPFQQFGRDIADTTDAVRDPQTLEILDITPCSFGGVSVITPGTNTSNQVAVLYQGVNCTEVPVAIHADQLTPTWRVYSTGSNVFQTRAGCLIGAEHVNNSYECDIPIGAGICASYQTQTNSPRRARSVASQSIIAYTMSLGAENSVAYSNNSIAIPTNFTISVTTEILPVSMTKTSVDCTMYICGDSTECSNLLLQYGSFCTQLNRALTGIAVEQDKNTQEVFAQVKQIYKTPPIKDFGGFNFSQILPDPSKPSKRSFIEDLLFNKVTLADAGFIKQYGDCLGDIAARDLICAQKFNGLTVLPPLLTDEMIAQYTSALLAGTITSGWTFGAGAALQIPFAMQMAYRFNGIGVTQNVLYENQKLIANQFNSAIGKIQDSLSSTASALGKLQDVVNQNAQALNTLVKQLSSNFGAISSVLNDILSRLDPPEAEVQIDRLITGRLQSLQTYVTQQLIRAAEIRASANLAATKMSECVLGQSKRVDFCGKGYHLMSFPQSAPHGVVFLHVTYVPAQEKNFTTAPAICHDGKAHFPREGVFVSNGTHWFVTQRNFYEPQIITTDNTFVSGNCDVVIGIVNNTVYDPLQPELDSFKEELDKYFKNHTSPDVDLGDISGINASVVNIQKEIDRLNEVAKNLNESLIDLQELGKYEQYIKWPWYIWLGFIAGLIAIVMVTIMLCCITSCCSCLKGCCSCGSCCKFDEDDSEPVLKGVKLHYT

SEQ ID NO: 387 - protein, 1273 aa, Artificial Sequence
  SARS-CoV-2/Iceland/202/2020__EPI_ISL_417750 spike protein (1-1273)(K986P_V987P)
MFVFLVLLPLVSSQCVNLTTRTQLPPAYTNSFTRGVYYPDKVFRSSVLHSTQDLFLPFFSNVTWFHAIHVSGTNGTKRFDNPVLPFNDGVYFASTEKSNIIRGWIFGTTLDSKTQSLLIVNNATNVVIKVCEFQFCNDPFLGVYYHKNNKSWMESEFRVYSSANNCTFEYVSQPFLMDLEGKQGNFKNLREFVFKNIDGYFKIYSKHTPINLVRDLPQGFSALEPLVDLPIGINITRFQTLLALHRSYLTPGDSSSGWTAGAAAYYVGYLQPRTFLLKYNENGTITDAVDCALDPLSETKCTLKSFTVEKGIYQTSNFRVQPTESIVRFPNITNLCPFGEVFNATRFASVYAWNRKRISNCVADYSVLYNSASFSTFKCYGVSPTKLNDLCFTNVYADSFVIRGDEVRQIAPGQTGKIADYNYKLPDDFTGCVIAWNSNNLDSKVGGNYNYLYRLFRKSNLKPFERDISTEIYQAGSTPCNGVEGFNCYFPLQSYGFQPTNGVGYQPYRVVVLSFELLHAPATVCGPKKSTNLVKNKCVNFNFNGLTGTGVLTESNKKFLPFQQFGRDIADTTDAVRDPQTLEILDITPCSFGGVSVITPGTNTSNQVAVLYQDVNCTEVPVAIHADQLTPTWRVYSTGSNVFQTRAGCLIGAEHVNNSYECDIPIGAGICASYQTQTNSPRRARSVASQSIIAYTMSLGAENSVAYSNNSIAIPTNFTISVTTEILPVSMTKTSVDCTMYICGDSTECSNLLLQYGSFCTQLNRALTGIAVEQDKNTQEVFAQVKQIYKTPPIKDFGGFNFSQILPDPSKPSKRSFIEDLLFNKVTLADAGFIKQYGDCLGDIAARDLICAQKFNGLTVLPPLLTDEMIAQYTSALLAGTITSGWTFGAGAALQIPFAMQMAYRFNGIGVTQNVLYENQKLIANQFNSAIGKIQDSLSSTASALGKLQDVVNQNAQALNTLVKQLSSNFGAISSVLNDILSRLDPPEAEVQIDRLITGRLQSLQTYVTQQLIRAAEIRASANLAATKMSECVLGQSKRVDFCGKGYHLMSFPQSAPHGVVFLHVTYVPAQEKNFTTAPAICHDGKAHFPREGVFVSNGTHWFVTQRNFYEPQIITTDNTFVSGNCDVVIGIVNNTVYDPLQPELDSFKEELDKYFKNHTSPDVDLGDIPGINASVVNIQKEIDRLNEVAKNLNESLIDLQELGKYEQYIKWPWYIWLGFIAGLIAIVMVTIMLCCMTSCCSCLKGCCSCGSCCKFDEDDSEPVLKGVKLHYT

SEQ ID NO: 388 - protein, 1273 aa, Artificial Sequence
  SARS-CoV-2/USA/WA-UW261/2020__EPI_ISL_418046 spike protein (1-1273)(K986P_V987P)
MFVFLVLLPLVSSQCVNLTTRTQLPPAYTNSFTRGVYYPDKVFRSSVLHSTQDLFLPFFSNVTWFHAIHVSGTNGTKRFDNPVLPFNDGVYFASTEKSNIIRGWIFGTTLDSKTQSLLIVNNATNVVIKVCEFQFCNDPFLGVYYHKNNKSWMESEFRVYSSANNCTFEYVSQPFLMDLEGKQGNFKNLREFVFKNIDGYFKIYSKHTPINLVRDLPQGFSALEPLVDLPIGINITRFQTLLALHRSYLTPGDSSSGWTAGAAAYYVGYLQPRTFLLKYNENGTITDAVDCALDPLSETKCTLKSFTVEKGIYQTSNFRVQPTESIVRFPNITNLCPFGEVFNATRFTSVYAWNRKRISNCVADYSVLYNSASFSTFKCYGVSPTKLNDLCFTNVYADSFVIRGDEVRQIAPGQTGKIADYNYKLPDDFTGCVIAWNSNNLDSKVGGNYNYLYRLFRKSNLKPFERDISTEIYQAGSTPCNGVEGFNCYFPLQSYGFQPTNGVGYQPYRVVVLSFELLHAPATVCGPKKSTNLVKNKCVNFNFNGLTGTGVLTESNKKFLPFQQFGRDIADTTDAVRDPQTLEILDITPCSFGGVSVITPGTNTSNQVAVLYQDVNCTEVPVAIHADQLTPTWRVYSTGSNVFQTRAGCLIGAEHVNNSYECDIPIGAGICASYQTQTNSPRRARSVASQSIIAYTMSLGAENSVAYSNNSIAIPTNFTISVTTEILPVSMTKTSVDCTMYICGDSTECSNLLLQYGSFCTQLNRALTGIAVEQDKNTQEVFAQVKQIYKTPPIKDFGGFNFSQILPDPSKPSKRSFIEDLLFNKVTLADAGFIKQYGDCLGDIAARDLICAQKFNGLTVLPPLLTDEMIAQYTSALLAGTITSGWTFGAGAALQIPFAMQMAYRFNGIGVTQNVLYENQKLIANQFNSAIGKIQDSLSSTASALGKLQDVVNQNAQALNTLVKQLSSNFGAISSVLNDILSRLDPPEAEVQIDRLITGRLQSLQTYVTQQLIRAAEIRASANLAATKMSECVLGQSKRVDFCGKGYHLMSFPQSAPHGVVFLHVTYVPAQEKNFTTAPAICHDGKAHFPREGVFVSNGTHWFVTQRNFYEPQIITTDNTFVSGNCDVVIGIVNNTVYDPLQPELDSFKEELDKYFKNHTSPDVDLGDISGINASVVNIQKEIDRLNEVAKNLNESLIDLQELGKYEQYIKWPWYIWLGFIAGLIAIVMVTIMLCCMTSCCSCLKGCCSCGSCCKFDEDDSEPVLKGVKLHYT

SEQ ID NO: 389 - protein, 1273 aa, Artificial Sequence
  SARS-CoV-2/Portugal/PT0035/2020__EPI_ISL_418020 spike protein (1-1273)(K986P_V987P)
MFVFLVLLPLVSSQCVNLTTRTQLPPAYTNSFTRGVYYPDKVFRSSVLHSTQDLFLPFFSNVTWFHAIHVSGTNGTKRFDNPVLPFNDGVYFASTEKSNIIRGWIFGTTLDSKTQSLLIVNNATNVVIKVCEFQFCNDPFLGVYYHKNNKSWMESEFRVYSSANNCTFEYVSQPFLMDLEGKQGNFKNLREFVFKNIDGYFKIYSKHTPINLVRDLPQGFSALEPLVDLPIGINITRFQTLLALHRSYLTPGDSSSGWTAGAAAYYVGYLQPRTFLLKYNENGTITDAVDCALDPLSETKCTLKSFTVEKGIYQTSNFRVQPTESIVRFPNITNLCPFGEVFNATRFASVYAWNRKRISNCVADYSVLYNSASFSTFKCYGVSPTKLNDLCFTNVYADSFVIRGDEVRQIAPGQTGKIADYNYKLPDDFTGCVIAWNSNNLDSKVGGNYNYLYRLFRKSNLKPFERDISTEIYQAGSTPCNGVEGFNCYFPLQSYGFQPTNGVGYQPYRVVVLSFELLHAPATVCGPKKSTNLVKNKCVNFNFNGLTGTGVLTESNKKFLPFQQFGRDIADTTDAVRDPQTLEILDITPCSFGGVSVITPGTNTSNQVAVLYQDVNCTEVPVAIHADQLTPTWRVYSTGSNVFQTRAGCLIGAEHVNNSYECDIPIGAGICASYQTQTNSPRRARSVASQSIIAYTMSLGAENSVAYSNNSIAIPTNFTISVTTEILPVSMTKTSVDCTMYICGDSTECSNLLLQYGSFCTQLNRALTGIAVEQDKNTQEVFAQVKQIYKTPPIKDFGGFNFSQILPDPSKPSKRSFIEDLLFNKVTLADAGFIKQYGDCLGDISARDLICAQKFNGLTVLPPLLTDEMIAQYTSALLAGTITSGWTFGAGAALQIPFAMQMAYRFNGIGVTQNVLYENQKLIANQFNSAIGKIQDSLSSTASALGKLQDVVNQNAQALNTLVKQLSSNFGAISSVLNDILSRLDPPEAEVQIDRLITGRLQSLQTYVTQQLIRAAEIRASANLAATKMSECVLGQSKRVDFCGKGYHLMSFPQSAPHGVVFLHVTYVPAQEKNFTTAPAICHDGKAHFPREGVFVSNGTHWFVTQRNFYEPQIITTDNTFVSGNCDVVIGIVNNTVYDPLQPELDSFKEELDKYFKNHTSPDVDLGDISGINASVVNIQKEIDRLNEVAKNLNESLIDLQELGKYEQYIKWPWYIWLGFIAGLIAIVMVTIMLCCMTSCCSCLKGCCSCGSCCKFDEDDSEPVLKGVKLHYT

SEQ ID NO: 390 - protein, 1273 aa, Artificial Sequence
  SARS-CoV-2/USA/NY-NYUMC7/2020__EPI_ISL_418192 spike protein (1-1273)(K986P_V987P)
MFVFLVLLPLVSSQCVNLTTRTQLPPAYTNSFTRGVYYPDKVFRSSVLHSTQDLFLPFFSNVTWFHAIHVSGTNGTKRFDNPVLPFNDGVYFASTEKSNIIRGWIFGTTLDSKTQSLLIVNNATNVVIKVCEFQFCNDPFLGVYHHKNNKSWMESEFRVYSSANNCTFEYVSQPFLMDLEGKQGNFKNLREFVFKNIDGYFKIYSKHTPINLVRDLPQGFSALEPLVDLPIGINITRFQTLLALHRSYLTPGDSSSGWTAGAAAYYVGYLQPRTFLLKYNENGTITDAVDCALDPLSETKCTLKSFTVEKGIYQTSNFRVQPTESIVRFPNITNLCPFGEVFNATRFASVYAWNRKRISNCVADYSVLYNSASFSTFKCYGVSPTKLNDLCFTNVYADSFVIRGDEVRQIAPGQTGKIADYNYKLPDDFTGCVIAWNSNNLDSKVGGNYNYLYRLFRKSNLKPFERDISTEIYQAGSTPCNGVEGFNCYFPLQSYGFQPTNGVGYQPYRVVVLSFELLHAPATVCGPKKSTNLVKNKCVNFNFNGLTGTGVLTESNKKFLPFQQFGRDIADTTDAVRDPQTLEILDITPCSFGGVSVITPGTNTSNQVAVLYQGVNCTEVPVAIHADQLTPTWRVYSTGSNVFQTRAGCLIGAEHVNNSYECDIPIGAGICASYQTQTNSPRRARSVASQSIIAYTMSLGAENSVAYSNNSIAIPTNFTISVTTEILPVSMTKTSVDCTMYICGDSTECSNLLLQYGSFCTQLNRALTGIAVEQDKNTQEVFAQVKQIYKTPPIKDFGGFNFSQILPDPSKPSKRSFIEDLLFNKVTLADAGFIKQYGDCLGDIAARDLICAQKFNGLTVLPPLLTDEMIAQYTSALLAGTITSGWTFGAGAALQIPFAMQMAYRFNGIGVTQNVLYENQKLIANQFNSAIGKIQDSLSSTASALGKLQDVVNQNAQALNTLVKQLSSNFGAISSVLNDILSRLDPPEAEVQIDRLITGRLQSLQTYVTQQLIRAAEIRASANLAATKMSECVLGQSKRVDFCGKGYHLMSFPQSAPHGVVFLHVTYVPAQEKNFTTAPAICHDGKAHFPREGVFVSNGTHWFVTQRNFYEPQIITTDNTFVSGNCDVVIGIVNNTVYDPLQPELDSFKEELDKYFKNHTSPDVDLGDISGINASVVNIQKEIDRLNEVAKNLNESLIDLQELGKYEQYIKWPWYIWLGFIAGLIAIVMVTIMLCCMTSCCSCLKGCCSCGSCCKFDEDDSEPVLKGVKLHYT

SEQ ID NO: 391 - protein, 1273 aa, Artificial Sequence
  SARS-CoV-2/Iceland/189/2020__EPI_ISL_417709 spike protein (1-1273)(K986P_V987P)
MFVFLVLLPLVSSQCVNLTTRTQLPPAYTNSFTRGVYYPDKVFRSSVLHSTQDLFLPFFSNVTWFHAIHVSGTNGTKRFDNPVLPFNDGVYFASTEKSNIIRGWIFGTTLDSKTQSLLIVNNATNVVIKVCEFQFCNDPFLGVYYHKNNKSWMESEFRVYSSANNCTFEYVSQPFLMDLEGKQGNFKNLREFVFKNIDGYFKIYSKHTPINLVRDLPQGFSALEPLVDLPIGINITRFQTLLALHRSYLTPGDSSSGWTAGAAAYYVGYLQPRTFLLKYNENGTITDAVDCALDPLSETKCTLKSFTVEKGIYQTSNFRVQPTESIVRFPNITNLCPFGEVFNATRFASVYAWNRKRISNCVADYSVLYNSASFSTFKCYGVSPTKLNDLCFTNVYADSFVIRGDEVRQIAPGQTGKIADYNYKLPDDFTGCVIAWNSNNLDSKVGGNYNYLYRLFRKSNLKPFERDISTEIYQAGSTPCNGVEGFNCYFPLQSYGFQPTNGVGYQPYRVVVLSFELLHAPATVCGPKKSTNLVKNKCVNFNFNGLTGTGVLTESNKKFLPFQQFGRDIADTTDAVRDPQTLEILDITPCSFGGVSVITPGTNTSNQVAVLYQGVNCTEVPVAIHADQLTPTWRVYSTGSNVFQTRAGCLIGAEHVNNSYECDIPIGAGICASYQTQTNSPRRARSVASQSIIAYTMSLGAENSVAYSNNSIAIPTNFTISVTTEILPVSMTKTSVDCTMYICGDSTECSNLLLQYGSFCTQLNRALTGIAVEQDKNTQEVFAQVKQIYKTPPIKDFGGFNFSQILPDPSKPSKRSFIEDLLFNKVTLADAGFTKQYGDCLGDIAARDLICAQKFNGLTVLPPLLTDEMIAQYTSALLAGTITSGWTFGAGAALQIPFAMQMAYRFNGIGVTQNVLYENQKLIANQFNSAIGKIQDSLSSTASALGKLQDVVNQNAQALNTLVKQLSSNFGAISSVLNDILSRLDPPEAEVQIDRLITGRLQSLQTYVTQQLIRAAEIRASANLAATKMSECVLGQSKRVDFCGKGYHLMSFPQSAPHGVVFLHVTYVPAQEKNFTTAPAICHDGKAHFPREGVFVSNGTHWFVTQRNFYEPQIITTDNTFVSGNCDVVIGIVNNTVYDPLQPELDSFKEELDKYFKNHTSPDVDLGDISGINASVVNIQKEIDRLNEVAKNLNESLIDLQELGKYEQYIKWPWYIWLGFIAGLIAIVMVTIMLCCMTSCCSCLKGCCSCGSCCKFDEDDSEPVLKGVKLHYT

SEQ ID NO: 392 - protein, 1273 aa, Artificial Sequence
  SARS-CoV-2/Australia/NSW56/2020__EPI_ISL_417408 spike protein (1-1273)(K986P_V987P)
MFVFLVLLPLVSSQCVNLTTRTQLPPAYTNSFTRGVYYPDKVFRSSVLHSTQDLFLPFFSNVTWFHAIHVSGTNGTKRFDNPVLPFNDGVYFASTEKSNIIRGWIFGTTLDSKTQSLLIVNNATNVVIKVCEFQFCNDPFLGVYYHKNNKSWMESEFRVYSSANNCTFEYVSQPFLMDLEGKQGNFKNLREFVFKNIDGYFKIYSKHTPINLVRDLPQGFSALEPLVDLPIGINITRFQTLLALHRSYLTPGDSSSGWTAGAAAYYVGYLQPRTFLLKYNENGTITDAVDCALDPLSETKCTLKSFTVEKGIYQTSNFRVQPTESIVRFPNITNLCPFGEVFNATRFASVYAWNRKRISNCVADYSVLYNSASFSTFKCYGVSPTKLNDLCFTNVYADSFVIRGDEVRQIAPGQTGKIADYNYKLPDDFTGCVIAWNSNNLDSKVGGNYNYLYRLFRKSNLKPFERDISTEIYQAGSTPCNGVEGFNCYFPLQSYGFQPTNGVGYQPYRVVVLSFELLHAPATVCGPKKSTNLVKNKCVNFNFNGLTGTGVLTESNKKFLPFQQFGRDIADTTDAVRDPQTLEILDITPCSFGGVSVITPGTNTSNQVAVLYQDVNCTEVPVAIHADQLTPTWRVYSTGSNVFQTRAGCLIGAEHVNNSYECDIPIGAGICASYQTQTNSPRRARSVASQSIIAYTMSLGAENSVAYSNNSIAIPTNFTISVTTEILPVSMTKTSVDCTMYICGDSTECSNLLLQYGSFCTQLNRALTGIAVEQDKNTQEVFAQVKQIYKTPPIKDFGGFNFSQILPDSSKPSKRSFIEDLLFNKVTLADAGFIKQYGDCLGDIAARDLICAQKFNGLTVLPPLLTDEMIAQYTSALLAGTITSGWTFGAGAALQIPFAMQMAYRFNGIGVTQNVLYENQKLIANQFNSAIGKIQDSLSSTASALGKLQDVVNQNAQALNTLVKQLSSNFGAISSVLNDILSRLDPPEAEVQIDRLITGRLQSLQTYVTQQLIRAAEIRASANLAATKMSECVLGQSKRVDFCGKGYHLMSFPQSAPHGVVFLHVTYVPAQEKNFTTAPAICHDGKAHFPREGVFVSNGTHWFVTQRNFYEPQIITTDNTFVSGNCDVVIGIVNNTVYDPLQPELDSFKEELDKYFKNHTSPDVDLGDISGINASVVNIQKEIDRLNEVAKNLNESLIDLQELGKYEQYIKWPWYIWLGFIAGLIAIVMVTIMLCCMTSCCSCLKGCCSCGSCCKFDEDDSEPVLKGVKLHYT

SEQ ID NO: 393 - protein, 1273 aa, Artificial Sequence
  SARS-CoV-2/Iceland/280/2020__EPI_ISL_417608 spike protein (1-1273)(K986P_V987P)
MFVFLVLLPLVSSQCVNLTTRTQLPPAYTNSFTRGVYYPDKVFRSSVLHSTQDLFLPFFSNVTWFHAIHVSGTNGTKRFDNPVLPFNDGVYFASTEKSNIIRGWIFGTTLDSKTQSLLIVNNATNVVIKVCEFQFCNDPFLGVYYHKNNKSWMESEFRVYSSANNCTFEYVSQPFLMDLEGKQGNFKNLREFVFKNIDGYFKIYSKHTPINLVRDLPQGFSALEPLVDLPIGINITRFQTLLALHRSYLTPGDSSSGWTAGAAAYYVGYLQPRTFLLKYNENGTITDAVDCALDPLSETKCTLKSFTVEKGIYQTSNFRVQPTESIVRFPNITNLCPFGEVFNATRFASVYAWNRKRISNCVADYSVLYNSASFSTFKCYGVSPTKLNDLCFTNVYADSFVIRGDEVRQIAPGQTGKIADYNYKLPDDFTGCVIAWNSNNLDSKVGGNYNYLYRLFRKSNLKPFERDISTEIYQAGSTPCNGVEGFNCYFPLQSYGFQPTNGVGYQPYRVVVLSFELLHAPATVCGPKKSTNLVKNKCVNFNFNGLTGTGVLTESNKKFLPFQQFGRDIADTTDAVRDPQTLEILDITPCSFGGVSVITPGTNTSNQVAVLYQGVNCTEVPVAIHADQLTPTWRVYSTGSNVFQTRAGCLIGAEHVNNSYECDIPIGAGICASYHTQTNSPRRARSVASQSIIAYTMSLGAENSVAYSNNSIAIPTNFTISVTTEILPVSMTKTSVDCTMYICGDSTECSNLLLQYGSFCTQLNRALTGIAVEQDKNTQEVFAQVKQIYKTPPIKDFGGFNFSQILPDPSKPSKRSFIEDLLFNKVTLADAGFIKQYGDCLGDIAARDLICAQKFNGLTVLPPLLTDEMIAQYTSALLAGTITSGWTFGAGAALQIPFAMQMAYRFNGIGVTQNVLYENQKLIANQFNSAIGKIQDSLSSTASALGKLQDVVNQNAQALNTLVKQLSSNFGAISSVLNDILSRLDPPEAEVQIDRLITGRLQSLQTYVTQQLIRAAEIRASANLAATKMSECVLGQSKRVDFCGKGYHLMSFPQSAPHGVVFLHVTYVPAQEKNFTTAPAICHDGKAHFPREGVFVSNGTHWFVTQRNFYEPQIITTDNTFVSGNCDVVIGIVNNTVYDPLQPELDSFKEELDKYFKNHTSPDVDLGDISGINASVVNIQKEIDRLNEVAKNLNESLIDLQELGKYEQYIKWPWYIWLGFIAGLIAIVMVTIMLCCMTSCCSCLKGCCSCGSCCKFDEDDSEPVLKGVKLHYT

SEQ ID NO: 394 - protein, 1273 aa, Artificial Sequence
  SARS-CoV-2/Iceland/247/2020__EPI_ISL_417575 spike protein (1-1273)(K986P_V987P)
MFVFLVLLPLVSSQCVNLTTRTQLPPAYTNSFTRGVYYPDKVFRSSVLHSTQDLFLPFFSNVTWFHAIHVSGTNGTKRFDNPVLPFNDGVYFASTEKSNIIRGWIFGTTLDSKTQSLLIVNNATNVVIKVCEFQFCNDPFLGVYYHKNNKSWMESEFRVYSSANNCTFEYVSQPFLMDLEGKQGNFKNLREFVFKNIDGYFKIYSKHTPINLVRDLPQGFSALEPLVDLPIGINITRFQTLLALHRSYLTPGDSSSGWTAGAAAYYVGYLQPRTFLLKYNENGTITDAVDCALDPLSETKCTLKSFTVEKGIYQTSNFRVQPTESIVRFPNITNLCPFGEVFNATRFASVYAWNRKRISNCVADYSVLYNSASFSTFKCYGVSPTKLNDLCFTNVYADSFVIRGDEVRQIAPGQTGKIADYNYKLPDDFTGCVIAWNSNNLDSKVGGNYNYLYRLFRKSNLKPFERDISTEIYQAGSTPCNGVEGFNCYFPLQSYGFQPTNGVGYQPYRVVVLSFELLHAPATVCGPKKSTNLVKNKCVNFNFNGLTGTGVLTESNKKFLPFQQFGRDIADTTDAVRDPQTLEILDITPCSFGGVSVITPGTNTSNQVAVLYQGVNCTEVPVAIHADQLTPTWRVYSTGSNVFQTRAGCLIGAEHVNNSYECDIPIGAGICASYQTQTNSPRRARSVASQSIIAYTMSLGAENSVAYSNNSIAIPTNFTISVTTEILPVSMTKTSVDCTMYICGDSTECSNLLLQYGSFCTQLNRALTGIAVEQDKNTQEVFAQVKQIYKTPPIKDFGGFNFSQILPDPSKPSKRSFIEDLLFNKVTLADAGFIKQYGDCLGDIAARDLICAQKFNGLTVLPPLLTDEMIAQYTSALLAGTITSGWTFGAGAALQIPFAMQMAYRFNGIGVTQNVLYENQKLIANQFNSAIGKIQDSLSSTASALGKLQDVVNQNAQALNTLVKQLSSNFGAISSVLNDILSRLDPPEAEVQIDRLITGRLQSLQTYVTQQLIRAAEIRASANLAATKMSECVLGQSKRVDFCGKGYHLMSFPQSAPHGVVFLHVTYVPAQEKNFTTAPAICHDGKAHFPREGVFVSNGTHWFVTQRNFYEPQIITTDNTFVSGNCDVVIGIVNNTVYDPLQPELDSFKEELDKYFKNHTSPDVDLGDISGINASVVNIQKEIDRLNEVAKNLNESLIDLQELGKYEQYIKWPWYIWLGFIAGLIAIVIVTIMLCCMTSCCSCLKGCCSCGSCCKFDEDDSEPVLKGVKLHYT

SEQ ID NO: 395 - protein, 1273 aa, Artificial Sequence
  SARS-CoV-2/Iceland/238/2020__EPI_ISL_417566 spike protein (1-1273)(K986P_V987P)
MFVFLVLLPLVSSQCVNLTTRTQLPPAYTNSFTRGVYYPDKVFRSSVLHSTQDLFLPFFSNVTWFHAIHVSGTNGTKRFDNPVLPFNDGVYFASTEKSNIIRGWIFGTTLDSKTQSLLIVNNATNVVIKVCEFQFCNDPFLGVYYHKNNKSWMESEFRVYSSANNCTFEYVSQPFLMDLEGKQGNFKNLREFVFKNIDGYFKIYSKHTPINLVRDLPQGFSALEPLVDLPIGINITRFQTLLALHRSYLTPGDSSSGWTAGAAAYYVGYLQPRTFLLKYNENGTITDAVDCALDPLSETKCTLKSFTVEKGIYQTSNFRVQPTESIVRFPNITNLCPFGEVFNATRFASVYAWNRKRISNCVADYSVLYNSASFSTFKCYGVSPTKLNDLCFTNVYADSFVIRGDEVRQIAPGQTGKIADYNYKLPDDFTGCVIAWNSNNLDSKVGGNYNYLYRLFRKSNLKPFERDISTEIYQAGSTPCNGVEGFNCYFPLQSYGFQPTNGVGYQPYRVVVLSFELLHAPATVCGPKKSTNLVKNKCVNFNFNGLTGTGVLTESNKKFLPFQQFGRDIADTTDAVRDPQTLEILDITPCSFGGVSVITPGTNTSNQVAVLYQGVNCTEVPVAIHADQLTPTWRVYSTGSNVFQTRAGCLIGAEHVNNSYECDIPIGAGICASYQTQTNSPRRARSVASQSIIAYTMSLGAENSVAYSNNSIAIPTNFTISVTTEILPVSMTKTSVDCTMYICGDSTECSNLLLQYGSFCTQLNRALTGIAVEQDKNTQEVFAQVKQIYKTPPIKDFGGFNFSQILPDPSKPSKRSFIEDLLFNKVTLADVGFIKQYGDCLGDIAARDLICAQKFNGLTVLPPLLTDEMIAQYTSALLAGTITSGWTFGAGAALQIPFAMQMAYRFNGIGVTQNVLYENQKLIANQFNSAIGKIQDSLSSTASALGKLQDVVNQNAQALNTLVKQLSSNFGAISSVLNDILSRLDPPEAEVQIDRLITGRLQSLQTYVTQQLIRAAEIRASANLAATKMSECVLGQSKRVDFCGKGYHLMSFPQSAPHGVVFLHVTYVPAQEKNFTTAPAICHDGKAHFPREGVFVSNGTHWFVTQRNFYEPQIITTDNTFVSGNCDVVIGIVNNTVYDPLQPELDSFKEELDKYFKNHTSPDVDLGDISGINASVVNIQKEIDRLNEVAKNLNESLIDLQELGKYEQYIKWPWYIWLGFIAGLIAIVMVTIMLCCMTSCCSCLKGCCSCGSCCKFDEDDSEPVLKGVKLHYT

SEQ ID NO: 396 - protein, 1273 aa, Artificial Sequence
  SARS-CoV-2/Greece/16/2020__EPI_ISL_418265 spike protein (1-1273)(K986P_V987P)
MFVFLVLLPLVSSQCVNLTTRTQLPPAYTNSFTRGVYYPDKVFRSSVLHSTQDLFLPFFSNVTWFHAIHVSGTNGTKRFDNPVLPFNDGVYFASTEKSNIIRGWIFGTTLDSKTQSLLIVNNATNVVIKVCEFQFCNDPFLGVYYHKNNKSWMESEFRVYSSANNCTFEYVSQPFLMDLEGKQGNFKNLREFVFKNVDGYFKIYSKHTPINLVRDLPQGFSALEPLVDLPIGINITRFQTLLALHRSYLTPGDSSSGWTAGAAAYYVGYLQPRTFLLKYNENGTITDAVDCALDPLSETKCTLKSFTVEKGIYQTSNFRVQPTESIVRFPNITNLCPFGEVFNATRFASVYAWNRKRISNCVADYSVLYNSASFSTFKCYGVSPTKLNDLCFTNVYADSFVIRGDEVRQIAPGQTGKIADYNYKLPDDFTGCVIAWNSNNLDSKVGGNYNYLYRLFRKSNLKPFERDISTEIYQAGSTPCNGVEGFNCYFPLQSYGFQPTNGVGYQPYRVVVLSFELLHAPATVCGPKKSTNLVKNKCVNFNFNGLTGTGVLTESNKKFLPFQQFGRDIADTTDAVRDPQTLEILDITPCSFGGVSVITPGTNTSNQVAVLYQDVNCTEVPVAIHADQLTPTWRVYSTGSNVFQTRAGCLIGAEHVNNSYECDIPIGAGICASYQTQTNSPRRARSVASQSIIAYTMSLGAENSVAYSNNSIAIPTNFTISVTTEILPVSMTKTSVDCTMYICGDSTECSNLLLQYGSFCTQLNRALTGIAVEQDKNTQEVFAQVKQIYKTPPIKDFGGFNFSQILPDPSKPSKRSFIEDLLFNKVTLADAGFIKQYGDCLGDIAARDLICAQKFNGLTVLPPLLTDEMIAQYTSALLAGTITSGWTFGAGAALQIPFAMQMAYRFNGIGVTQNVLYENQKLIANQFNSAIGKIQDSLSSTASALGKLQDVVNQNAQALNTLVKQLSSNFGAISSVLNDILSRLDPPEAEVQIDRLITGRLQSLQTYVTQQLIRAAEIRASANLAATKMSECVLGQSKRVDFCGKGYHLMSFPQSAPHGVVFLHVTYVPAQEKNFTTAPAICHDGKAHFPREGVFVSNGTHWFVTQRNFYEPQIITTDNTFVSGNCDVVIGIVNNTVYDPLQPELDSFKEELDKYFKNHTSPDVDLGDISGINASVVNIQKEIDRLNEVAKNLNESLIDLQELGKYEQYIKWPWYIWLGFIAGLIAIVMVTIMLCCMTSCCSCLKGCCSCGSCCKFDEDDSEPVLKGVKLHYT

SEQ ID NO: 397 - protein, 1273 aa, Artificial Sequence
  SARS-CoV-2/Iceland/319/2020__EPI_ISL_417648 spike protein (1-1273)(K986P_V987P)
MFVFLVLLPLVSSQCVNLTTRTQLPPAYTNSFTRGVYYPDKVFRSSVLHSTQDLFLPFFSNVTWFHAIHVSGTNGTKRFDNPVLPFNDGVYFASTEKSNIIRGWIFGTTLDSKTQSLLIVNNATNVVIKVCEFQFCNDPFLGVYYHKNNKSWMESEFRVYSSANNCTFEYVSQPFLIDLEGKQGNFKNLREFVFKNIDGYFKIYSKHTPINLVRDLPQGFSALEPLVDLPIGINITRFQTLLALHRSYLTPGDSSSGWTAGAAAYYVGYLQPRTFLLKYNENGTITDAVDCALDPLSETKCTLKSFTVEKGIYQTSNFRVQPTESIVRFPNITNLCPFGEVFNATRFASVYAWNRKRISNCVADYSVLYNSASFSTFKCYGVSPTKLNDLCFTNVYADSFVIRGDEVRQIAPGQTGKIADYNYKLPDDFTGCVIAWNSNNLDSKVGGNYNYLYRLFRKSNLKPFERDISTEIYQAGSTPCNGVEGFNCYFPLQSYGFQPTNGVGYQPYRVVVLSFELLHAPATVCGPKKSTNLVKNKCVNFNFNGLTGTGVLTESNKKFLPFQQFGRDIADTTDAVRDPQTLEILDITPCSFGGVSVITPGTNTSNQVAVLYQGVNCTEVPVAIHADQLTPTWRVYSTGSNVFQTRAGCLIGAEHVNNSYECDIPIGAGICASYQTQTNSPRRARSVASQSIIAYTMSLGAENSVAYSNNSIAIPTNFTISVTTEILPVSMTKTSVDCTMYICGDSTECSNLLLQYGSFCTQLNRALTGIAVEQDKNTQEVFAQVKQIYKTPPIKDFGGFNFSQILPDPSKPSKRSFIEDLLFNKVTLADAGFIKQYGDCLGDIAARDLICAQKFNGLTVLPPLLTDEMIAQYTSALLAGTITSGWTFGAGAALQIPFAMQMAYRFNGIGVTQNVLYENQKLIANQFNSAIGKIQDSLSSTASALGKLQDVVNQNAQALNTLVKQLSSNFGAISSVLNDILSRLDPPEAEVQIDRLITGRLQSLQTYVTQQLIRAAEIRASANLAATKMSECVLGQSKRVDFCGKGYHLMSFPQSAPHGVVFLHVTYVPAQEKNFTTAPAICHDGKAHFPREGVFVSNGTHWFVTQRNFYEPQIITTDNTFVSGNCDVVIGIVNNTVYDPLQPELDSFKEELDKYFKNHTSPDVDLGDISGINASVVNIQKEIDRLNEVAKNLNESLIDLQELGKYEQYIKWPWYIWLGFIAGLIAIVMVTIMLCCMTSCCSCLKGCCSCGSCCKFDEDDSEPVLKGVKLHYT

SEQ ID NO: 398 - protein, 1273 aa, Artificial Sequence
  SARS-CoV-2/Congo/94/2020__EPI_ISL_417947 spike protein (1-1273)(K986P_V987P)
MFVFLVLLPLVSSQCVNLTTRTQLPPAYTNSFTRGVYYPDKVFRSSVLHSTQDLFLPFFSNVTWFHAIHVSGTNGTKRFDNPVLPFNDGVYFASTEKSNIIRGWIFGTTLDSKTQSLLIVNNATNVVIKVCEFQFCNDPFLGVYYHKNNKSWMESEFRVYSSANNCTFEYVSQPFLMDLEGKQGNFKNLREFVFKNIDGYFKIYSKHTPINLVRDLPQGFSALEPLVDLPIGINITRFQTLLALHRSYLTPGDSSSGWTAGAAAYYVGYLQPRTFLLKYNENGTITDAVDCALDPLSETKCTLKSFTVEKGIYQTSNFRVQPTESIVRFPNITNLCPFGEVFNATRFASVYAWNRKRISNCVADYSVLYNSASFSTFKCYGVSPTKLNDLCFTNVYADSFVIRGDEVRQIAPGQTGKIADYNYKLPDDFTGCVIAWNSNNLDSKVGGNYNYLYRLFRKSNLKPFERDISTEIYQAGSTPCNGVEGFNCYFPLQSYGFQPTNGVGYQPYRVVVLSFELLHAPATVCGPKKSTNLVKNKCVNFNFNGLTGTGVLTESNKKFLPFQQFGRDIADTTDAVRDPQTLEILDITPCSFGGVSVITPGTNTSNQVAVLYQGVNCTEVPVAIHADQLTPTWRVYSTGSNVFQTRAGCLIGAEHVNNSYECDIPIGAGICASYQTQTNSPRRARSVASQSIIAYTMSLGAENSVAYSNNSIAIPTNFTISVTTEILPVSMTKTSVDCTMYICGDSTECSNLLLQYGSFCTQLNRALTGIAVEQDKNTQEVFAQVKQIYKTPPIKDFGGFNFSQILPDPSKPSKRSFIEDILFNKVTLADAGFIKQYGDCLGDIAARDLICAQKFNGLTVLPPLLTDEMIAQYTSALLAGTITSGWTFGAGAALQIPFAMQMAYRFNGIGVTQNVLYENQKLIANQFNSAIGKIQDSLSSTASALGKLQDVVNQNAQALNTLVKQLSSNFGAISSVLNDILSRLDPPEAEVQIDRLITGRLQSLQTYVTQQLIRAAEIRASANLAATKMSECVLGQSKRVDFCGKGYHLMSFPQSAPHGVVFLHVTYVPAQEKNFTTAPAICHDGKAHFPREGVFVSNGTHWFVTQRNFYEPQIITTDNTFVSGNCDVVIGIVNNTVYDPLQPELDSFKEELDKYFKNHTSPDVDLGDISGINASVVNIQKEIDRLNEVAKNLNESLIDLQELGKYEQYIKWPWYIWLGFIAGLIAIVMVTIMLCCMTSCCSCLKGCCSCGSCCKFDEDDSEPVLKGVKLHYT

SEQ ID NO: 399 - protein, 1273 aa, Artificial Sequence
  SARS-CoV-2/Congo/158/2020__EPI_ISL_417950 spike protein (1-1273)(K986P_V987P)
MFVFLVLLPLVSSQCVNLTTRTQLPPAYTNSFTRGVYYPDKVFRSSVLHSTQDLFLPFFSNVTWFHAIHVSGTNGTKRFDNPVLPFNDGVYFASTEKSNIIRGWIFGTTLDSKTQSLLIVNNATNVVIKVCEFQFCNDPFLGVYYHKNNKSWMESEFRVYSSANNCTFEYVSQPFLMDLEGKQGNFKNLREFVFKNIDGYFKIYSKHTPINLVRDLPQGFSALEPLVDLPIGINITRFQTLLALHRSYLTPGDSSSGWTAGAAAYYVGYLQPRTFLLKYNENGTITDAVDCALDPLSETKCTLKSFTVEKGIYQTSNFRVQPTESIVRFPNITNLCPFGEVFNATRFASVYAWNRKRISNCVADYSVLYNSASFSTFKCYGVSPTKLNDLCFTNVYADSFVIRGDEVRQIAPGQTGKIADYNYKLPDDFTGCVIAWNSNNLDSKVGGNYNYLYRLFRKSNLKPFERDISTEIYQAGSTPCNGVEGFNCYFPLQSYGFQPTNGVGYQPYRVVVLSFELLHAPATVCGPKKSTNLVKNKCVNFNFNGLTGTGVLTESNKKFLPFQQFGRDIADTTDAVRDPQTLEILDITPCSFGGVSVITPGTNTSNQVAVLYQDVNCTEVPVAIHADQLTPTWRVYSTGSNVFQTRAGCLIGAEHVNNSYECDIPIGAGICASYQTQTNSPRRARSVASQSIIAYTMSLGAENSVAYSNNSIAIPTNFTISVTTEILPVSMTKTSVDCTMYICGDSTECSNLLLQYGSFCTQLNRALTGIAVEQDKNTQEVFAQVKQIYKTPPIKDFGGFNFSQILPDPSKPSKRSFIEDLLFNKVTLADAGFIKQYGDCLGDIAARDLICAQKFNGLTVLPPLLTDEMIAQYTSALLAGTITSGWTFGAGAALQIPFAMQMAYRFNGIGVTQNVLYENQKLIANQFNSAIGKIQDSLSSTASALGKLQDVVNQNAQALNTLVKQLSSNFGAISSVLNDILSRLDPPEAEVQIDRLITGRLQSLQTYVTQQLIRAAEIRASANLAATKMSECVLGQSKRVDFCGKGYHLMSFPQSAPHGVVFLHVTYVPAQEKNFTTAPAICHDGKAHFPREGVFVSNGTHWFVTQRNFYEPQIITTDNTFLSGNCDVVIGIVNNTVYDPLQPELDSFKEELDKYFKNHTSPDVDLGDISGINASVVNIQKEIDRLNEVAKNLNESLIDLQELGKYEQYIKWPWYIWLGFIAGLIAIVMVTIMLCCMTSCCSCLKGCCSCGSCCKFDEDDSEPVLKGVKLHYT

SEQ ID NO: 400 - protein, 1273 aa, Artificial Sequence
  SARS-CoV-2/USA/UT-00034/2020__EPI_ISL_417977 spike protein (1-1273)(K986P_V987P)
MFVFLVLLPLVSSQCVNLTTRTQLPPAYTNSFTRGVYYPDKVFRSSVLHSTQDLFLPFFSNVTWFHAIHVSGTNGTKRFDNPVLPFNDGVYFASTEKSNIIRGWIFGTTLDSKTQSLLIVNNATNVVIKVCEFQFCNDPFLGVYYYKNNKSWMESEFRVYSSANNCTFEYVSQPFLMDLEGKQGNFKNLREFVFKNIDGYFKIYSKHTPINLVRDLPQGFSALEPLVDLPIGINITRFQTLLALHRSYLTPGDSSSGWTAGAAAYYVGYLQPRTFLLKYNENGTITDAVDCALDPLSETKCTLKSFTVEKGIYQTSNFRVQPTESIVRFPNITNLCPFGEVFNATRFASVYAWNRKRISNCVADYSVLYNSASFSTFKCYGVSPTKLNDLCFTNVYADSFVIRGDEVRQIAPGQTGKIADYNYKLPDDFTGCVIAWNSNNLDSKVGGNYNYLYRLFRKSNLKPFERDISTEIYQAGSTPCNGVEGFNCYFPLQSYGFQPTNGVGYQPYRVVVLSFELLHAPATVCGPKKSTNLVKNKCVNFNFNGLTGTGVLTESNKKFLPFQQFGRDIADTTDAVRDPQTLEILDITPCSFGGVSVITPGTNTSNQVAVLYQGVNCTEVPVAIHADQLTPTWRVYSTGSNVFQTRAGCLIGAEHVNNSYECDIPIGAGICASYQTQTNSPRRARSVASQSIIAYTMSLGAENSVAYSNNSIAIPTNFTISVTTEILPVSMTKTSVDCTMYICGDSTECSNLLLQYGSFCTQLNRALTGIAVEQDKNTQEVFAQVKQIYKTPPIKDFGGFNFSQILPDPSKPSKRSFIEDLLFNKVTLADAGFIKQYGDCLGDIAARDLICAQKFNGLTVLPPLLTDEMIAQYTSALLAGTITSGWTFGAGAALQIPFAMQMAYRFNGIGVTQNVLYENQKLIANQFNSAIGKIQDSLSSTASALGKLQDVVNQNAQALNTLVKQLSSNFGAISSVLNDILSRLDPPEAEVQIDRLITGRLQSLQTYVTQQLIRAAEIRASANLAATKMSECVLGQSKRVDFCGKGYHLMSFPQSAPHGVVFLHVTYVPAQEKNFTTAPAICHDGKAHFPREGVFVSNGTHWFVTQRNFYEPQIITTDNTFVSGNCDVVIGIVNNTVYDPLQPELDSFKEELDKYFKNHTSPDVDLGDISGINASVVNIQKEIDRLNEVAKNLNESLIDLQELGKYEQYIKWPWYIWLGFIAGLIAIVMVTIMLCCMTSCCSCLKGCCSCGSCCKFDEDDSEPVLKGVKLHYT

SEQ ID NO: 401 - protein, 1273 aa, Artificial Sequence
  SARS-CoV-2/USA/UT-00033/2020__EPI_ISL_417976 spike protein (1-1273)(K986P_V987P)
MFVFLVLLPLVSSQCVNLTTRTQLPPAYTNSFTRGVYYPDKVFRSSVLHSTQDLFLPFFSNVTWFHAIHVSGTNGTKRFDNPVLPFNDGVYFASTEKSNIIRGWIFGTTLDSKTQSLLIVNNATNVVIKVCEFQFCNDPFLGVYYHKNNKSWMESEFRVYSSANNCTFEYVSQPFLMDLEGKQGNFKNLREFVFKNIDGYFKIYSKHTPINLVRDLPQGFSALEPLVDLPIGINITRFQTLLALHRSYLTPGDSSSGLTAGAAAYYVGYLQPRTFLLKYNENGTITDAVDCALDPLSETKCTLKSFTVEKGIYQTSNFRVQPTESIVRFPNITNLCPFGEVFNATRFASVYAWNRKRISNCVADYSVLYNSASFSTFKCYGVSPTKLNDLCFTNVYADSFVIRGDEVRQIAPGQTGKIADYNYKLPDDFTGCVIAWNSNNLDSKVGGNYNYLYRLFRKSNLKPFERDISTEIYQAGSTPCNGVEGFNCYFPLQSYGFQPTNGVGYQPYRVVVLSFELLHAPATVCGPKKSTNLVKNKCVNFNFNGLTGTGVLTESNKKFLPFQQFGRDIADTTDAVRDPQTLEILDITPCSFGGVSVITPGTNTSNQVAVLYQGVNCTEVPVAIHADQLTPTWRVYSTGSNVFQTRAGCLIGAEHVNNSYECDIPIGAGICASYQTQTNSPRRARSVASQSIIAYTMSLGAENSVAYSNNSIAIPTNFTISVTTEILPVSMTKTSVDCTMYICGDSTECSNLLLQYGSFCTQLNRALTGIAVEQDKNTQEVFAQVKQIYKTPPIKDFGGFNFSQILPDPSKPSKRSFIEDLLFNKVTLADAGFIKQYGDCLGDIAARDLICAQKFNGLTVLPPLLTDEMIAQYTSALLAGTITSGWTFGAGAALQIPFAMQMAYRFNGIGVTQNVLYENQKLIANQFNSAIGKIQDSLSSTASALGKLQDVVNQNAQALNTLVKQLSSNFGAISSVLNDILSRLDPPEAEVQIDRLITGRLQSLQTYVTQQLIRAAEIRASANLAATKMSECVLGQSKRVDFCGKGYHLMSFPQSAPHGVVFLHVTYVPAQEKNFTTAPAICHDGKAHFPREGVFVSNGTHWFVTQRNFYEPQIITTDNTFVSGNCDVVIGIVNNTVYDPLQPELDSFKEELDKYFKNHTSPDVDLGDISGINASVVNIQKEIDRLNEVAKNLNESLIDLQELGKYEQYIKWPWYIWLGFIAGLIAIVMVTIMLCCMTSCCSCLKGCCSCGSCCKFDEDDSEPVLKGVKLHYT

SEQ ID NO: 402 - protein, 1273 aa, Artificial Sequence
  SARS-CoV-2/USA/WI-13/2020__EPI_ISL_417516 spike protein (1-1273)(K986P_V987P)
MFVFLVLLPLVSSQCVNLTTRTQLPPAYTNSFTRGVYYPDKVFRSSVLHSTQDLFLPFFSNVTWFHAIHVSGTNGTKRFDNPVLPFNDGVYFASTEKSNIIRGWIFGTTLDSKTQSLLIVNNATNVVIKVCEFQFCNDPFLGVYYHKNNKSWMESEFRVYSSANNCTFEYVSQPFLMDLEGKQGNFKNLREFVFKNIDGYFKIYSKHTPINLVRDLPQGFSALEPLVDLPIGINITRFQTLLALHRSYLTPGDSSSGWTAGAAAYYVGYLQPRTFLLKYNENGTITDAVDCALDPLSETKCTLKSFTVEKGIYQTSNFRVLPTESIVRFPNITNLCPFGEVFNATRFASVYAWNRKRISNCVADYSVLYNSASFSTFKCYGVSPTKLNDLCFTNVYADSFVIRGDEVRQIAPGQTGKIADYNYKLPDDFTGCVIAWNSNNLDSKVGGNYNYLYRLFRKSNLKPFERDISTEIYQAGSTPCNGVEGFNCYFPLQSYGFQPTNGVGYQPYRVVVLSFELLHAPATVCGPKKSTNLVKNKCVNFNFNGLTGTGVLTESNKKFLPFQQFGRDIADTTDAVRDPQTLEILDITPCSFGGVSVITPGTNTSNQVAVLYQGVNCTEVPVAIHADQLTPTWRVYSTGSNVFQTRAGCLIGAEHVNNSYECDIPIGAGICASYQTQTNSPRRARSVASQSIIAYTMSLGAENSVAYSNNSIAIPTNFTISVTTEILPVSMTKTSVDCTMYICGDSTECSNLLLQYGSFCTQLNRALTGIAVEQDKNTQEVFAQVKQIYKTPPIKDFGGFNFSQILPDPSKPSKRSFIEDLLFNKVTLADAGFIKQYGDCLGDIAARDLICAQKFNGLTVLPPLLTDEMIAQYTSALLAGTITSGWTFGAGAALQIPFAMQMAYRFNGIGVTQNVLYENQKLIANQFNSAIGKIQDSLSSTASALGKLQDVVNQNAQALNTLVKQLSSNFGAISSVLNDILSRLDPPEAEVQIDRLITGRLQSLQTYVTQQLIRAAEIRASANLAATKMSECVLGQSKRVDFCGKGYHLMSFPQSAPHGVVFLHVTYVPAQEKNFTTAPAICHDGKAHFPREGVFVSNGTHWFVTQRNFYEPQIITTDNTFVSGNCDVVIGIVNNTVYDPLQPELDSFKEELDKYFKNHTSPDVDLGDISGINASVVNIQKEIDRLNEVAKNLNESLIDLQELGKYEQYIKWPWYIWLGFIAGLIAIVMVTIMLCCMTSCCSCLKGCCSCGSCCKFDEDDSEPVLKGVKLHYT

SEQ ID NO: 403 - protein, 1272 aa, Artificial Sequence
  SARS-CoV-2/India/1-27/2020__EPI_ISL_413522 spike protein (1-1272)(K985P_V986P)
MFVFLVLLPLVSSQCVNLTTRTQLPPAYTNSFTRGVYYPDKVFRSSVLHSTQDLFLPFFSNVTWFHAIHVSGTNGTKRFDNPVLPFNDGVYFASTEKSNIIRGWIFGTTLDSKTQSLLIVNNATNVVIKVCEFQFCNDPFLGVYHKNNKSWMESEFRVYSSANNCTFEYVSQPFLMDLEGKQGNFKNLREFVFKNIDGYFKIYSKHTPINLVRDLPQGFSALEPLVDLPIGINITRFQTLLALHRSYLTPGDSSSGWTAGAAAYYVGYLQPRTFLLKYNENGTITDAVDCALDPLSETKCTLKSFTVEKGIYQTSNFRVQPTESIVRFPNITNLCPFGEVFNATRFASVYAWNRKRISNCVADYSVLYNSASFSTFKCYGVSPTKLNDLCFTNVYADSFVIRGDEVIQIAPGQTGKIADYNYKLPDDFTGCVIAWNSNNLDSKVGGNYNYLYRLFRKSNLKPFERDISTEIYQAGSTPCNGVEGFNCYFPLQSYGFQPTNGVGYQPYRVVVLSFELLHAPATVCGPKKSTNLVKNKCVNFNFNGLTGTGVLTESNKKFLPFQQFGRDIADTTDAVRDPQTLEILDITPCSFGGVSVITPGTNTSNQVAVLYQDVNCTEVPVAIHADQLTPTWRVYSTGSNVFQTRAGCLIGAEHVNNSYECDIPIGAGICASYQTQTNSPRRARSVASQSIIAYTMSLGAENSVAYSNNSIAIPTNFTISVTTEILPVSMTKTSVDCTMYICGDSTECSNLLLQYGSFCTQLNRALTGIAVEQDKNTQEVFAQVKQIYKTPPIKDFGGFNFSQILPDPSKPSKRSFIEDLLFNKVTLADAGFIKQYGDCLGDIAARDLICAQKFNGLTVLPPLLTDEMIAQYTSALLAGTITSGWTFGAGAALQIPFAMQMAYRFNGIGVTQNVLYENQKLIANQFNSAIGKIQDSLSSTASALGKLQDVVNQNAQALNTLVKQLSSNFGAISSVLNDILSRLDPPEAEVQIDRLITGRLQSLQTYVTQQLIRAAEIRASANLAATKMSECVLGQSKRVDFCGKGYHLMSFPQSAPHGVVFLHVTYVPAQEKNFTTAPAICHDGKAHFPREGVFVSNGTHWFVTQRNFYEPQIITTDNTFVSGNCDVVIGIVNNTVYDPLQPELDSFKEELDKYFKNHTSPDVDLGDISGINASVVNIQKEIDRLNEVAKNLNESLIDLQELGKYEQYIKWPWYIWLGFIAGLIAIVMVTIMLCCMTSCCSCLKGCCSCGSCCKFDEDDSEPVLKGVKLHYT

SEQ ID NO: 404 - protein, 1267 aa, Artificial Sequence
  SARS-CoV-2/pangolin/Guangxi/P4L/2017__EPI_ISL_410538 spike protein (1-1267)(K980P_V981P)
MFVFLFVLPLVSSQCVNLTTRTGIPPGYTNSSTRGVYYPDKVFRSSILHLTQDLFLPFFSNVTWFNTINYQGGFKKFDNPVLPFNDGVYFASTEKSNIIRGWIFGTTLDARTQSLLIVNNATNVVIKVCEFQFCTDPFLGVYYHNNNKTWVENEFRVYSSANNCTFEYISQPFLMDLEGKQGNFKNLREFVFKNVDGYFKIYSKHTPIDLVRDLPRGFAALEPLVDLPIGINITRFQTLLALHRSYLTPGNLESGWTTGAAAYYVGYLQQRTFLLSYNQNGTITDAVDCSLDPLSETKCTLKSLTVEKGIYQTSNFRVQPTISIVRFPNITNLCPFGEVFNASKFASVYAWNRKRISNCVADYSVLYNSTSFSTFKCYGVSPTKLNDLCFTNVYADSFVVKGDEVRQIAPGQTGVIADYNYKLPDDFTGCVIAWNSVKQDALTGGNYGYLYRLFRKSKLKPFERDISTEIYQAGSTPCNGQVGLNCYYPLERYGFHPTTGVNYQPFRVVVLSFELLNGPATVCGPKLSTTLVKDKCVNFNFNGLTGTGVLTTSKKQFLPFQQFGRDISDTTDAVRDPQTLEILDITPCSFGGVSVITPGTNTSNQVAVLYQDVNCTEVPMAIHAEQLTPAWRVYSAGANVFQTRAGCLVGAEHVNNSYECDIPVGAGICASYHSMSSLRSVNQRSIIAYTMSLGAENSVAYSNNSIAIPTNFTISVTTEILPVSMTKTSVDCTMYICGDSIECSNLLLQYGSFCTQLNRALTGIAVEQDKNTQEVFAQVKQIYKTPPIKDFGGFNFSQILPDPSKPSKRSFIEDLLFNKVTLADAGFIKQYGDCLGDIAARDLICAQKFNGLTVLPPLLTDEMIAQYTSALLAGTITSGWTFGAGAALQIPFAMQMAYRFNGIGVTQNVLYENQKLIANQFNSAIGKIQDSLSSTASALGKLQDVVNQNAQALNTLVKQLSSNFGAISSVLNDILSRLDPPEAEVQIDRLITGRLQSLQTYVTQQLIRAAEIRASANLAATKMSECVLGQSKRVDFCGKGYHLMSFPQSAPHGVVFLHVTYVPAQEKNFTTAPAICHEGKAHFPREGVFVSNGTHWFITQRNFYEPQIITTDNTFVSGSCDVVIGIVNNTVYDPLQPELDSFKEELDKYFKNHTSPDVDLGDISGINASVVNIQKEIDRLNEVAKNLNESPIDLQELGKYEQYIKWPWYIWLGFIAGLIAIIMVTIMLCCMTSCCSCLKGCCSCGSCCKFDEDDSEPVLKGVKLHYT

SEQ ID NO: 405 - protein, 1267 aa, Artificial Sequence
  SARS-CoV-2/pangolin/Guangxi/P5L/2017__EPI_ISL_410540 spike protein (1-1267)(K980P_V981P)
MFVFLFVLPLVSSQCVNLTTRTGIPPGYTNSSTRGVYYPDKVFRSSILHLTQDLFLPFFSNVTWFNTINYQGGFKKFDNPVLPFNDGVYFASTEKSNIIRGWIFGTTLDARTQSLLIVNNATNVVIKVCEFQFCTDPFLGVYYHNNNKTWVENEFRVYSSANNCTFEYISQPFLMDLEGKQGNFKNLREFVFKNVDGYFKIYSKHTPIDLVRDLPRGFAALEPLVDLPIGINITRFQTLLALHRSYLTPGKLESGWTTGAAAYYVGYLQQRTFLLSYNQNGTITDAVDCSLDPLSETKCTLKSLTVEKGIYQTSNFRVQPTISIVRFPNITNLCPFGEVFNASKFASVYAWNRKRISNCVADYSVLYNSTSFSTFKCYGVSPTKLNDLCFTNVYADSFVVKGDEVRQIAPGQTGVIADYNYKLPDDFTGCVIAWNSVKQDALTGGNYGYLYRLFRKSKLKPFERDISTEIYQAGSTPCNGQVGLNCYYPLERYGFHPTTGVNYQPFRVVVLSFELLNGPATVCGPKLSTTLVKDKCVNFNFNGLTGTGVLTTSKKQFLPFQQFGRDISDTTDAVRDPQTLEILDITPCSFGGVSVITPGTNTSNQVAVLYQDVNCTEVPMAIHAEQLTPAWRVYSAGANVFQTRAGCLVGAEHVNNSYECDIPVGAGICASYHSMSSFRSVNQRSIIAYTMSLGAENSVAYSNNSIAIPTNFTISVTTEILPVSMTKTSVDCTMYICGDSIECSNLLLQYGSFCTQLNRALTGIAVEQDKNTQEVFAQVKQIYKTPPIKDFGGFNFSQILPDPSKPSKRSFIEDLLFNKVTLADAGFIKQYGDCLGDIAARDLICAQKFNGLTVLPPLLTDEMIAQYTSALLAGTITSGWTFGAGAALQIPFAMQMAYRFNGIGVTQNVLYENQKLIANQFNSAIGKIQDSLSSTASALGKLQDVVNQNAQALNTLVKQLSSNFGAISSVLNDILSRLDPPEAEVQIDRLITGRLQSLQTYVTQQLIRAAEIRASANLAATKMSECVLGQSKRVDFCGKGYHLMSFPQSAPHGVVFLHVTYVPAQEKNFTTAPAICHEGKAHFPREGVFVSNGTHWFITQRNFYEPQIITTDNTFVSGSCDVVIGIVNNTVYDPLQPELDSFKEELDKYFKNHTSPDVDLGDISGINASVVNIQKEIDRLNEVAKNLNESLIDLQELGKYEQYIKWPWYIWLGFIAGLIAIIMVTIMLCCMTSCCSCLKGCCSCGSCCKFDEDDSEPVLKGVKLHYT

SEQ ID NO: 406 - protein, 1267 aa, Artificial Sequence
  SARS-CoV-2/pangolin/Guangxi/P5E/2017__EPI_ISL_410541 spike protein (1-1267)(K980P_V981P)
MFVFLFVLPLVSSQCVNLTTRTGIPPGYTNSSTRGVYYPDKVFRSSILHLTQDLFLPFFSNVTWFNTITYQGGSKKFDNPVLPFNDGVYFASTEKSNIIRGWIFGTTLDARTQSLLIVNNATNVVIKVCEFQFCTDPFLGVYYHNNNKTWVENEFRVYSSANNCTFEYISQPFLMDLEGKQGNFKNLREFVFKNVDGYFKIYSKHTPIDLVRDLPRGFAALEPLVDLPIGINITRFQTLLALHRSYLTPGKLESGWTTGAAAYYVGYLQQRTFLLSYNQNGTITDAVDCSLDPLSETKCTLKSLTVEKGIYQTSNFRVQPTISIVRFPNITNLCPFGEVFNASKFASVYAWNRKRISNCVADYSVLYNSTSFSTFKCYGVSPTKLNDLCFTNVYADSFVVKGDEVRQIAPGQTGVIADYNYKLPDDFTGCVIAWNSVKQDALTGDNYGYLYRLFRKSKLKPFERDISTEIYQAGSTPCNGQVGLNCYYPLERYGFHPTTGVNYQPFRVVVLSFELLNGPATVCGPKLSTTLVKDKCVNFNFNGLTGTGVLTTSKKQFLPFQQFGRDISDTTDAVRDPQTLEILDITPCSFGGVSVITPGTNTSNQVAVLYQDVNCTEVPMAIHAEQLTPAWRVYSAGANVFQTRAGCLVGAEHVNNSYECDIPVGAGICASYHSMSSFRSVNQRSIIAYTMSLGAENSVAYSNNSIAIPTNFTISVTTEILPVSMTKTSVDCTMYICGDSIECSNLLLQYGSFCTQLNRALTGIAVEQDKNTQEVFAQVKQIYKTPPIKDFGGFNFSQILPDPSKPSKRSFIEDLLFNKVTLADAGFIKQYGDCLGDIAARDLICAQKFNGLTVLPPLLTDEMIAQYTSALLAGTITSGWTFGAGAALQIPFAMQMAYRFNGIGVTQNVLYENQKLIANQFNSAIGKIQDSLSSTASALGKLQDVVNQNAQALNTLVKQLSSNFGAISSVLNDILSRLDPPEAEVQIDRLITGRLQSLQTYVTQQLIRAAEIRASANLAATKMSECVLGQSKRVDFCGKGYHLMSFPQSAPHGVVFLHVTYVPAQEKNFTTAPAICHEGKAHFPREGVFVSNGTHWFITQRNFYEPQIITTDNTFVSGSCDVVIGIVNNTVYDPLQPELDSFKEELDKYFKNHTSPDVDLGDISGINASVVNIQKEIDRLNEVAKNLNESLIDLQELGKYEQYIKWPWYIWLGFIAGLIAIIMVTIMLCCMTSCCSCLKGCCSCGSCCKFDEDDSEPVLKGVKLHYT

SEQ ID NO: 407 - protein, 1265 aa, Artificial Sequence
  SARS-CoV-2/pangolin/Guangxi/P1E/2017__EPI_ISL_410539 spike protein (1-1265)(K978P_V979P)
MFVFLFVLPLVSSQCVNLTTRTGIQPGYTNSSTRGVYYPDKVFRSSILHLTQDLFLPFFSNVTWFNTINYQGGFKKFDNPVLPFNDGVYFASTEKSNIIRGWIFGTTLDARTQSLLIVNNATNVVIKVCEFQFCTDPFLGVYYHNNNKTWVENEFRVYSSANNCTFEYISQPFLMDLEGKQGNFKNLREFVFKNVDGYFKIYSKHTPIDLVRDLPRGFAALEPLVDLPIGINITRFQTLLALHRSYLTPGKLESGWTTGAAAYYVGYLQQRTFLLSYNQNGTITDAVDCSLDPLSETKCTLKSLTVEKGIYQTSNFRVQPTISIVRFPNITNLCPFGEVFNASKFASVYAWNRKRISNCVADYSVLYNSTSFSTFKCYGVSPTKLNDLCFTNVYADSFVVKGDEVRQIAPGQTGVIADYNYKLPDDFTGCVIAWNSVKQDALTGGNYLYRLFRKSKLKPFERDISTEIYQAGSTPCNGQVGLNCYYPLERYGFHPTTGVNYQPFRVVVLSFELLNGPATVCGPKLSTTLVKDKCVNFNFNGLTGTGVLTTSKKQFLPFQQFGRDISDTTDAVRDPQTLEILDITPCSFGGVSVITPGTNTSNQVAVLYQDVNCTEVPMAIHAEQLTPAWRVYSAGANVFQTRAGCLVGAEHVNNSYECDIPVGAGICASYHSMSSLRSVNQRSIIAYTMSLGAENSVAYSNNSIAIPTNFTISVTTEILPVSMTKTSVDCTMYICGDSIECSNLLLQYGSFCTQLNRALTGIAVEQDKNTQEVFAQVKQIYKTPPIKDFGGFNFSQILPDPSKPSKRSFIEDLLFNKVTLADAGFIKQYGDCLGDIAARDLICAQKFNGLTVLPPLLTDEMIAQYTSALLAGTITSGWTFGAGAALQIPFAMQMAYRFNGIGVTQNVLYENQKLIANQFNSAIGKIQDSLSSTASALGKLQDVVNQNAQALNTLVKQLSSNFGAISSVLNDILSRLDPPEAEVQIDRLITGRLQSLQTYVTQQLIRAAEIRASANLAATKMSECVLGQSKRVDFCGKGYHLMSFPQSAPHGVVFLHVTYVPAQEKNFTTAPAICHEGKAHFPREGVFVSNGTHWFITQRNFYEPQIITTDNTFVSGSCDVVIGIVNNTVYDPLQPELDSFKEELDKYFKNHTSPDVDLGDISGINASVVNIQKEIDRLNEVAKNLNESLIDLQELGKYEQYIKWPWYIWLGFIAGLIAIIMVTIMLCCMTSCCSCLKGCCSCGSCCKFDEDDSEPVLKGVKLHYT

SEQ ID NO: 408 - protein, 1273 aa, Artificial Sequence
  SARS-CoV-2/Wuhan/WIV05/2019__EPI_ISL_402128 spike protein (1-1273)(K986P_V987P_T887W_A1020W)
MFVFLVLLPLVSSQCVNLTTRTQLPPAYTNSFTRGVYYPDKVFRSSVLHSTQDLFLPFFSNVTWFHAIHVSGTNGTKRFDNPVLPFNDGVYFASTEKSNIIRGWIFGTTLDSKTQSLLIVNNATNVVIKVCEFQFCNDPFLGVYYHKNNKSWMESEFRVYSSANNCTFEYVSQPFLMDLEGKQGNFKNLREFVFKNIDGYFKIYSKHTPINLVRDLPQGFSALEPLVDLPIGINITRFQTLLALHRSYLTPGDSSSGWTAGAAAYYVGYLQPRTFLLKYNENGTITDAVDCALDPLSETKCTLKSFTVEKGIYQTSNFRVQPTESIVRFPNITNLCPFGEVFNATRFASVYAWNRKRISNCVADYSVLYNSASFSTFKCYGVSPTKLNDLCFTNVYADSFVIRGDEVRQIAPGQTGKIADYNYKLPDDFTGCVIAWNSNNLDSKVGGNYNYLYRLFRKSNLKPFERDISTEIYQAGSTPCNGVEGFNCYFPLQSYGFQPTNGVGYQPYRVVVLSFELLHAPATVCGPKKSTNLVKNKCVNFNFNGLTGTGVLTESNKKFLPFQQFGRDIADTTDAVRDPQTLEILDITPCSFGGVSVITPGTNTSNQVAVLYQDVNCTEVPVAIHADQLTPTWRVYSTGSNVFQTRAGCLIGAEHVNNSYECDIPIGAGICASYQTQTNSPRRARSVASQSIIAYTMSLGAENSVAYSNNSIAIPTNFTISVTTEILPVSMTKTSVDCTMYICGDSTECSNLLLQYGSFCTQLNRALTGIAVEQDKNTQEVFAQVKQIYKTPPIKDFGGFNFSQILPDPSKPSKRSFIEDLLFNKVTLADAGFIKQYGDCLGDIAARDLICAQKFNGLTVLPPLLTDEMIAQYTSALLAGTITSGWWFGAGAALQIPFAMQMAYRFNGIGVTQNVLYENQKLIANQFNSAIGKIQDSLSSTASALGKLQDVVNQNAQALNTLVKQLSSNFGAISSVLNDILSRLDPPEAEVQIDRLITGRLQSLQTYVTQQLIRAAEIRWSANLAATKMSECVLGQSKRVDFCGKGYHLMSFPQSAPHGVVFLHVTYVPAQEKNFTTAPAICHDGKAHFPREGVFVSNGTHWFVTQRNFYEPQIITTDNTFVSGNCDVVIGIVNNTVYDPLQPELDSFKEELDKYFKNHTSPDVDLGDISGINASVVNIQKEIDRLNEVAKNLNESLIDLQELGKYEQYIKWPWYIWLGFIAGLIAIVMVTIMLCCMTSCCSCLKGCCSCGSCCKFDEDDSEPVLKGVKLHYT

SEQ ID NO: 409 - protein, 1269 aa, Artificial Sequence
  SARS-CoV-2/bat/Yunnan/RaTG13/2013__EPI_ISL_402131 spike protein (1-1269)(K982P_V983P_T883W_A1016W)
MFVFLVLLPLVSSQCVNLTTRTQLPPAYTNSSTRGVYYPDKVFRSSVLHLTQDLFLPFFSNVTWFHAIHVSGTNGIKRFDNPVLPFNDGVYFASTEKSNIIRGWIFGTTLDSKTQSLLIVNNATNVVIKVCEFQFCNDPFLGVYYHKNNKSWMESEFRVYSSANNCTFEYVSQPFLMDLEGKQGNFKNLREFVFKNIDGYFKIYSKHTPINLVRDLPPGFSALEPLVDLPIGINITRFQTLLALHRSYLTPGDSSSGWTAGAAAYYVGYLQPRTFLLKYNENGTITDAVDCALDPLSETKCTLKSFTVEKGIYQTSNFRVQPTDSIVRFPNITNLCPFGEVFNATTFASVYAWNRKRISNCVADYSVLYNSTSFSTFKCYGVSPTKLNDLCFTNVYADSFVITGDEVRQIAPGQTGKIADYNYKLPDDFTGCVIAWNSKHIDAKEGGNFNYLYRLFRKANLKPFERDISTEIYQAGSKPCNGQTGLNCYYPLYRYGFYPTDGVGHQPYRVVVLSFELLNAPATVCGPKKSTNLVKNKCVNFNFNGLTGTGVLTESNKKFLPFQQFGRDIADTTDAVRDPQTLEILDITPCSFGGVSVITPGTNASNQVAVLYQDVNCTEVPVAIHADQLTPTWRVYSTGSNVFQTRAGCLIGAEHVNNSYECDIPIGAGICASYQTQTNSRSVASQSIIAYTMSLGAENSVAYSNNSIAIPTNFTISVTTEILPVSMTKTSVDCTMYICGDSTECSNLLLQYGSFCTQLNRALTGIAVEQDKNTQEVFAQVKQIYKTPPIKDFGGFNFSQILPDPSKPSKRSFIEDLLFNKVTLADAGFIKQYGDCLGDIAARDLICAQKFNGLTVLPPLLTDEMIAQYTSALLAGTITSGWWFGAGAALQIPFAMQMAYRFNGIGVTQNVLYENQKLIANQFNSAIGKIQDSLSSTASALGKLQDVVNQNAQALNTLVKQLSSNFGAISSVLNDILSRLDPPEAEVQIDRLITGRLQSLQTYVTQQLIRAAEIRWSANLAATKMSECVLGQSKRVDFCGKGYHLMSFPQSAPHGVVFLHVTYVPAQEKNFTTAPAICHDGKAHFPREGVFVSNGTHWFVTQRNFYEPQIITTDNTFVSGSCDVVIGIVNNTVYDPLQPELDSFKEELDKYFKNHTSPDVDLGDISGINASVVNIQKEIDRLNEVAKNLNESLIDLQELGKYEQYIKWPWYIWLGFIAGLIAIIMVTIMLCCMTSCCSCLKGCCSCGSCCKFDEDDSEPVLKGVKLHYT

SEQ ID NO: 410 - protein, 1273 aa, Artificial Sequence
  SARS-CoV-2/Wuhan/HBCDC-HB-01/2019__EPI_ISL_402132 spike protein (1-1273)(K986P_V987P_T887W_A1020W)
MFVFLVLLPLVSSQCVNLTTRTQLPPAYTNSITRGVYYPDKVFRSSVLHSTQDLFLPFFSNVTWFHAIHVSGTNGTKRFDNPVLPFNDGVYFASTEKSNIIRGWIFGTTLDSKTQSLLIVNNATNVVIKVCEFQFCNDPFLGVYYHKNNKSWMESEFRVYSSANNCTFEYVSQPFLMDLEGKQGNFKNLREFVFKNIDGYFKIYSKHTPINLVRDLPQGFSALEPLVDLPIGINITRFQTLLALHRSYLTPGDSSSGWTAGAAAYYVGYLQPRTFLLKYNENGTITDAVDCALDPLSETKCTLKSFTVEKGIYQTSNFRVQPTESIVRFPNITNLCPFGEVFNATRFASVYAWNRKRISNCVADYSVLYNSASFSTFKCYGVSPTKLNDLCFTNVYADSFVIRGDEVRQIAPGQTGKIADYNYKLPDDFTGCVIAWNSNNLDSKVGGNYNYLYRLFRKSNLKPFERDISTEIYQAGSTPCNGVEGFNCYFPLQSYGFQPTNGVGYQPYRVVVLSFELLHAPATVCGPKKSTNLVKNKCVNFNFNGLTGTGVLTESNKKFLPFQQFGRDIADTTDAVRDPQTLEILDITPCSFGGVSVITPGTNTSNQVAVLYQDVNCTEVPVAIHADQLTPTWRVYSTGSNVFQTRAGCLIGAEHVNNSYECDIPIGAGICASYQTQTNSPRRARSVASQSIIAYTMSLGAENSVAYSNNSIAIPTNFTISVTTEILPVSMTKTSVDCTMYICGDSTECSNLLLQYGSFCTQLNRALTGIAVEQDKNTQEVFAQVKQIYKTPPIKDFGGFNFSQILPDPSKPSKRSFIEDLLFNKVTLADAGFIKQYGDCLGDIAARDLICAQKFNGLTVLPPLLTDEMIAQYTSALLAGTITSGWWFGAGAALQIPFAMQMAYRFNGIGVTQNVLYENQKLIANQFNSAIGKIQDSLSSTASALGKLQDVVNQNAQALNTLVKQLSSNFGAISSVLNDILSRLDPPEAEVQIDRLITGRLQSLQTYVTQQLIRAAEIRWSANLAATKMSECVLGQSKRVDFCGKGYHLMSFPQSAPHGVVFLHVTYVPAQEKNFTTAPAICHDGKAHFPREGVFVSNGTHWFVTQRNFYEPQIITTDNTFVSGNCDVVIGIVNNTVYDPLQPELDSFKEELDKYFKNHTSPDVDLGDISGINASVVNIQKEIDRLNEVAKNLNESLIDLQELGKYEQYIKWPWYIWLGFIAGLIAIVMVTIMLCCMTSCCSCLKGCCSCGSCCKFDEDDSEPVLKGVKLHYT

SEQ ID NO: 411 - protein, 1273 aa, Artificial Sequence
  SARS-CoV-2/Guangdong/20SF028/2020__EPI_ISL_403936 spike protein (1-1273)(K986P_V987P_T887W_A1020W)
MFVFLVLLPLVSSQCVNLTTRTQLPPAYTNSFTRGVYYPDKVFRSSVLYSTQDLFLPFFSNVTWFHAIHVSGTNGTKRFDNPVLPFNDGVYFASTEKSNIIRGWIFGTTLDSKTQSLLIVNNATNVVIKVCEFQFCNDPFLGVYYHKNNKSWMESEFRVYSSANNCTFEYVSQPFLMDLEGKQGNFKNLREFVFKNIDGYFKIYSKHTPINLVRDLPQGFSALEPLVDLPIGINITRFQTLLALHRSYLTPGDSSSGWTAGAAAYYVGYLQPRTFLLKYNENGTITDAVDCALDPLSETKCTLKSFTVEKGIYQTSNFRVQPTESIVRFPNITNLCPFGEVFNATRFASVYAWNRKRISNCVADYSVLYNSASFSTFKCYGVSPTKLNDLCFTNVYADSFVIRGDEVRQIAPGQTGKIADYNYKLPDDFTGCVIAWNSNNLDSKVGGNYNYLYRLFRKSNLKPFERDISTEIYQAGSTPCNGVEGFNCYFPLQSYGFQPTNGVGYQPYRVVVLSFELLHAPATVCGPKKSTNLVKNKCVNFNFNGLTGTGVLTESNKKFLPFQQFGRDIADTTDAVRDPQTLEILDITPCSFGGVSVITPGTNTSNQVAVLYQDVNCTEVPVAIHADQLTPTWRVYSTGSNVFQTRAGCLIGAEHVNNSYECDIPIGAGICASYQTQTNSPRRARSVASQSIIAYTMSLGAENSVAYSNNSIAIPTNFTISVTTEILPVSMTKTSVDCTMYICGDSTECSNLLLQYGSFCTQLNRALTGIAVEQDKNTQEVFAQVKQIYKTPPIKDFGGFNFSQILPDPSKPSKRSFIEDLLFNKVTLADAGFIKQYGDCLGDIAARDLICAQKFNGLTVLPPLLTDEMIAQYTSALLAGTITSGWWFGAGAALQIPFAMQMAYRFNGIGVTQNVLYENQKLIANQFNSAIGKIQDSLSSTASALGKLQDVVNQNAQALNTLVKQLSSNFGAISSVLNDILSRLDPPEAEVQIDRLITGRLQSLQTYVTQQLIRAAEIRWSANLAATKMSECVLGQSKRVDFCGKGYHLMSFPQSAPHGVVFLHVTYVPAQEKNFTTAPAICHDGKAHFPREGVFVSNGTHWFVTQRNFYEPQIITTDNTFVSGNCDVVIGIVNNTVYDPLQPELDSFKEELDKYFKNHTSPDVDLGDISGINASVVNIQKEIDRLNEVAKNLNESLIDLQELGKYEQYIKWPWYIWLGFIAGLIAIVMVTIMLCCMTSCCSCLKGCCSCGSCCKFDEDDSEPVLKGVKLHYT

SEQ ID NO: 412 - protein, 1273 aa, Artificial Sequence
  SARS-CoV-2/Shenzhen/SZTH-001/2020__EPI_ISL_406592 spike protein (1-1273)(K986P_V987P_T887W_A1020W)
MFVFLVLLPLVSSQCVNLTTRTQLPPAYTNSFTRGVYYPDKVFRSSVLHSTQDLFLPFFSNVTWFHAIHVSGTNGTKRFDNPVLPFNDGVYFASTEKSNIIRGWIFGTTLDSKTQSLLIVNNATNVVIKVCEFQFCNDPFLGVYYHKNNKSWMESEFRVYSSANNCTFEYVSQPFLMDLEGKQGNFKNLREFVFKNIDGYFKIYSKHTPINLVRDLPQGFSALEPLVDLPIGINITRFQTLLALHRSYLTPGDSSSGWTAGAAAYYVGYLQPRTFLLKYNENGTITDAVDCALDPLSETKCTLKSFTVEKGIYQTSNFRVQPTESIVRFPNITNLCPFGEVFNATRFASVYAWNRKRISNCVADYSVLYNSASFSTFKCYGVSPTKLNDLCFTNVYADSFVIRGDEVRQIAPGQTGKIADYNYKLPDDFTGCVIAWNSNNLDSKVGGNYNYLYRLFRKSNLKPFERDISTEIYQAGSTPCNGVEGFNCYFPLQSYGFQPTNGVGYQPYRVVVLSFELLHAPATVCGPKKSTNLVKNKCVNFNFNGLTGTGVLTESNKKFLPFQQFGRDIADTTDAVRDPQTLEILDITPCSFGGVSVITPGTNTSNQVAVLYQDVNCTEVPVAIHADQLTPTWRVYSTGSNVFQTRAGCLIGAEHVNNSYECDIPIGAGICASYQTQTNSPRRARSVASQSIIAYTMSLGAENSVAYSNNSIAIPTNFTISVTTEILPVSMTKTSVDCTMYICGDSTECSNLLLQYGSFCTQLNRALTGIAVEQDKNTQEVFAQVKQIYKTPPIKDFGGFNFSQILPDPSKPSKRSFIEDLLFNKVTLADAGFIKQYGDCLGDIAARDLICAQKFNGLTVLPPLLTDEMIAQYTSALLAGTITSGWWFGAGAALQIPFAMQMAYRFNGIGVTQNVLYENQKLIANQFNSAIGKIQDSLSSTASALGKLQDVVNQNAQALNTLVKQLSSNFGAISSVLNDILSRLDPPEAEVQIDRLITGRLQSLQTYVTQQLIRAAEIRWSANLAATKMSECVLGQSKRVDFCGKGYHLMSFPQSAPHGVVFLHVTYVPAQEKNFTTAPAICHDGKAHFPREGVFVSNGTHWFVTQRNFYEPQIITTDNTFVSGNCDVLIGIVNNTVYDPLQPELDSFKEELDKYFKNHTSPDVDLGDISGINASVVNIQKEIDRLNEVAKNLNESLIDLQELGKYEQYIKWPWYIWLGFIAGLIAIVMVTIMLCCMTSCCSCLKGCCSCGSCCKFDEDDSGPVLKGVKLHYT

SEQ ID NO: 413 - protein, 1273 aa, Artificial Sequence
  SARS-CoV-2/Shenzhen/SZTH-004/2020__EPI_ISL_406595 spike protein (1-1273)(K986P_V987P_T887W_A1020W)
MFVFLVLLPLVSSQCVNLTTRTQLPPAYTNSFTRGVYYPDKVFRSSVLHSTQDLFLPFFSNVTWFHAIHVSGTNGTKRFDNPVLPFNDGVYFASTEKSNIIRGWIFGTTLDSKTQSLLIVNNATNVVIKVCEFQFCNDPFLGVYYHKNNKSWMESEFRVYSSANNCTFEYVSQPFLMDLEGKQGNFKNLREFVFKNIDGYFKIYSKHTPINLVRDLPQGFSALEPLVDLPIGINITRFQTLLALHRSYLTPGDSSSGWTAGAAAYYVGYLQPRTFLLKYNENGTITDAVDCALDPLSETKCTLKSFTVEKGIYQTSNFRVQPTESIVRFPNITNLCPFGEVFNATRFASVYAWDRKRISNCVAYYSVLYNSASFSTFKCYGVSPTKLNDLCFTNVYADSFVIRGDEVRQIAPGQTGKIADYNYKLPDDFTGCVIAWNSNNLDSKVGGNYNYLYRLFRKSNLKPFERDISTEIYQAGSTPCNGVEGFNCYFPLQSYGFQPTNGVGYQPYRVVVLSFELLHAPATVCGPKKSTNLVKNKCVNFNFNGLTGTGVLTESNKKFLPFQQFGRDIADTTDAVRDPQTLEILDITPCSFGGVSVITPGTNTSNQVAVLYQDVNCTEVPVAIHADQLTPTWRVYSTGSNVFQTRAGCLIGAEHVNNSYECDIPIGAGICASYQTQTNSPRRARSVASQSIIAYTMSLGAENSVAYSNNSIAIPTNFTISVTTEILPVSMTKTSVDCTMYICGDSTECSNLLLQYGSFCTQLNRALTGIAVEQDKNTQEVFAQVKQIYKTPPIKDFGGFNFSQILPDPSKPSKRSFIEDLLFNKVTLADAGFIKQYGDCLGDIAARDLICAQKFNGLTVLPPLLTDEMIAQYTSALLAGTITSGWWFGAGAALQIPFAMQMAYRFNGIGVTQNVLYENQKLIANQFNSAIGKIQDSLSSTASALGKLQDVVNQNAQALNTLVKQLSSNFGAISSVLNDILSRLDPPEAEVQIDRLITGRLQSLQTYVTQQLIRAAEIRWSANLAATKMSECVLGQSKRVDFCGKGYHLMSFPQSAPHGVVFLHVTYVPAQEKNFTTAPAICHDGKAHFPREGVFVSNGTHWFVTQRNFYEPQIITTDNTFVSGNCDVVIGIVNNTVYDPLQPELDSFKEELDKYFKNHTSPDVDLGDISGINASVVNIQKEIDRLNEVAKNLNESLIDLQELGKYEQYIKWPWYIWLGFIAGLIAIVMVTIMLCCMTSCCSCLKGCCSCGSCCKFDEDDSEPVLKGVKLHYT

SEQ ID NO: 414 - protein, 1273 aa, Artificial Sequence
  SARS-CoV-2/France/IDF0372/2020__EPI_ISL_406596 spike protein (1-1273)(K986P_V987P_T887W_A1020W)
MFVFLVLLPLVSSQCVNLTTRTQLPPAYTNSFTRGVYYPDKVFRSSVLHSTQDLFLPFFSNVTWFHAIHVSGTNGTKRFDNPVLPFNDGVYFASTEKSNIIRGWIFGTTLDSKTQSLLIVNNATNVVIKVCEFQFCNDPFLGVYYHKNNKSWMESEFRVYSSANNCTFEYVSQPFLMDLEGKQGNFKNLREFVFKNIDGYFKIYSKHTPINLVRDLPQGFSALEPLVDLPIGINITRFQTLLALHRSYLTPGDSSSGWTAGAAAYYVGYLQPRTFLLKYNENGTITDAVDCALDPLSETKCTLKSFTVEKGIYQTSNFRVQPTESIVRFPNITNLCPFGEVFNATRFASVYAWNRKRISNCVADYSFLYNSASFSTFKCYGVSPTKLNDLCFTNVYADSFVIRGDEVRQIAPGQTGKIADYNYKLPDDFTGCVIAWNSNNLDSKVGGNYNYLYRLFRKSNLKPFERDISTEIYQAGSTPCNGVEGFNCYFPLQSYGFQPTNGVGYQPYRVVVLSFELLHAPATVCGPKKSTNLVKNKCVNFNFNGLTGTGVLTESNKKFLPFQQFGRDIADTTDAVRDPQTLEILDITPCSFGGVSVITPGTNTSNQVAVLYQDVNCTEVPVAIHADQLTPTWRVYSTGSNVFQTRAGCLIGAEHVNNSYECDIPIGAGICASYQTQTNSPRRARSVASQSIIAYTMSLGAENSVAYSNNSIAIPTNFTISVTTEILPVSMTKTSVDCTMYICGDSTECSNLLLQYGSFCTQLNRALTGIAVEQDKNTQEVFAQVKQIYKTPPIKDFGGFNFSQILPDPSKPSKRSFIEDLLFNKVTLADAGFIKQYGDCLGDIAARDLICAQKFNGLTVLPPLLTDEMIAQYTSALLAGTITSGWWFGAGAALQIPFAMQMAYRFNGIGVTQNVLYENQKLIANQFNSAIGKIQDSLSSTASALGKLQDVVNQNAQALNTLVKQLSSNFGAISSVLNDILSRLDPPEAEVQIDRLITGRLQSLQTYVTQQLIRAAEIRWSANLAATKMSECVLGQSKRVDFCGKGYHLMSFPQSAPHGVVFLHVTYVPAQEKNFTTAPAICHDGKAHFPREGVFVSNGTHWFVTQRNFYEPQIITTDNTFVSGNCDVVIGIVNNTVYDPLQPELDSFKEELDKYFKNHTSPDVDLGDISGINASVVNIQKEIDRLNEVAKNLNESLIDLQELGKYEQYIKWPWYIWLGFIAGLIAIVMVTIMLCCMTSCCSCLKGCCSCGSCCKFDEDDSEPVLKGVKLHYT

SEQ ID NO: 415 - protein, 1273 aa, Artificial Sequence
  SARS-CoV-2/Australia/VIC01/2020__EPI_ISL_406844 spike protein (1-1273)(K986P_V987P_T887W_A1020W)
MFVFLVLLPLVSSQCVNLTTRTQLPPAYTNSFTRGVYYPDKVFRSSVLHSTQDLFLPFFSNVTWFHAIHVSGTNGTKRFDNPVLPFNDGVYFASTEKSNIIRGWIFGTTLDSKTQSLLIVNNATNVVIKVCEFQFCNDPFLGVYYHKNNKSWMESEFRVYSSANNCTFEYVSQPFLMDLEGKQGNFKNLREFVFKNIDGYFKIYSKHTPINLVRDLPQGFSALEPLVDLPIGINITRFQTLLALHRRYLTPGDSSSGWTAGAAAYYVGYLQPRTFLLKYNENGTITDAVDCALDPLSETKCTLKSFTVEKGIYQTSNFRVQPTESIVRFPNITNLCPFGEVFNATRFASVYAWNRKRISNCVADYSVLYNSASFSTFKCYGVSPTKLNDLCFTNVYADSFVIRGDEVRQIAPGQTGKIADYNYKLPDDFTGCVIAWNSNNLDSKVGGNYNYLYRLFRKSNLKPFERDISTEIYQAGSTPCNGVEGFNCYFPLQSYGFQPTNGVGYQPYRVVVLSFELLHAPATVCGPKKSTNLVKNKCVNFNFNGLTGTGVLTESNKKFLPFQQFGRDIADTTDAVRDPQTLEILDITPCSFGGVSVITPGTNTSNQVAVLYQDVNCTEVPVAIHADQLTPTWRVYSTGSNVFQTRAGCLIGAEHVNNSYECDIPIGAGICASYQTQTNSPRRARSVASQSIIAYTMSLGAENSVAYSNNSIAIPTNFTISVTTEILPVSMTKTSVDCTMYICGDSTECSNLLLQYGSFCTQLNRALTGIAVEQDKNTQEVFAQVKQIYKTPPIKDFGGFNFSQILPDPSKPSKRSFIEDLLFNKVTLADAGFIKQYGDCLGDIAARDLICAQKFNGLTVLPPLLTDEMIAQYTSALLAGTITSGWWFGAGAALQIPFAMQMAYRFNGIGVTQNVLYENQKLIANQFNSAIGKIQDSLSSTASALGKLQDVVNQNAQALNTLVKQLSSNFGAISSVLNDILSRLDPPEAEVQIDRLITGRLQSLQTYVTQQLIRAAEIRWSANLAATKMSECVLGQSKRVDFCGKGYHLMSFPQSAPHGVVFLHVTYVPAQEKNFTTAPAICHDGKAHFPREGVFVSNGTHWFVTQRNFYEPQIITTDNTFVSGNCDVVIGIVNNTVYDPLQPELDSFKEELDKYFKNHTSPDVDLGDISGINASVVNIQKEIDRLNEVAKNLNESLIDLQELGKYEQYIKWPWYIWLGFIAGLIAIVMVTIMLCCMTSCCSCLKGCCSCGSCCKFDEDDSEPVLKGVKLHYT

SEQ ID NO: 416 - protein, 1273 aa, Artificial Sequence
  SARS-CoV-2/Germany/BavPat1/2020__EPI_ISL_406862 spike protein (1-1273)(K986P_V987P_T887W_A1020W)
MFVFLVLLPLVSSQCVNLTTRTQLPPAYTNSFTRGVYYPDKVFRSSVLHSTQDLFLPFFSNVTWFHAIHVSGTNGTKRFDNPVLPFNDGVYFASTEKSNIIRGWIFGTTLDSKTQSLLIVNNATNVVIKVCEFQFCNDPFLGVYYHKNNKSWMESEFRVYSSANNCTFEYVSQPFLMDLEGKQGNFKNLREFVFKNIDGYFKIYSKHTPINLVRDLPQGFSALEPLVDLPIGINITRFQTLLALHRSYLTPGDSSSGWTAGAAAYYVGYLQPRTFLLKYNENGTITDAVDCALDPLSETKCTLKSFTVEKGIYQTSNFRVQPTESIVRFPNITNLCPFGEVFNATRFASVYAWNRKRISNCVADYSVLYNSASFSTFKCYGVSPTKLNDLCFTNVYADSFVIRGDEVRQIAPGQTGKIADYNYKLPDDFTGCVIAWNSNNLDSKVGGNYNYLYRLFRKSNLKPFERDISTEIYQAGSTPCNGVEGFNCYFPLQSYGFQPTNGVGYQPYRVVVLSFELLHAPATVCGPKKSTNLVKNKCVNFNFNGLTGTGVLTESNKKFLPFQQFGRDIADTTDAVRDPQTLEILDITPCSFGGVSVITPGTNTSNQVAVLYQGVNCTEVPVAIHADQLTPTWRVYSTGSNVFQTRAGCLIGAEHVNNSYECDIPIGAGICASYQTQTNSPRRARSVASQSIIAYTMSLGAENSVAYSNNSIAIPTNFTISVTTEILPVSMTKTSVDCTMYICGDSTECSNLLLQYGSFCTQLNRALTGIAVEQDKNTQEVFAQVKQIYKTPPIKDFGGFNFSQILPDPSKPSKRSFIEDLLFNKVTLADAGFIKQYGDCLGDIAARDLICAQKFNGLTVLPPLLTDEMIAQYTSALLAGTITSGWWFGAGAALQIPFAMQMAYRFNGIGVTQNVLYENQKLIANQFNSAIGKIQDSLSSTASALGKLQDVVNQNAQALNTLVKQLSSNFGAISSVLNDILSRLDPPEAEVQIDRLITGRLQSLQTYVTQQLIRAAEIRWSANLAATKMSECVLGQSKRVDFCGKGYHLMSFPQSAPHGVVFLHVTYVPAQEKNFTTAPAICHDGKAHFPREGVFVSNGTHWFVTQRNFYEPQIITTDNTFVSGNCDVVIGIVNNTVYDPLQPELDSFKEELDKYFKNHTSPDVDLGDISGINASVVNIQKEIDRLNEVAKNLNESLIDLQELGKYEQYIKWPWYIWLGFIAGLIAIVMVTIMLCCMTSCCSCLKGCCSCGSCCKFDEDDSEPVLKGVKLHYT

SEQ ID NO: 417 - protein, 1273 aa, Artificial Sequence
  SARS-CoV-2/Wuhan/HBCDC-HB-02/2020__EPI_ISL_412978 spike protein (1-1273)(K986P_V987P_T887W_A1020W)
MFVFLVLLPLVSSQCVNLTTRTQLPPAYTNSFTRGVYYPDKVFRSSVLHSTQDLFLPFFSNVTWFHAIHVSGTNGTKRFDNPVLPFNDGVYFASTEKSNIIRGWIFGTTLDSKTQSLLIVNNATNVVIKVCEFQFCNDPFLGVYYHKNNKSWMESEFRVYSSANNCTFEYVSQPFLMDLEGKQGNFKNLREFVFKNIDGYFKIYSKHTPINLVRDLPQGFSALEPLVDLPIGINITRFQTLLALHRSYLTPGDSSSGWTAGAAAYYVGYLQPRTFLLKYNENGTITDAVDCALDPLSETKCTLKSFTVEKGIYQTSNFRVQPTESIVRFPNITNLCPFGEVFNATRFASVYAWNRKRISNCVADYSVLYNSASFSTFKCYGVSPTKLNDLCFTNVYADSFVIRGDEVRQIAPGQTGKIADYNYKLPDDFTGCVIAWNSNNLDSKVGGNYNYLYRLFRKSNLKPFERDISTEIYQAGSTPCNGVEGFNCYFPLQSYGFQPTNGVGYQPYRVVVLSFELLHAPATVCGPKKSTNLVKNKCVNFNFNGLTGTGVLTESNKKFLPFQQFGRDIADTTDAVRDPQTLEILDITPCSFGGVSVITPGTNTSNQVAVLYQDVNCTEVPVAIHADQLTPTWRVYSTGSNVFQTRAGCLIGAEHVNNSYECDIPIGAGICASYQTQTNSPRRARSVASQSIIAYTMSLGAENSVAYSNNSIAIPTNFTISVTTEILPVSMTKTSVDCTMYICGDSTECSNFLLQYGSFCTQLNRALTGIAVEQDKNTQEVFAQVKQIYKTPPIKDFGGFNFSQILPDPSKPSKRSFIEDLLFNKVTLADAGFIKQYGDCLGDIAARDLICAQKFNGLTVLPPLLTDEMIAQYTSALLAGTITSGWWFGAGAALQIPFAMQMAYRFNGIGVTQNVLYENQKLIANQFNSAIGKIQDSLSSTASALGKLQDVVNQNAQALNTLVKQLSSNFGAISSVLNDILSRLDPPEAEVQIDRLITGRLQSLQTYVTQQLIRAAEIRWSANLAATKMSECVLGQSKRVDFCGKGYHLMSFPQSAPHGVVFLHVTYVPAQEKNFTTAPAICHDGKAHFPREGVFVSNGTHWFVTQRNFYEPQIITTDNTFVSGNCDVVIGIVNNTVYDPLQPELDSFKEELDKYFKNHTSPDVDLGDISGINASVVNIQKEIDRLNEVAKNLNESLIDLQELGKYEQYIKWPWYIWLGFIAGLIAIVMVTIMLCCMTSCCSCLKGCCSCGSCCKFDEDDSEPVLKGVKLHYT

SEQ ID NO: 418 - protein, 1273 aa, Artificial Sequence
  SARS-CoV-2/Australia/QLD02/2020__EPI_ISL_407896 spike protein (1-1273)(K986P_V987P_T887W_A1020W)
MFVFLVLLPLVSSQCVNLTTRTQLPPAYTNSFTRGVYYPDKVFRSSVLHSTQDLFLPFFSNVTWFHAIHVSGTNGTKRFDNPVLPFNDGVYFASTEKSNIIRGWIFGTTLDSKTQSLLIVNNATNVVIKVCEFQFCNDPFLGVYYHKNNKSWMESEFRVYSSANNCTFEYVSQPFLMDLEGKQGNFKNLREFVFKNIDGYFKIYSKHTPINLVRDLPQGFSALEPLVDLPIGINITRFQTLLALHRSYLTPGDSSSGWTAGAAAYYVGYLQPRTFLLKYNENGTITDAVDCALDPLSETKCTLKSFTVEKGIYQTSNFRVQPTESIVRFPNITNLCPFGEVFNATRFASVYAWNRKRISNCVADYSVLYNSASFSTFKCYGVSPTKLNDLCFTNVYADSFVIRGDEVRQIAPGQTGKIADYNYKLPDDFTGCVIAWNSNNLDSKVGGNYNYLYRLFRKSNLKPFERDISTEIYQAGSTPCNGVEGFNCYFPLQSYGFQPTNGVGYQPYRVVVLSFELLHAPATVCGPKKSTNLVKNKCVNFNFNGLTGTGVLTESNKKFLPFQQFGRDIADTTDAVRDPQTLEILDITPCSFGGVSVITPGTNTSNQVAVLYQDVNCTEVPVAIHADQLTPTWRVYSTGSNVFQTRAGCLIGAEHVNNSYECDIPIGAGICASYQTQTNSPRRARSVASQSIIAYTMSLGAENSVAYSNNSIAIPTNFTISVTTEILPVSMTKTSVDCTMYICGDSTECSNLLLQYGSFCTQLNRALTGIAVEQDKNTQEVFAQVKQIYKTPPIKDFGGFNFSQILPDPSKPSKRSFIEDLLFNKVTLADAGFIKQYGDCLGDIAARDLICAQKFNGLTVLPPLLTDEMIAQYTSALLAGTITSGWWFGAGAALQIPFAMQMAYRFNGIGVTQNVLYENQKLIANQFNSAIGKIQDSLSSTASALGKLQDVVNQNAQALNTLVKQLSSNFGAISSVLNDILSRLDPPEAEVQIDRLITGRLQSLQTYVTQQLIRAAEIRWSANLAATKMSECVLGQSKRVDFCGKGYHLMSFPQSAPHGVVFLHVTYVPAQEKNFTTAPAICHDGKAHFPREGVFVSNGTHWFVTQRNFYEPQIITTDNTFVSGNCDVVIGIVNNTVYDPLQLELDSFKEELDKYFKNHTSPDVDLGDISGINASVVNIQKEIDRLNEVAKNLNESLIDLQELGKYEQYIKWPWYIWLGFIAGLIAIVMVTIMLCCMTSCCSCLKGCCSCGSCCKFDEDDSEPVLKGVKLHYT

SEQ ID NO: 419 - protein, 1273 aa, Artificial Sequence
  SARS-CoV-2/India/1-31/2020__EPI_ISL_413523 spike protein (1-1273)(K986P_V987P_T887W_A1020W)
MFVFLVLLPLVSSQCVNLTTRTQLPPAYTNSFTRGVYYPDKVFRSSVLHSTQDLFLPFFSNVTWFHAIHVSGTNGTKRFDNPVLPFNDGVYFASTEKSNIIRGWIFGTTLDSKTQSLLIVNNATNVVIKVCEFQFCNDPFLGVYYHKNNKSWMESEFRVYSSANNCTFEYVSQPFLMDLEGKQGNFKNLREFVFKNIDGYFKIYSKHTPINLVRDLPQGFSALEPLVDLPIGINITRFQTLLALHRSYLTPGDSSSGWTAGAAAYYVGYLQPRTFLLKYNENGTITDAVDCALDPLSETKCTLKSFTVEKGIYQTSNFRVQPTESIVRFPNITNLCPFGEVFNATRFASVYAWNRKRISNCVADYSVLYNSASFSTFKCYGVSPTKLNDLCFTNVYADSFVIRGDEVRQIAPGQTGKIADYNYKLPDDFTGCVIAWNSNNLDSKVGGNYNYLYRLFRKSNLKPFERDISTEIYQAGSTPCNGVEGFNCYFPLQSYGFQPTNGVGYQPYRVVVLSFELLHAPATVCGPKKSTNLVKNKCVNFNFNGLTGTGVLTESNKKFLPFQQFGRDIADTTDAVRDPQTLEILDITPCSFGGVSVITPGTNTSNQVAVLYQDVNCTEVPVAIHADQLTPTWRVYSTGSNVFQTRAGCLIGAEHVNNSYECDIPIGAGICASYQTQTNSPRRARSVASQSIIAYTMSLGAENSVAYSNNSIAIPTNFTISVTTEILPVSMTKTSVDCTMYICGDSTECSNLLLQYGSFCTQLNRALTGIAVEQDKNTQEVFAQVKQIYKTPPIKDFGGFNFSQILPDPSKPSKRSFIEDLLFNKVTLADAGFIKQYGDCLGDIAARDLICAQKFNGLTVLPPLLTDEMIAQYTSALLAGTITSGWWFGAGAALQIPFAMQMAYRFNGIGVTQNVLYENQKLIANQFNSVIGKIQDSLSSTASALGKLQDVVNQNAQALNTLVKQLSSNFGAISSVLNDILSRLDPPEAEVQIDRLITGRLQSLQTYVTQQLIRAAEIRWSANLAATKMSECVLGQSKRVDFCGKGYHLMSFPQSAPHGVVFLHVTYVPAQEKNFTTAPAICHDGKAHFPREGVFVSNGTHWFVTQRNFYEPQIITTDNTFVSGNCDVVIGIVNNTVYDPLQPELDSFKEELDKYFKNHTSPDVDLGDISGINASVVNIQKEIDRLNEVAKNLNESLIDLQELGKYEQYIKWPWYIWLGFIAGLIAIVMVTIMLCCMTSCCSCLKGCCSCGSCCKFDEDDSEPVLKGVKLHYT

SEQ ID NO: 420 - protein, 1273 aa, Artificial Sequence
  SARS-CoV-2/Guangdong/GD2020087-P0008/2020__EPI_ISL_413863 spike protein (1-1273)(K986P_V987P_T887W_A1020W)
MFVFLVLLPLVSSQCVNLTTRTQLPPAYTNSFTRGVYYPDKVFRSSVLHSTQDLFLPFFSNVTWFHAIHVSGTNGTKRFDNPVLPFNDGVYFASTEKSNIIRGWIFGTTLDSKTQSLLIVNNATNVVIKVCEFQFCNDPFLGVYYHKNNKSWMESEFRVYSSANNCTFEYVSQPFLMDLEGKQGNFKNLREFVFKNIDGYFKIYSKHTPINLVRDLPQGFSALEPLVDLPIGINITRFQTLLALHRSYLTPGDSSSGWTAGAAAYYVGYLQPRTFLLKYNENGTITDAVDCALDPLSETKCTLKSFTVEKGIYQTSNFRVQPTESIVRFPNITNLCPFGEVFNATRFASVYAWNRKRISNCVADYSVLYNSASFSTFKCYGVSPTKLNDLCFTNVYADSFVIRGDEVREIAPGQTGKIADYNYKLPDDFTGCVIAWNSNNLDSKVGGNYNYLYRLFRKSNLKPFERDISTEIYQAGSTPCNGVEGFNCYFPLQSYGFQPTNGVGYQPYRVVVLSFELLHAPATVCGPKKSTNLVKNKCVNFNFNGLTGTGVLTESNKKFLPFQQFGRDIADTTDAVRDPQTLEILDITPCSFGGVSVITPGTNTSNQVAVLYQDVNCTEVPVAIHADQLTPTWRVYSTGSNVFQTRAGCLIGAEHVNNSYECDIPIGAGICASYQTQTNSPRRARSVASQSIIAYTMSLGAENSVAYSNNSIAIPTNFTISVTTEILPVSMTKTSVDCTMYICGDSTECSNLLLQYGSFCTQLNRALTGIAVEQDKNTQEVFAQVKQIYKTPPIKDFGGFNFSQILPDPSKPSKRSFIEDLLFNKVTLADAGFIKQYGDCLGDIAARDLICAQKFNGLTVLPPLLTDEMIAQYTSALLAGTITSGWWFGAGAALQIPFAMQMAYRFNGIGVTQNVLYENQKLIANQFNSAIGKIQDSLSSTASALGKLQDVVNQNAQALNTLVKQLSSNFGAISSVLNDILSRLDPPEAEVQIDRLITGRLQSLQTYVTQQLIRAAEIRWSANLAATKMSECVLGQSKRVDFCGKGYHLMSFPQSAPHGVVFLHVTYVPAQEKNFTTAPAICHDGKAHFPREGVFVSNGTHWFVTQRNFYEPQIITTDNTFVSGNCDVVIGIVNNTVYDPLQPELDSFKEELDKYFKNHTSPDVDLGDISGINASVVNIQKEIDRLNEVAKNLNESLIDLQELGKYEQYIKWPWYIWLGFIAGLIAIVMVTIMLCCMTSCCSCLKGCCSCGSCCKFDEDDSEPVLKGVKLHYT

SEQ ID NO: 421 - protein, 1273 aa, Artificial Sequence
  SARS-CoV-2/Sweden/01/2020__EPI_ISL_411951 spike protein (1-1273)(K986P_V987P_T887W_A1020W)
MFVFLVLLPLVSSQCVNLTTRTQLPPAYTNSFTRGVYYPDKVFRSSVLHSTQDLFLPFFSNVTWFHAIHVSGTNGTKRFDNPVLPFNDGVYFASTEKSNIIRGWIFGTTLDSKTQSLLIVNNATNVVIKVCEFQFCNDPFLGVYYHKNNKSWMESEFRVYSSANNCTFEYVSQPFLMDLEGKQGNFKNLREFVFKNIDGYFKIYSKHTPINLVRDLPQGFSALEPLVDLPIGINITRFQTLLALHRSYLTPGDSSSGWTAGAAAYYVGYLQPRTFLLKYNENGTITDAVDCALDPLSETKCTLKSFTVEKGIYQTSNFRVQPTESIVRFPNITNLCPFGEVFNATRFASVYAWNRKRISNCVADYSVLYNSASFSTFKCYGVSPTKLNDLCFTNVYADSFVIRGDEVRQIAPGQTGKIADYNYKLPDDFTGCVIAWNSNNLDSKVGGNYNYLYRLFRKSNLKPFERDISTEIYQAGSTPCNGVEGFNCYFPLQSYGFQPTNGVGYQPYRVVVLSFELLHAPATVCGPKKSTNLVKNKCVNFNFNGLTGTGVLTESNKKFLPFQQFGRDIADTTDAVRDPQTLEILDITPCSFGGVSVITPGTNTSNQVAVLYQDVNCTEVPVAIHADQLTPTWRVYSTGSNVFQTRAGCLIGAEHVNNSYECDIPIGAGICASYQTQTNSPRRARSVASQSIIAYTMSLGAENSVAYSNNSIAIPTNFTISVTTEILPVSMTKTSVDCTMYICGDSTECSNLLLQYGSFCTQLNRALTGIAVEQDKNTQEVFAQVKQIYKTPPIKDCGGFNFSQILPDPSKPSKRSFIEDLLFNKVTLADAGFIKQYGDCLGDIAARDLICAQKFNGLTVLPPLLTDEMIAQYTSALLAGTITSGWWFGAGAALQIPFAMQMAYRFNGIGVTQNVLYENQKLIANQFNSAIGKIQDSLSSTASALGKLQDVVNQNAQALNTLVKQLSSNFGAISSVLNDILSRLDPPEAEVQIDRLITGRLQSLQTYVTQQLIRAAEIRWSANLAATKMSECVLGQSKRVDFCGKGYHLMSFPQSAPHGVVFLHVTYVPAQEKNFTTAPAICHDGKAHFPREGVFVSNGTHWFVTQRNFYEPQIITTDNTFVSGNCDVVIGIVNNTVYDPLQPELDSFKEELDKYFKNHTSPDVDLGDISGINASVVNIQKEIDRLNEVAKNLNESLIDLQELGKYEQYIKWPWYIWLGFIAGLIAIVMVTIMLCCMTSCCSCLKGCCSCGSCCKFDEDDSEPVLKGVKLHYT

SEQ ID NO: 422 - protein, 1273 aa, Artificial Sequence
  SARS-CoV-2/Tianmen/HBCDC-HB-07/2020__EPI_ISL_412983 spike protein (1-1273)(K986P_V987P_T887W_A1020W)
MFVFLVLLPLVSSQCVNLTTRTQLPPAYTNSFTRGVYYPDKVFRSSVLHSTQDLFLPFFSNVTWFHAIHVSGTNGTKRFDNPVLPFNDGVYFASTEKSNIIRGWIFGTTLDSKTQSLLIVNNATNVVIKVCEFQFCNDPFLGVYYHKNNKSWMESEFRVYSSANNCTFEYVSQPFLMDLEGKQGNFKNLREFVFKNIDGYFKIYSKHTPINLVRDLPQGFSALEPLVDLPIGINITRFQTLLALHRSYLTPGDSSSGWTAGAAAYYVGYLQPRTFLLKYNENGTITDAVDCALDPLSETKCTLKSFTVEKGIYQTSNFRVQPTESIVRFPNITNLCPFGEVFNATRFASVYAWNRKRISNCVADYSVLYNSASFSTFKCYGVSPTKLNDLCFTNVYADSFVIRGDEVRQIAPGQTGKIADYNYKLPDDFTGCVIAWNSNNLDSKVGGNYNYLYRLFRKSNLKPFERDISTEIYQAGSTPCNGVEGFNCYFPLQSYGFQPTNGVGYQPYRVVVLSFELLHAPATVCGPKKSTNLVKNKCVNFNFNGLTGTGVLTESNKKFLPFQQFGRDIADTTDAVRDPQTLEILDITPCSFGGVSVITPGTNTSNQVAVLYQDLNCTEVPVAIHADQLTPTWRVYSTGSNVFQTRAGCLIGAEHVNNSYECDIPIGAGICASYQTQTNSPRRARSVASQSIIAYTMSLGAENSVAYSNNSIAIPTNFTISVTTEILPVSMTKTSVDCTMYICGDSTECSNLLLQYGSFCTQLNRALTGIAVEQDKNTQEVFAQVKQIYKTPPIKDFGGFNFSQILPDPSKPSKRSFIEDLLFNKVTLADAGFIKQYGDCLGDIAARDLICAQKFNGLTVLPPLLTDEMIAQYTSALLAGTITSGWWFGAGAALQIPFAMQMAYRFNGIGVTQNVLYENQKLIANQFNSAIGKIQDSLSSTASALGKLQDVVNQNAQALNTLVKQLSSNFGAISSVLNDILSRLDPPEAEVQIDRLITGRLQSLQTYVTQQLIRAAEIRWSANLAATKMSECVLGQSKRVDFCGKGYHLMSFPQSAPHGVVFLHVTYVPAQEKNFTTAPAICHDGKAHFPREGVFVSNGTHWFVTQRNFYEPQIITTDNTFVSGNCDVVIGIVNNTVYDPLQPELDSFKEELDKYFKNHTSPDVDLGDISGINASVVNIQKEIDRLNEVAKNLNESLIDLQELGKYEQYIKWPWYIWLGFIAGLIAIVMVTIMLCCMTSCCSCLKGCCSCGSCCKFDEDDSEPVLKGVKLHYT

SEQ ID NO: 423 - protein, 1273 aa, Artificial Sequence
  SARS-CoV-2/Hong Kong/case42_VM20002493/2020__EPI_ISL_414527 spike protein (1-1273)(K986P_V987P_T887W_A1020W)
MFVFLVLLPLVSSQCVNLTTRTQLPPAYTNSFTRGVYYPDKVFRSSVLHSTQDLFLPFFSNVTWFHAIHVSGTNGTKRFDNPVLPFNDGVYFASTEKSNIIRGWIFGTTLDSKTQSLLIVNNATNVVIKVCEFQFCNDPFLGVYYHKNNKSWMESEFRVYSSANNCTFEYVSQPFLMDLEGKQGNFKNLREFVFKNIDGYFKIYSKHTPINLVRDLPQGFSALEPLVDLPIGINITRFQTLLALHRSYLTPGDSSSGWTAGAAAYYVGYLQPRTFLLKYNENGTITDAVDCALDPLSETKCTLKSFTVEKGIYQTSNFRVQPTESIVRFPNITNLCPFGEVFNATRFASVYAWNRKRISNCVADYSVLYNSASFSTFKCYGVSPTKLNDLCFTNVYADSFVIRGDEVRQIAPGQTGKIADYNYKLPDDFTGCVIAWNSNNLDSKVGGNYNYLYRLFRKSNLKPFERDISTEIYQAGSTPCNGVEGFNCYFPLQSYGFQPTNGVGYQPYRVVVLSFELLHAPATVCGPKKSTNLVKNKCVNFNFNGLTGTGVLTESNKKFLPFQQFGRDIADTTDAVRDPQTLEILDITPCSFGGVSVITPGTNTSNQVAVLYQDVNCTEVPVAIHADQLTPTWRVYSTGSNVFQTRAGCLIGAEHVNNSYECDIPIGAGICASYQTQTNSPRRARSVASQSIIAYTMSLGAENSVAYSNNSIAIPTNFAISVTTEILPVSMTKTSVDCTMYICGDSTECSNLLLQYGSFCTQLNRALTGIAVEQDKNTQEVFAQVKQIYKTPPIKDFGGFNFSQILPDPSKPSKRSFIEDLLFNKVTLADAGFIKQYGDCLGDIAARDLICAQKFNGLTVLPPLLTDEMIAQYTSALLAGTITSGWWFGAGAALQIPFAMQMAYRFNGIGVTQNVLYENQKLIANQFNSAIGKIQDSLSSTASALGKLQDVVNQNAQALNTLVKQLSSNFGAISSVLNDILSRLDPPEAEVQIDRLITGRLQSLQTYVTQQLIRAAEIRWSANLAATKMSECVLGQSKRVDFCGKGYHLMSFPQSAPHGVVFLHVTYVPAQEKNFTTAPAICHDGKAHFPREGVFVSNGTHWFVTQRNFYEPQIITTDNTFVSGNCDVVIGIVNNTVYDPLQPELDSFKEELDKYFKNHTSPDVDLGDISGINASVVNIQKEIDRLNEVAKNLNESLIDLQELGKYEQYIKWPWYIWLGFIAGLIAIVMVTIMLCCMTSCCSCLKGCCSCGSCCKFDEDDSEPVLKGVKLHYT

SEQ ID NO: 424 - protein, 1273 aa, Artificial Sequence
  SARS-CoV-2/USA/CruiseA-23/2020__EPI_ISL_414482 spike protein (1-1273)(K986P_V987P_T887W_A1020W)
MFVFLVLLPLVSSQCVNLTTRTQLPPAYTNSFTRGVYYPDKVFRSSVLHSTQDLFLPFFSNVTWFHAIHVSGTNGTKRFDNPVLPFNDGVYFASTEKSNIIRGWIFGTTLDSKTQSLLIVNNATNVVIKVCEFQFCNDPFLGVYYHKNNKSWMESEFRVYSSANNCTFEYVSQPFLMDLEVKQGNFKNLREFVFKNIDGYFKIYSKHTPINLVRDLPQGFSALEPLVDLPIGINITRFQTLLALHRSYLTPGDSSSGWTAGAAAYYVGYLQPRTFLLKYNENGTITDAVDCALDPLSETKCTLKSFTVEKGIYQTSNFRVQPTESIVRFPNITNLCPFGEVFNATRFASVYAWNRKRISNCVADYSVLYNSASFSTFKCYGVSPTKLNDLCFTNVYADSFVIRGDEVRQIAPGQTGKIADYNYKLPDDFTGCVIAWNSNNLDSKVGGNYNYLYRLFRKSNLKPFERDISTEIYQAGSTPCNGVEGFNCYFPLQSYGFQPTNGVGYQPYRVVVLSFELLHAPATVCGPKKSTNLVKNKCVNFNFNGLTGTGVLTESNKKFLPFQQFGRDIADTTDAVRDPQTLEILDITPCSFGGVSVITPGTNTSNQVAVLYQDVNCTEVPVAIHADQLTPTWRVYSTGSNVFQTRAGCLIGAEHVNNSYECDIPIGAGICASYQTQTNSPRRARSVASQSIIAYTMSLGAENSVAYSNNSIAIPTNFTISVTTEILPVSMTKTSVDCTMYICGDSTECSNLLLQYGSFCTQLNRALTGIAVEQDKNTQEVFAQVKQIYKTPPIKDFGGFNFSQILPDPSKPSKRSFIEDLLFNKVTLADAGFIKQYGDCLGDIAARDLICAQKFNGLTVLPPLLTDEMIAQYTSALLAGTITSGWWFGAGAALQIPFAMQMAYRFNGIGVTQNVLYENQKLIANQFNSAIGKIQDSLSSTASALGKLQDVVNQNAQALNTLVKQLSSNFGAISSVLNDILSRLDPPEAEVQIDRLITGRLQSLQTYVTQQLIRAAEIRWSANLAATKMSECVLGQSKRVDFCGKGYHLMSFPQSAPHGVVFLHVTYVPAQEKNFTTAPAICHDGKAHFPREGVFVSNGTHWFVTQRNFYEPQIITTDNTFVSGNCDVVIGIVNNTVYDPLQPELDSFKEELDKYFKNHTSPDVDLGDISGINASVVNIQKEIDRLNEVAKNLNESLIDLQELGKYEQYIKWPWYIWLGFIAGLIAIVMVTIMLCCMTSCCSCLKGCCSCGSCCKFDEDDSEPVLKGVKLHYT

SEQ ID NO: 425 - protein, 1273 aa, Artificial Sequence
  SARS-CoV-2/Hong Kong/case85_VM20002868/2020__EPI_ISL_414519 spike protein (1-1273)(K986P_V987P_T887W_A1020W)
MFVFLVLVPLVSSQCVNLTTRTQLPPAYTNSFTRGVYYPDKVFRSSVLHSTQDLFLPFFSNVTWFHAIHVSGTNGTKRFDNPVLPFNDGVYFASTEKSNIIRGWIFGTTLDSKTQSLLIVNNATNVVIKVCEFQFCNDPFLGVYYHKNNKSWMESEFRVYSSANNCTFEYVSQPFLMDLEGKQGNFKNLREFVFKNIDGYFKIYSKHTPINLVRDLPQGFSALEPLVDLPIGINITRFQTLLALHRSYLTPGDSSSGWTAGAAAYYVGYLQPRTFLLKYNENGTITDAVDCALDPLSETKCTLKSFTVEKGIYQTSNFRVQPTESIVRFPNITNLCPFGEVFNATRFASVYAWNRKRISNCVADYSVLYNSASFSTFKCYGVSPTKLNDLCFTNVYADSFVIRGDEVRQIAPGQTGKIADYNYKLPDDFTGCVIAWNSNNLDSKVGGNYNYLYRLFRKSNLKPFERDISTEIYQAGSTPCNGVEGFNCYFPLQSYGFQPTNGVGYQPYRVVVLSFELLHAPATVCGPKKSTNLVKNKCVNFNFNGLTGTGVLTESNKKFLPFQQFGRDIADTTDAVRDPQTLEILDITPCSFGGVSVITPGTNTSNQVAVLYQDVNCTEVPVAIHADQLTPTWRVYSTGSNVFQTRAGCLIGAEHVNNSYECDIPIGAGICASYQTQTNSPRRARSVASQSIIAYTMSLGAENSVAYSNNSIAIPTNFTISVTTEILPVSMTKTSVDCTMYICGDSTECSNLLLQYGSFCTQLNRALTGIAVEQDKNTQEVFAQVKQIYKTPPIKDFGGFNFSQILPDPSKPSKRSFIEDLLFNKVTLADAGFIKQYGDCLGDIAARDLICAQKFNGLTVLPPLLTDEMIAQYTSALLAGTITSGWWFGAGAALQIPFAMQMAYRFNGIGVTQNVLYENQKLIANQFNSAIGKIQDSLSSTASALGKLQDVVNQNAQALNTLVKQLSSNFGAISSVLNDILSRLDPPEAEVQIDRLITGRLQSLQTYVTQQLIRAAEIRWSANLAATKMSECVLGQSKRVDFCGKGYHLMSFPQSAPHGVVFLHVTYVPAQEKNFTTAPAICHDGKAHFPREGVFVSNGTHWFVTQRNFYEPQIITTDNTFVSGNCDVVIGIVNNTVYDPLQPELDSFKEELDKYFKNHTSPDVDLGDISGINASVVNIQKEIDRLNEVAKNLNESLIDLQELGKYEQYIKWPWYIWLGFIAGLIAIVMVTIMLCCMTSCCSCLKGCCSCGSCCKFDEDDSEPVLKGVKLHYT

SEQ ID NO: 426 - protein, 1273 aa, Artificial Sequence
  SARS-CoV-2/England/200990660/2020__EPI_ISL_414523 spike protein (1-1273)(K986P_V987P_T887W_A1020W)
MFVFLVLLPLVSSQCVNLTTRTQLPPAYTNSFTRGVYYPDKVFRSSVLHSTQDLFLPFFSNVTWFHAIHVSGTNGTKRFDNPVLPFNDGVYFASTEKSNIIRGWIFGTTLDSKTQSLLIVNNATNVVIKVCEFQFCNDPFLGVYYHKNNKSWMESEFRVYSSANNCTFEYVSQPFLMDLEGKQGNFKNLREFVFKNIDGYFKIYSKHTPINLVRDLPQGFSALEPLVDLPIGINITRFQTLLALHRSYLTPGDSSSGWTAGAAAYYVGYLQPRTFLLKYNENGTITDAVDCALDPLSETKCTLKSFTVEKGIYQTSNFRVQPTESIVRFPNITNLCPFGEVFNATRFASVYAWNRKRISNCVADYSVLYNSASFSTFKCYGVSPTKLNDLCFTNVYADSFVIRGDEVRQIAPGQTGKIADYNYKLPDDFTGCVIAWNSNNLDSKVGGNYNYLYRLFRKSNLKPFERDISTEIYQAGSTPCNGVEGFNCYFPLQSYGFQPTNGVGYQPYRVVVLSFELLHAPATVCGPKKSTNLVKNKCVNFNFNGLTGTGVLTESNKKFLPFQQFGRDIADTTDAVRDPQTLEILDITPCSFGGVSVITPGTNTSNQVAVLYQGVNCTEVPVAIHADQLTPTWRVYSTGSNVFQTRAGCLIGAEHVNNSYECDIPIGAGICASYQTQTNSPRRARSVASQSIIAYTMSLGAENSVAYSNNSIAIPTNFTISVTTEILPVSMTKTSVDCTMYICGDSTECSNLLLQYGSFCTQLNRALTGIAVEQDKNTQEVFAQVKQIYKTPPIKDFGGFNFSQILPDPSKPSKRSFIEDLLFNKVTLADAGFIKQYGDCLGDIAARDLICAQKFNGLTVLPPLLTDEMIAQYTSALLAGTITSGWWFGAGAALQIPFAMQMAYRFNGIGVTQNVLYENQKLIANQFNSAIGKIQDSLSSTASALGKLQDVVNQNAQALNTLVKQLSSNFGAISSVLNDILSRLDPPEAEVQIDRLITGRLQSLQTYVTQQLIRAAEIRWSANLAATKMSECVLGQSKRVDFCGKGYHLMSFPQSAPHGVVFLHVTYVPAQEKNFTTAPAICHDGKAHFPREGVFVSNGTHWFVTQRNFYEPQIITTDNTFVSGNCDVVIGIVNNTVYDPLQPELDSFKEELDKYFKNHTSPDVDLGDISGINASVVNIQKEIDRLNEVAKNLNESLIDLQELGKYEQYIKWPWYIWLGFIAGLIAIVMVTIMLCCMTSCCSCLKGCCSCGSCCKFDEDDSELVLKGVKLHYT

SEQ ID NO: 427 - protein, 1273 aa, Artificial Sequence
  SARS-CoV-2/Australia/NSW09/2020__EPI_ISL_413595 spike protein (1-1273)(K986P_V987P_T887W_A1020W)
MFVFLVLLPLVSSQCVNLTTRTQLPPAYTNSFTRGVYYPDKVFRSSVLHSTQDLFLPFFSNVTWFHAIHVSGTNGTKRFDNPVLPFNDGVYFASTEKSNIIRGWIFGTTLDSKTQSLLIVNNATNVVIKVCEFQFCNDPFLGVYYHKNNKSWMESEFRVYSSANNCTFEYVSQPFLMDLEGKQGNFKNLREFVFKNIDGYFKIYSKHTPINLVRDLPQGFSALEPLVDLPIGINITRFQTLLALHRSYLTPGDSSSGWTAGAAAYYVGYLQPRTFLLKYNENGTITDAVDCALDPLSETKCTLKSFTVEKGIYQTSNFRVQPTESIVRFPNITNLCPFGEVFNATRFASVYAWNRKRISNCVADYSVLYNSASFSTFKCYGVSPTKLNDLCFTNVYADSFVIRGDEVRQIAPGQTGKIADYNYKLPDDFTGCVIAWNSNNLDSKVGGNYNYLYRLFRKSNLKPFERDISTEIYQAGSTPCNGVEGFNCYFPLQSYGFQPTNGVGYQPYRVVVLSFELLHAPATVCGPKKSTNLVKNKCVNFNFNGLTGTGVLTESNKKFLPFQQFGRDIADTTDAVRDPQTLEILDITPCSFGGVSVITPGTNTSNQVAVLYQDVNCTEVPVAIHADQLTPTWRVYSTGSNVFQTRAGCLIGAEHVNNSYECDIPIGAGICASYQTQTNSPRRARSVASQSIIAYTMSLGAENSVAYSNNSIAIPTNFTISVTTEILPVSMTKTSVDCTMYICGDSTECSNLLLQYGSFCTQLNRALTGIAVEQDKNTQEVFAQVKQIYKTPPIKDFGGFNFSQILPDPSKPSKRSFIEDLLFNKVTLADAGFIKQYGDCLGDIAARDLICAQKFNGLTVLPPLLTDEMIAQYTSALLAGTITSGWWFGAGAALQIPFAMQMAYRFNGIGVTQNVLYENQKLIANQFNSAIGKIQDSLSFTASALGKLQDVVNQNAQALNTLVKQLSSNFGAISSVLNDILSRLDPPEAEVQIDRLITGRLQSLQTYVTQQLIRAAEIRWSANLAATKMSECVLGQSKRVDFCGKGYHLMSFPQSAPHGVVFLHVTYVPAQEKNFTTAPAICHDGKAHFPREGVFVSNGTHWFVTQRNFYEPQIITTDNTFVSGNCDVVIGIVNNTVYDPLQPELDSFKEELDKYFKNHTSPDVDLGDISGINASVVNIQKEIDRLNEVAKNLNESLIDLQELGKYEQYIKWPWYIWLGFIAGLIAIVMVTIMLCCMTSCCSCLKGCCSCGSCCKFDEDDSEPVLKGVKLHYT

SEQ ID NO: 428 - protein, 1273 aa, Artificial Sequence
  SARS-CoV-2/Australia/NSW10/2020__EPI_ISL_413596 spike protein (1-1273)(K986P_V987P_T887W_A1020W)
MFVFLVLLPLVSSQCVNLTTRTQLPPAYTNSFTRGVYYPDKVFRSSVLHSTQDLFLPFFSNVTWFHAIHVSGTNGTKRFDNPVLPFNDGVYFASTEKSNIIRGWIFGTTLDSKTQSLLIVNNATNVVIKVCEFQFCNDPFLGVYYHKNNKSWMESEFRVYSSANNCTFEYVSQPFLMDLEGKQGNFKNLREFVFKNIDGYFKIYSKHTPINLVRDLPQGFSALEPLVDLPIGINITRFQTLLALHRSYLTPGDSSSGWTAGAAAYYVGYLQPRTFLLKYNENGTITDAVDCALDPLSETKCTLKSFTVEKGIYQTSNFRVQPTESIVRFPNITNLCPFGEVFNATRFASVYAWNRKRISNCVADYSVLYNSASFSTFKCYGVSPTKLNDLCFTNVYADSFVIRGDEVRQIAPGQTGKIADYNYKLPDDFTGCVIAWNSNNLDSKVGGNYNYLYRLFRKSNLKPFERDISTEIYQAGSTPCNGVEGFNCYFPLQSYGFQPTNGVGYQPYRVVVLSFELLHAPATVCGPKKSTNLVKNKCVNFNFNGLTGTGVLTESNKKFLPFQQFGRDIADTTDAVRDPQTLEILDITPCSFGGVSVITPGTNTSNQVAVLYQDVNCTEVPVAIHADQLTPTWRVYSTGSNVFQTRAGCLIGAEHVNNSYECDIPIGAGICASYQTQTNSPRRARSVASQSIIAYTMSLGAENSVAYSNNSIAIPTNFTISVTTEILPVSMTKTSVDCTMYICGDSTECSNLLLQYGSFCTQLNRALTGIAVEQDKNTQEVFAQVKQIYKTPPIKDFGGFNFSQILPDPSKPSKRSFIEDLLFNKVTLADAGFIKQYGDCLGDIAARDLICAQKFNGLTVLPPLLTDEMIAQYTSALLAGTITSGWWFGAGAALQIPFAMQMAYRFNGIGVTQNVLYENQKLIANQFNSAIGKIQDSLSSTASALGKLQDVVNQNAQALNTLVKQLSSNFGAISSVLNDILSRLDPPEAEVQIDRLITGRLQSLQTYVTQQLIRAAEIRWSANLAATKMSECVLGQSKRVDFCGKGYHLMSFPQSAPHGVVFLHVTYVPAQEKNFTTAPAICHDGKAHFPREGVFVSNGTHWFVTQRNFYEPQIITTDNTFVSGNCDVVIGIVNNTVYDPLQPELDSFKEELDKYFKNHTSPDVDLGDISGINASVVNIQKEIDRLNEVAKNLNESLIDLQELGKYEQYIKWPWYIWLGFIAGLIAIVMVTIMLCCMTSCCSCLKGCCSCGSCFKFDEDDSEPVLKGVKLHYT

SEQ ID NO: 429 - protein, 1273 aa, Artificial Sequence
  SARS-CoV-2/Switzerland/1000477797/2020__EPI_ISL_413023 spike protein (1-1273)(K986P_V987P_T887W_A1020W)
MFVFLVLLPLVSSQCVNLTTRTQLPPAYTNSFTRGVYYPDKVFRSSVLHSTQDLFLPFFSNVTWFHAIHVSGTNGTKRFDNPVLPFNDGVYFASTEKSNIIRGWIFGTTLDSKTQSLLIVNNATNVVIKVCEFQFCNDPFLGVYYHKNNKSWMESEFRVYSSANNCTFEYVSQPFLMDLEGKQGNFKNLREFVFKNIDGYFNIYSKHTPINLVRDLPQGFSALEPLVDLPIGINITRFQTLLALHRSYLTPGDSSSGWTAGAAAYYVGYLQPRTFLLKYNENGTITDAVDCALDPLSETKCTLKSFTVEKGIYQTSNFRVQPTESIVRFPNITNLCPFGEVFNATRFASVYAWNRKRISNCVADYSVLYNSASFSTFKCYGVSPTKLNDLCFTNVYADSFVIRGDEVRQIAPGQTGKIADYNYKLPDDFTGCVIAWNSNNLDSKVGGNYNYLYRLFRKSNLKPFERDISTEIYQAGSTPCNGVEGFNCYFPLQSYGFQPTNGVGYQPYRVVVLSFELLHAPATVCGPKKSTNLVKNKCVNFNFNGLTGTGVLTESNKKFLPFQQFGRDIADTTDAVRDPQTLEILDITPCSFGGVSVITPGTNTSNQVAVLYQGVNCTEVPVAIHADQLTPTWRVYSTGSNVFQTRAGCLIGAEHVNNSYECDIPIGAGICASYQTQTNSPRRARSVASQSIIAYTMSLGAENSVAYSNNSIAIPTNFTISVTTEILPVSMTKTSVDCTMYICGDSTECSNLLLQYGSFCTQLNRALTGIAVEQDKNTQEVFAQVKQIYKTPPIKDFGGFNFSQILPDPSKPSKRSFIEDLLFNKVTLADAGFIKQYGDCLGDIAARDLICAQKFNGLTVLPPLLTDEMIAQYTSALLAGTITSGWWFGAGAALQIPFAMQMAYRFNGIGVTQNVLYENQKLIANQFNSAIGKIQDSLSSTASALGKLQDVVNQNAQALNTLVKQLSSNFGAISSVLNDILSRLDPPEAEVQIDRLITGRLQSLQTYVTQQLIRAAEIRWSANLAATKMSECVLGQSKRVDFCGKGYHLMSFPQSAPHGVVFLHVTYVPAQEKNFTTAPAICHDGKAHFPREGVFVSNGTHWFVTQRNFYEPQIITTDNTFVSGNCDVVIGIVNNTVYDPLQPELDSFKEELDKYFKNHTSPDVDLGDISGINASVVNIQKEIDRLNEVAKNLNESLIDLQELGKYEQYIKWPWYIWLGFIAGLIAIVMVTIMLCCMTSCCSCLKGCCSCGSCCKFDEDDSEPVLKGVKLHYT

SEQ ID NO: 430 - protein, 1273 aa, Artificial Sequence
  SARS-CoV-2/Belgium/BA-02291/2020__EPI_ISL_415159 spike protein (1-1273)(K986P_V987P_T887W_A1020W)
MFVFLVLLPLVSSQCVNLTTRTQLPPAYTNSFTRGVYYPDKVFRSSVLHSTQDLFLPFFSNVTWFHAIHVSGTNGTKRFDNPVLPFNDGVYFASTEKSNIIRGWIFGTTLDSKTQSLLIVNNATNVVIKVCEFQFCNDPFLGVYYHKNNKSWMESEFRVYSSANNCTFEYVSQPFLMDLEGKQGNFKNLREFVFKNIDGYFKIYSKHTPINLVRDLPQGFSALEPLVDLPIGINITRFQTLLALHRSYLTPGDSSSGWTAGAAAYYVGYLQPRTFLLKYNENGTITDAVDCALDPLSETKCTLKSFTVEKGIYQTSNFRVQPTESIVRFPNITNLCPFGEVFNATRFASVYAWNRKRISNCVADYSVLYNSASFSTFKCYGVSPTKLNDLCFTNVYADSFVIRGDEVRQIAPGQTGKIADYNYKLPDDFTGCVIAWNSNNLDSKVGGNYNYLYRLFRRSNLKPFERDISTEIYQAGSTPCNGVEGFNCYFPLQSYGFQPTNGVGYQPYRVVVLSFELLPAPATVCGPKKSTNLVKNKCVNFNFNGLTGTGVLTESNKKFLPFQQFGRDIADTTDAVRDPQTLEILDITPCSFGGVSVITPGTNTSNQVAVLYQGVNCTEVPVAIHADQLTPTWRVYSTGSNVFQTRAGCLIGAEHVNNSYECDIPIGAGICASYQTQTNSPRRARSVASQSIIAYTMSLGAENSVAYSNNSIAIPTNFTISVTTEILPVSMTKTSVDCTMYICGDSTECSNLLLQYGSFCTQLNRALTGIAVEQDKNTQEVFAQVKQIYKTPPIKDFGGFNFSQILPDPSKPSKRSFIEDLLFNKVTLADAGFIKQYGDCLGDIAARDLICAQKFNGLTVLPPLLTDEMIAQYTSALLAGTITSGWWFGAGAALQIPFAMQMAYRFNGIGVTQNVLYENQKLIANQFNSAIGKIQDSLSSAAPALGKLQDVVNQNAQALNTLVKQLSSNFGAISSVLNDILSRLDPPEAEVQIDRLITGRLQSLQTYVTQQLIRAAEIRWSANLAATKMSECVLGQSKRVDFCGKGYHLMSFPQSAPHGVVFLHVTYVPAQEKNFTTAPAICHDGKAHFPREGVFVSNGTHWFVTQRNFYEPQIITTDNTFVSGNCDVVIGIVNNTVYDPLQPELDSFKEELDKYFKNHTSPDVDLGDISGINASVVNIQKEIDRLNEVAKNLNESLIDLQELGKYEQYIKWPWYIWLGFIAGLIAIVMVTIMLCCMTSCCSCLKGCCSCGSCCKFDEDDSEPVLKGVKLHYT

SEQ ID NO: 431 - protein, 1273 aa, Artificial Sequence
  SARS-CoV-2/USA/WA8-UW5/2020__EPI_ISL_413486 spike protein (1-1273)(K986P_V987P_T887W_A1020W)
MFVFLVLLPLVSSQCVNLTTRTQLPPAYTNSFTRGVYYPDKVFRSSVLHSTQDLFLPFFSNVTWFHAIHVSGTNGTKRFDNPVLPFNDGVYFASTEKSNIIRGWIFGTTLDSKTQSLLIVNNATNVVIKVCEFQFCNDPFLGVYYHKNNKSWMESEFRVYSSANNCTFEYVSQPFLMDLEGKQGNFKNLREFVFKNIDGYFKIYSKHTPINLVRDLPQGFSALEPLVDLPIGINITRFQTLLALHRSYLTPGDSSSGWTAGAAAYYVGYLQPRTFLLKYNENGTITDAVDCALDPLSETKCTLKSFTVEKGIYQTSNFRVQPTESIVRFPNITNLCPFGEVFNATRFASVYAWNRKRISNCVADYSVLYNSASFSTFKCYGVSPTKLNDLCFTNVYADSFVIRGDEVRQIAPGQTGKIADYNYKLPDDFTGCVIAWNSNNLDSKVGGNYNYLYRLFRKSNLKPFERDISTEIYQAGSTPCNGVEGFNCYFPLQSYGFQPTNGVGYQPYRVVVLSFELLHAPATVCGPKKSTNLVKNKCVNFNFNGLTGTGVLTESNKKFLPFQQFGRDIADTTDAVRDPQTLEILDITPCSFGGVSVITPGTNTSNQVAVLYQDVNCTEVPVAIHADQLTPTWRVYSTGSNVFQTRAGCLIGAEYVNNSYECDIPIGAGICASYQTQTNSPRRARSVASQSIIAYTMSLGAENSVAYSNNSIAIPTNFTISVTTEILPVSMTKTSVDCTMYICGDSTECSNLLLQYGSFCTQLNRALTGIAVEQDKNTQEVFAQVKQIYKTPPIKDFGGFNFSQILPDPSKPSKRSFIEDLLFNKVTLADAGFIKQYGDCLGDIAARDLICAQKFNGLTVLPPLLTDEMIAQYTSALLAGTITSGWWFGAGAALQIPFAMQMAYRFNGIGVTQNVLYENQKLIANQFNSAIGKIQDSLSSTASALGKLQDVVNQNAQALNTLVKQLSSNFGAISSVLNDILSRLDPPEAEVQIDRLITGRLQSLQTYVTQQLIRAAEIRWSANLAATKMSECVLGQSKRVDFCGKGYHLMSFPQSAPHGVVFLHVTYVPAQEKNFTTAPAICHDGKAHFPREGVFVSNGTHWFVTQRNFYEPQIITTDNTFVSGNCDVVIGIVNNTVYDPLQPELDSFKEELDKYFKNHTSPDVDLGDISGINASVVNIQKEIDRLNEVAKNLNESLIDLQELGKYEQYIKWPWYIWLGFIAGLIAIVMVTIMLCCMTSCCSCLKGCCSCGSCCKFDEDDSEPVLKGVKLHYT

SEQ ID NO: 432 - protein, 1273 aa, Artificial Sequence
  SARS-CoV-2/England/20102000506/2020__EPI_ISL_415147 spike protein (1-1273)(K986P_V987P_T887W_A1020W)
MFVFLVLLPLVSSQCVNLTTRTQLPPAYTNSFTRGVYYPDKVFRSSVLHSTQDLFLPFFSNVTWFHAIHVSGTNGTKRFDNPVLPFNDGVYFASTEKSNIIRGWIFGTTLDSKTQSLLIVNNATNVVIKVCEFQFCNDPFLGVYYHKNNKSWMESEFRVYSSANNCTFEYVSQPFLMDLEGKQGNFKNLREFVFKNIDGYFKIYSKHTPINLVRDLPQGFSALEPLVDLPIGINITRFQTLLALHRSYLTPGDSSSGWTAGAAAYYVGYLQPRTFLLKYNENGTITDAVDCALDPLSETKCTLKSFTVEKGIYQTSNFRVQPTESIVRFPNITNLCPFGEVFNATRFASVYAWNRKRISNCVADYSVLYNSASFSTFKCYGVSPTKLNDLCFTNVYADSFVIRGDEVRQIAPGQTGKIADYNYKLPDDFTGCVIAWNSNNLDSKVGGNYNYLYRLFRKSNLKPFERDISTEIYQAGSTPCNGVEGFNCYFPLQSYGFQPTNGVGYQPYRVVVLSFELLHAPATVCGPKKSTNLVKNKCVNFNFNGLTGTGVLTESNKKFLPFQQFGRDIADTTDAVRDPQTLEILDITPCSFGGVSVITPGTNTSNQVAVLYQGVNCTEVPVAIHADQLTPTWRVYSTGSNVFQTRAGCLIGAEHVNNSYECDIPIGAGICASYQTQTNSPRRARSVASQSIIAYTMSLGAENSVAYSNNSIAIPTNFTISVTTEILPVSMTKTSVDCTMYICGDSTECSNLLLQYGSFCTQLNRALTGIAVEQDKNTQEVFAQVKQIYKTPPIKDFGGFNFSQILPDPSKPSKRSFIEDLLFNKVTLADAGFIKQYGYCLGDIAARDLICAQKFNGLTVLPPLLTDEMIAQYTSALLAGTITSGWWFGAGAALQIPFAMQMAYRFNGIGVTQNVLYENQKLIANQFNSAIGKIQDSLSSTASALGKLQDVVNQNAQALNTLVKQLSSNFGAISSVLNDILSRLDPPEAEVQIDRLITGRLQSLQTYVTQQLIRAAEIRWSANLAATKMSECVLGQSKRVDFCGKGYHLMSFPQSAPHGVVFLHVTYVPAQEKNFTTAPAICHDGKAHFPREGVFVSNGTHWFVTQRNFYEPQIITTDNTFVSGNCDVVIGIVNNTVYDPLQPELDSFKEELDKYFKNHTSPDVDLGDISGINASVVNIQKEIDRLNEVAKNLNESLIDLQELGKYEQYIKWPWYIWLGFIAGLIAIVMVTIMLCCMTSCCSCLKGCCSCGSCCKFDEDDSEPVLKGVKLHYT

SEQ ID NO: 433 - protein, 1273 aa, Artificial Sequence
  SARS-CoV-2/Belgium/VAG-03013/2020__EPI_ISL_415155 spike protein (1-1273)(K986P_V987P_T887W_A1020W)
MFVFLVLLPLVSSQCVNLTTRTQLPPAYTNSFTRGVYYPDKVFRSSVLHSTQDLFLPFFSNVTWFHAIHVSGTNGTKRFDNPVLPFNDGVYFASTEKSNIIRGWIFGTTLDSKTQSLLIVNNATNVVIKVCEFQFCNDPFLGVYYHKNNKSWMESEFRVYSSANNCTFEYVSQPFLMDLEGKQGNFKNLREFVFKNIDGYFKIYSKHTPINLVRDLPQGFSALEPLVDLPIGINITRFQTLLALHRSYLTPGDSSSGWTAGAAAYYVGYLQPRTFLLKYNENGTITDAVDCALDPLSETKCTLKSFTVEKGIYQTSNFRVQPTESIVRFPNITNLCPFGEVFNATRFASVYAWNRKRISNCVADYSVLYNSASFSTFKCYGVSPTKLNDLCFTNVYADSFVIRGDEVRQIAPGQTGKIADYNYKLPDDFTGCVIAWNSNNLDSKVGGNYNYLYRLFRKSNLKPFERDISTEIYQAGSTPCNGVEGFNCYFPLQSYGFQPTNGVGYQPYRVVVLSFELLHAPATVCGPKKSTNLVKNKCVNFNFNGLTGTGVLTESNKKFLPFQQFGRDIADTTDAVRDPQTLEILDITPCSFGGVSVITPGTNTSNQVAVLYQGVNCTEVPVAIHADQLTPTWRVYSTGSNVFQTRAGCLIGAEHVNNSYECDIPIGAGICASYQTQTNSPRRARSVASQSIIAYTMSLGAENSVAYSNNSIAIPTNFTISVTTEILPVSMTKTSVDCTMYICGDSTECSNLLLQYGSFCTQLNRALTGIAVEQDKNTQEVFAQVKQIYKTPPIKDFGGFNFSQILPDPSKPSKRSFIEDLLFNKVTLADAGFIKQYGDCLGDIAARDLICAQKFNGLTVLPPLLTDEMIAQYTSALLAGTITSGWWFGAGAALQIPFAMQMAYRFNGIGVTQNVLYENQKLIANQFNSAIGKIQDSLSSTATALGKLQDVVNQNAQALNTLVKQLSSNFGAISSVLNDILSRLDPPEAEVQIDRLITGRLQSLQTYVTQQLIRAAEIRWSANLAATKMSECVLGQSKRVDFCGKGYHLMSFPQSAPHGVVFLHVTYVPAQEKNFTTAPAICHDGKAHFPREGVFVSNGTHWFVTQRNFYEPQIITTDNTFVSGNCDVVIGIVNNTVYDPLQPELDSFKEELDKYFKNHTSPDVDLGDISGINASVVNIQKEIDRLNEVAKNLNESLIDLQELGKYEQYIKWPWYIWLGFIAGLIAIVMVTIMLCCMTSCCSCLKGCCSCGSCCKFDEDDSEPVLKGVKLHYT

SEQ ID NO: 434 - protein, 1273 aa, Artificial Sequence
  SARS-CoV-2/Belgium/BC-03016/2020__EPI_ISL_415157 spike protein (1-1273)(K986P_V987P_T887W_A1020W)
MFVFLVLLPLVSSQCVNLTTRTQLPPAYTNSFTRGVYYPDKVFRSSVLHSTQDLFLPFFSNVTWFHAIHVSGTNGTKRFDNPVLPFNDGVYFASTEKSNIIRGWIFGTTLDSKTQSLLIVNNATNVVIKVCEFQFCNDPFLGVYYHKNNKSWMESEFRVYSSANNCTFEYVSQPFLMDLEGKQGNFKNLREFVFKNIDGYFKIYSKHTPINLVRDLPQGFSALEPLVDLPIGINITRFQTLLALHRSYLTPGDSSSGWTAGAAAYYVGYLQPRTFLLKYNENGTITDAVDCALDPLSETKCTLKSFTVEKGIYQTSNFRVQPTESIVRFPNITNLCPFGEVFNATRFASVYAWNRKRISNCVADYSVLYNSASFSTFKCYGVSPTKLNDLCFTNVYADSFVIRGDEVRQIAPGQTGKIADYNYKLPDDFTGCVIAWNSNNLDSKVGGNYNYLYRLFRKSNLKPFERDISTEIYQAGSTPCNGVEGFNCYFPLQSYGFQPTNGVGYQPYRVVVLSFELLHAPATVCGPKKSTNLVKNKCVNFNFNGLTGTGVLTESNKKFLPFQQFGRDIADTTDAVRDPQTLEILDITPCSFGGVSVITPGTNTSNQVAVLYQGVNCTEVPVAIHADQLTPTWRVYSTGSNVFQTRAGCLIGAEHVNNSYECDIPIGAGICASYQTQTNSPRRARSVASQSIIAYTMSLGAENSVAYSNNSIAIPTNFTISVTTEILPVSMTKTSVDCTMYICGDSTECSNLLLQYGSFCTQLNRALTGIAVEQDKNTQEVFAQVKQIYKTPPIKDFGGFNFSQILPDPSKPSKRSFIEDLLFNKVTLADAGFIKQYGDCLGDIAARDLICAQKFNGLTVLPPLLTDEMIAQYTSALLAGTITSGWWFGAGAALQIPFAMQMAYRFNGIGVTQNVLYENQKLIANQFNSAIGKIQDSLSSTAPALGKLQDVVNQNAQALNTLVKQLSSNFGAISSVLNDILSRLDPPEAEVQIDRLITGRLQSLQTYVTQQLIRAAEIRWSANLAATKMSECVLGQSKRVDFCGKGYHLMSFPQSAPHGVVFLHVTYVPAQEKNFTTAPAICHDGKAHFPREGVFVSNGTHWFVTQRNFYEPQIITTDNTFVSGNCDVVIGIVNNTVYDPLQPELDSFKEELDKYFKNHTSPDVDLGDISGINASVVNIQKEIDRLNEVAKNLNESLIDLQELGKYEQYIKWPWYIWLGFIAGLIAIVMVTIMLCCMTSCCSCLKGCCSCGSCCKFDEDDSEPVLKGVKLHYT

SEQ ID NO: 435 - protein, 1273 aa, Artificial Sequence
  SARS-CoV-2/Germany/BavPat3/2020__EPI_ISL_414521 spike protein (1-1273)(K986P_V987P_T887W_A1020W)
MFVFLVLLPLVSSQCVNLTTRTQLPPAYTNSFTRGVYYPDKVFRSSVLHSTQDLFLPFFSNVTWFHAIHVSGTNGTKRFDNPVLPFNDGVYFASTEKSNIIRGWIFGTTLDSKTQSLLIVNNATNVVIKVCEFQFCNDPFLGVYYHKNNKSWMESEFRVYSSANNCTFEYVSQPFLMDLEGKQGNFKNLREFVFKNIDGYFKIYSKHTPINLVRDLPQGFSALEPLVDLPIGINITRFQTLLALHRSYLTPGDSSSGWTAGAAAYYVGYLQPRTFLLKYNENGTITDAVDCALDPLSETKCTLKSFTVEKGIYQTSNFRVQPTESIVRFPNITNLCPFGEVFNATRFASVYAWNRKRISNCVADYSVLYNSASFSTFKCYGVSPTKLNDLCFTNVYADSFVIRGDEVRQIAPGQTGKIADYNYKLPDDFTGCVIAWNSNNLDSKVGGNYNYLYRLFRKSNLKPFERDISTEIYQAGSTPCNGVEGFNCYFPLQSYGFQPTNGVGYQPYRVVVLSFELLHAPATVCGPKKSTNLVKNKCVNFNFNGLTGTGVLTESNKKFLPFQQFGRDIADTTDAVRDPQTLEILDITPCSFGGVSVITPGTNTSNQVAVLYQDVNCTEVPVAIHADQLTPTWRVYSTGSNVFQTRAGCLIGAEHVNNSYECDIPIGAGICASYQTQTNSPRRARSVASQSIIAYTMSLGAENSVAYSNNSIAIPTNFTISVTTEILPVSMTKTSVDCTMYICGDSTECSNLLLQYGSFCTQLNRALTGIAVEQDKNTQQVFAQVKQIYKTPPIKDFGGFNFSQILPDPSKPSKRSFIEDLLFNKVTLADAGFIKQYGDCLGDIAARDLICAQKFNGLTVLPPLLTDEMIAQYTSALLAGTITSGWWFGAGAALQIPFAMQMAYRFNGIGVTQNVLYENQKLIANQFNSAIGKIQDSLSSTASALGKLQDVVNQNAQALNTLVKQLSSNFGAISSVLNDILSRLDPPEAEVQIDRLITGRLQSLQTYVTQQLIRAAEIRWSANLAATKMSECVLGQSKRVDFCGKGYHLMSFPQSAPHGVVFLHVTYVPAQEKNFTTAPAICHDGKAHFPREGVFVSNGTHWFVTQRNFYEPQIITTDNTFVSGNCDVVIGIVNNTVYDPLQPELDSFKEELDKYFKNHTSPDVDLGDISGINASVVNIQKEIDRLNEVAKNLNESLIDLQELGKYEQYIKWPWYIWLGFIAGLIAIVMVTIMLCCMTSCCSCLKGCCSCGSCCKFDEDDSEPVLKGVKLHYT

SEQ ID NO: 436 - protein, 1273 aa, Artificial Sequence
  SARS-CoV-2/France/HF1805/2020__EPI_ISL_414628 spike protein (1-1273)(K986P_V987P_T887W_A1020W)
MFVFLVLLPLVSSQCVNLTTRTQLPPAYTNSFTRGVYYPDKVFRSSVLHSTQDLFLPFFSNVTWFHAIHVSGTNGTKRFDNPVLPFNDGVYFASTEKSNIIRGWIFGTTLDSKTQSLLIVNNATNVVIKVCEFQFCNDPFLGVYYHKNNKSWMESEFRVYSSANNCTFEYVSQPFLMDLEGKQGNFKNLREFVFKNIDGYFKIYSKHTPINLVRDLPQGFSALEPLVDLPIGINITRFQTLLALHRSYLTPGDSSSGWTAGAAAYYVGYLQPRTFLLKYNENGTITDAVDCALDPLSETKCTLKSFTVEKGIYQTSNFRVQPTESIVRFPNITNLCPFGEVFNATRFASVYAWNRKRISNCVADYSVLYNSASFSTFKCYGVSPTKLNDLCFTNVYADSFVIRGDEVRQIAPGQTGKIADYNYKLPDDFTGCVIAWNSNNLDSKVGGNYNYLYRLFRKSNLKPFERDISTEIYQAGSTPCNGVEGFNCYFPLQSYGFQPTNGVGYQPYRVVVLSFELLHAPATVCGPKKSTNLVKNKCVNFNFNGLTGTGVLTESNKKFLPFQQFGRDIADTTDAVRDPQTLEILDITPCSFGGVSVITPGTNTSNQVAVLYQGVNCTEVPVAIHADQLTPTWRVYSTGSNVFQTRAGCLIGAEHVNNSYECDIPIGAGICASYQTQTNSPRRARSVASQSIIAYTMSLGAENSVAYSNNSIAIPTNFTISVTTEILPVSMTKTSVDCTMYICGDSTECSNLLLQYGSFCTQLNRALTGIAVEQDKNTQEVFAQVKQIYKTPPIKDFGGFNFSQILPDPSKPSKRSFIEDLLFNKVTLADAGFIKQYGDCLGDIAARDLICAQKFNGLTVLPPLLTDEMIAQYTSALLAGTITSGWWFGAGAALQIPFAMQMAYRFNGIGVTQNVLYENQKLIANQFNSAIGKIQDSLSSTASALGKLQDVVNQNAQALNTLVKQLSSNFGAISSVLNDILSRLDPPEAEVQIDRLITGRLQSLQTYVTQQLIRAAEIRWSANLAATKMSECVLGQSKRVDFCGKGYHLMSFPQSAPHGVVFLHVTYVPAQEKNFTTAPAICHDGKAHFPREGVFVSNGTHWFVTQRNFYEPQIITTDNTFVSGNCDVVIGVVNNTVYDPLQPELDSFKEELDKYFKNHTSPDVDLGDISGINASVVNIQKEIDRLNEVAKNLNESLIDLQELGKYEQYIKWPWYIWLGFIAGLIAIVMVTIMLCCMTSCCSCLKGCCSCGSCCKFDEDDSEPVLKGVKLHYT

SEQ ID NO: 437 - protein, 1273 aa, Artificial Sequence
  SARS-CoV-2/Netherlands/ZuidHolland_9/2020__EPI_ISL_414445 spike protein (1-1273)(K986P_V987P_T887W_A1020W)
MFVFLVLLPLVSSQCVNLTTRTQLPPAYTNSFTRGVYYPDKVFRSSVLHSTQDLFLPFFSNVTWFHAIHVSGTNGTKRFDNPVLPFNDGVYFASTEKSNIIRGWIFGTTLDSKTQSLLIVNNATNVVIKVCEFQFCNDPFLGVYYHKNNKSWMESEFRVYSSANNCTFEYVSQPFLMDLEGKQGNFKNLREFVFKNIDGYFKIYSKHTPINLVRDLPQGFSALEPLVDLPIGINITRFQTLLALHRSYLTPGDSSSGWTAGAAAYYVGYLQPRTFLLKYNENGTITDAVDCALDPLSETKCTLKSFTVEKGIYQTSNFRVQPTESIVRFPNITNLCPFGEVFNATRFASVYAWNRKRISNCVADYSVLYNSASFSTFKCYGVSPTKLNDLCFTNVYADSFVIRGDEVRQIAPGQTGKIADYNYKLPDDFTGCVIAWNSNNLDSKVGGNYNYLYRLFRKSNLKPFERDISTEIYQAGSTPCNGVEGFNCYFPLQSYGFQPTNGVGYQPYRVVVLSFELLHAPATVCGPKKSTNLVKNKCVNFNFNGLTGTGVLTESNKKFLPFQQFGRDIADTTDAVRDPQTLEILDITPCSFGGVSVITPGTNTSNQVAVLYQGVNCTEVPVAIHADQLTPTWRVYSTGSNVFQTRAGCLIGAEHVNNSYECDIPIGAGICASYQTQTNSPRRARSVASQSIIAYTMSLGAENSVAYSNNSIAIPTNFTISVTTEILPVSMTKTSVDCTMYICGDSTECSNLLLQYGSFCTQLNRALTGIAVEQDKNTQEVFAQVKQIYKTPPIKDFGGFNFSQILPDPSKPSKRSFIEDLLFNKVTLADAGFIKQYGDCLGDIAARDLICVQKFNGLTVLPPLLTDEMIAQYTSALLAGTITSGWWFGAGAALQIPFAMQMAYRFNGIGVTQNVLYENQKLIANQFNSAIGKIQDSLSSTASALGKLQDVVNQNAQALNTLVKQLSSNFGAISSVLNDILSRLDPPEAEVQIDRLITGRLQSLQTYVTQQLIRAAEIRWSANLAATKMSECVLGQSKRVDFCGKGYHLMSFPQSAPHGVVFLHVTYVPAQEKNFTTAPAICHDGKAHFPREGVFVSNGTHWFVTQRNFYEPQIITTDNTFVSGNCDVVIGIVNNTVYDPLQPELDSFKEELDKYFKNHTSPDVDLGDISGINASVVNIQKEIDRLNEVAKNLNESLIDLQELGKYEQYIKWPWYIWLGFIAGLIAIVMVTIMLCCMTSCCSCLKGCCSCGSCCKFDEDDSEPVLKGVKLHYT

SEQ ID NO: 438 - protein, 1273 aa, Artificial Sequence
  SARS-CoV-2/Finland/FIN03032020A/2020__EPI_ISL_413602 spike protein (1-1273)(K986P_V987P_T887W_A1020W)
MFVFLVLLPLVSSQCVNLTTRTQLPPAYTNSFTRGVYYPDKVFRSSVLHSTQDLFLPFFSNVTWFHAIHVSGTNGTKRFDNPVLPFNDGVYFASTEKSNIIRGWIFGTTLDSKTQSLLIVNNATNVVIKVCEFQFCNDPFLGVYYHKNNKSWMESEFRVYSSANNCTFEYVSQPFLMDLEGKQGNFKNLREFVFKNIDGYFKIYSKHTPINLVRDLPQGFSALEPLVDLPIGINITRFQTLLALHRSYLTPGDSSSGWTAGAAAYYVGYLQPRTFLLKYNENGTITDAVDCALDPLSETKCTLKSFTVEKGIYQTSNFRVQPTESIVRFPNITNLCPFGEVFNATRFASVYAWNRKRISNCVADYSVLYNSASFSTFKCYGVSPTKLNDLCFTNVYADSFVIRGDEVRQIAPGQTGKIADYNYKLPDDFTGCVISWNSNNLDSKVGGNYNYLYRLFRKSNLKPFERDISTEIYQAGSTPCNGVEGFNCYFPLQSYGFQPTNGVGYQPYRVVVLSFELLHAPATVCGPKKSTNLVKNKCVNFNFNGLTGTGVLTESNKKFLPFQQFGRDIADTTDAVRDPQTLEILDITPCSFGGVSVITPGTNTSNQVAVLYQGVNCTEVPVAIHADQLTPTWRVYSTGSNVFQTRAGCLIGAEHVNNSYECDIPIGAGICASYQTQTNSPRRARSVASQSIIAYTMSLGAENSVAYSNNSIAIPTNFTISVTTEILPVSMTKTSVDCTMYICGDSTECSNLLLQYGSFCTQLNRALTGIAVEQDKNTQEVFAQVKQIYKTPPIKDFGGFNFSQILPDPSKPSKRSFIEDLLFNKVTLADAGFIKQYGDCLGDIAARDLICAQKFNGLTVLPPLLTDEMIAQYTSALLAGTITSGWWFGAGAALQIPFAMQMAYRFNGIGVTQNVLYENQKLIANQFNSAIGKIQDSLSSTASALGKLQDVVNQNAQALNTLVKQLSSNFGAISSVLNDILSRLDPPEAEVQIDRLITGRLQSLQTYVTQQLIRAAEIRWSANLAATKMSECVLGQSKRVDFCGKGYHLMSFPQSAPHGVVFLHVTYVPAQEKNFTTAPAICHDGKAHFPREGVFVSNGTHWFVTQRNFYEPQIITTDNTFVSGNCDVVIGIVNNTVYDPLQPELDSFKEELDKYFKNHTSPDVDLGDISGINASVVNIQKEIDRLNEVAKNLNESLIDLQELGKYEQYIKWPWYIWLGFIAGLIAIVMVTIMLCCMTSCCSCLKGCCSCGSCCKFDEDDSEPVLKGVKLHYT

SEQ ID NO: 439 - protein, 1273 aa, Artificial Sequence
  SARS-CoV-2/France/GE1977/2020__EPI_ISL_414632 spike protein (1-1273)(K986P_V987P_T887W_A1020W)
MFVFLVLLPLVSSQCVNLTTRTQLPPAYTNSFTRGVYYPDKVFRSSVLHSTQDLFLPFFSNVTWFHAIHVSGTNGTKRFDNPVLPFNDGVYFASTEKSNIIRGWIFGTTLDSKTQSLLIVNNATNVVIKVCEFQFCNDPFLGVYYHKNNKSWMESEFRVYSSANNCTFEYVSQPFLMDLEGKQGNFKNLREFVFKNIDGYFKIYSKHTPINLVRDLPQGFSALEPLVDLPIGINITRFQTLLALHRSYLTPGDSSSGWTAGAAAYYVGYLQPRTFLLKYNENGTITDAVDCALDPLSETKCTLKSFTVEKGIYQTSNFRVQPTESIVRFPNITNLCPFGEVFNATRFASVYAWNRKRISNCVADYSVLYNSASFSTFKCYGVSPTKLNDLCFTNVYADSFVIRGDEVRQIAPGQTGKIADYNYKLPDDFTGCVIAWNSNNLDSKVGGNYNYLYRLFRKSNLKPFERDISTEIYQAGSTPCNGVEGFNCYFPLQSYGFQPTNGVGYQPYRVVVLSFELLHAPATVCGPKKSTNLVKNKCVNFNFNGLTGTGVLTESNKKFLPFQQFGRDIADTTDAVRDPQTLEILDITPCSFGGVSVITPGTNTSNQVAVLYQGVNCTEVPVAIHADQLTPTWRVYSTGSNVFQTRAGCLIGAEHVNNSYECDIPIGAGICASYQTQTNSPRRARSVASQSIIAYTMSLGAENSVAYSNNSIAIPTNFTISVTTEILPVSMTKTSVDCTMYICGDSTECSNLLLQYGSFCTQLNRALTGIAVEQDKNTQEVFAQVKQIYKTPPIKDFGGFNFSQILPDPSKPSKRSFIEDLLFNKVTLADAGFIKQYGDCLGDIAARDLICAQKFNGLTVLPPLLTDEMIAQYTSALLAGTITSGWWFGAGAALQIPFAMQMAYRFNGIGVTQNVLYENQKLIANQFNSAIGKIQDSLFSTASALGKLQDVVNQNAQALNTLVKQLSSNFGAISSVLNDILSRLDPPEAEVQIDRLITGRLQSLQTYVTQQLIRAAEIRWSANLAATKMSECVLGQSKRVDFCGKGYHLMSFPQSAPHGVVFLHVTYVPAQEKNFTTAPAICHDGKAHFPREGVFVSNGTHWFVTQRNFYEPQIITTDNTFVSGNCDVVIGIVNNTVYDPLQPELDSFKEELDKYFKNHTSPDVDLGDISGINASVVNIQKEIDRLNEVAKNLNESLIDLQELGKYEQYIKWPWYIWLGFIAGLIAIVMVTIMLCCMTSCCSCLKGCCSCGSCCKFDEDDSEPVLKGVKLHYT

SEQ ID NO: 440 - protein, 1273 aa, Artificial Sequence
  SARS-CoV-2/Finland/FIN-313/2020__EPI_ISL_414641 spike protein (1-1273)(K986P_V987P_T887W_A1020W)
MFVFLVLLPLVSSQCVNLTTRTQLPPAYTNSFTRGVYYPDKVFRSSVLHSTQDLFLPFFSNVTWFHAIHVSGTNGTKRFDNPVLPFNDGVYFASTEKSNIIRGWIFGTTLDSKTQSLLIVNNATNVVIKVCEFQFCNDPFLGVYYHKNNKSWMESEFRVYSSANNCTFEYVSQPFLMDLEGKQGNFKNLREFVFKNIDGYFKIYSKHTPINLVRDLPQGFSALEPLVDLPIGINITRFKTLLALHRSYLTPGDSSSGWTAGAAAYYVGYLQPRTFLLKYNENGTITDAVDCALDPLSETKCTLKSFTVEKGIYQTSNFRVQPTESIVRFPNITNLCPFGEVFNATRFASVYAWNRKRISNCVADYSVLYNSASFSTFKCYGVSPTKLNDLCFTNVYADSFVIRGDEVRQIAPGQTGKIADYNYKLPDDFTGCVIAWNSNNLDSKVGGNYNYLYRLFRKSNLKPFERDISTEIYQAGSTPCNGVEGFNCYFPLQSYGFQPTNGVGYQPYRVVVLSFELLHAPATVCGPKKSTNLVKNKCVNFNFNGLTGTGVLTESNKKFLPFQQFGRDIADTTDAVRDPQTLEILDITPCSFGGVSVITPGTNTSNQVAVLYQGVNCTEVPVAIHADQLTPTWRVYSTGSNVFQTRAGCLIGAEHVNNSYECDIPIGAGICASYQTQTNSPRRARSVASQSIIAYTMSLGAENSVAYSNNSIAIPTNFTISVTTEILPVSMTKTSVDCTMYICGDSTECSNLLLQYGSFCTQLNRALTGIAVEQDKNTQEVFAQVKQIYKTPPIKDFGGFNFSQILPDPSKPSKRSFIEDLLFNKVTLADAGFIKQYGDCLGDIAARDLICAQKFNGLTVLPPLLTDEMIAQYTSALLAGTITSGWWFGAGAALQIPFAMQMAYRFNGIGVTQNVLYENQKLIANQFNSAIGKIQDSLSSTASALGKLQDVVNQNAQALNTLVKQLSSNFGAISSVLNDILSRLDPPEAEVQIDRLITGRLQSLQTYVTQQLIRAAEIRWSANLAATKMSECVLGQSKRVDFCGKGYHLMSFPQSAPHGVVFLHVTYVPAQEKNFTTAPAICHDGKAHFPREGVFVSNGTHWFVTQRNFYEPQIITTDNTFVSGNCDVVIGIVNNTVYDPLQPELDSFKEELDKYFKNHTSPDVDLGDISGINASVVNIQKEIDRLNEVAKNLNESLIDLQELGKYEQYIKWPWYIWLGFIAGLIAIVMVTIMLCCMTSCCSCLKGCCSCGSCCKFDEDDSEPVLKGVKLHYT

SEQ ID NO: 441 - protein, 1273 aa, Artificial Sequence
  SARS-CoV-2/Netherlands/ZuidHolland_2/2020__EPI_ISL_414556 spike protein (1-1273)(K986P_V987P_T887W_A1020W)
MFVFLVLLPLVSSQCVNLTTRTQLPPAYTNSFTRGVYYPDKVFRSSVLHSTQDLFLPFFSNVTWFHAIHVSGTNGTKRFDNPVLPFNDGVYFASTEKSNIIRGWIFGTTLDSKTQSLLIVNNATNVVIKVCEFQFCNDPFLGVYYHKNNKSWMESEFRVYSSANNCTFEYVSQPFLMDLEGKQGNFKNLREFVFKNIDGYFKIYSKHTPINLVRDLPQGFSALEPLVDLPIGINITRFQTLLALHRSYLTPGDSSSGWTAGAAAYYVGYLQPRTFLLKYNENGTITDAVDCALDPLSETKCTLKSFTVEKGIYQTSNFRVQPTESIVRFPNITNLCPFGEVFNATRFASVYAWNRKRISNCVADYSVLYNSASFSTFKCYGVSPTKLNDLCFTNVYADSFVIRGDEVRQIAPGQTGKIADYNYKLPDDFTGCVIAWNSNNLDSKVGGNYNYLYRLFRKSNLKPFERDISTEIYQAGSTPCNGVEGFNCYFPLQSYGFQPTNGVGYQPYRVVVLSFELLHAPATVCGPKKSTNLVKNKCVNFNFNGLTGTGVLTESNKKFLPFQQFGRDIADTTDAVRDPQTLEILDITPCSFGGVSVITPGTNTSNQVAVLYQGVNCTEVPVAIHADQLTPTWRVYSTGSNVFQTRAGCLIGAEHVNNSYECDIPIGAGICASYQTQTNSPRRARSVASQSIIAYTMSLGAENSVAYSNNSIAIPTNFTISVTTEILPVSMTKTSVDCTMYICGDSTECSNLLLQYGSFCTQLNRALTGIALEQDKNTQEVFAQVKQIYKTPPIKDFGGFNFSQILPDPSKPSKRSFIEDLLFNKVTLADAGFIKQYGDCLGDIAARDLICAQKFNGLTVLPPLLTDEMIAQYTSALLAGTITSGWWFGAGAALQIPFAMQMAYRFNGIGVTQNVLYENQKLIANQFNSAIGKIQDSLSSTASALGKLQDVVNQNAQALNTLVKQLSSNFGAISSVLNDILSRLDPPEAEVQIDRLITGRLQSLQTYVTQQLIRAAEIRWSANLAATKMSECVLGQSKRVDFCGKGYHLMSFPQSAPHGVVFLHVTYVPAQEKNFTTAPAICHDGKAHFPREGVFVSNGTHWFVTQRNFYEPQIITTDNTFVSGNCDVVIGIVNNTVYDPLQPELDSFKEELDKYFKNHTSPDVDLGDISGINASVVNIQKEIDRLNEVAKNLNESLIDLQELGKYEQYIKWPWYIWLGFIAGLIAIVMVTIMLCCMTSCCSCLKGCCSCGSCCKFDEDDSEPVLKGVKLHYT

SEQ ID NO: 442 - protein, 1273 aa, Artificial Sequence
  SARS-CoV-2/USA/WA-UW31/2020__EPI_ISL_414618 spike protein (1-1273)(K986P_V987P_T887W_A1020W)
MFVFLVLLPLVSSQCVNLTTRTQLPPAYTNSFTRGVYYPDKVFRSSVLHSTQDLFLPFFSNVTWFHAIHVSGTNGTKRFDNPVLPFNDGVYFASTEKSNIIRGWIFGTTLDSKTQSLLIVNNATNVVIKVCEFQFCNDPFLGVYYHKNNKSWMESEFRVYSSANNCTFEYVSQPFLMDLEGKQGNFKNLREFVFKNIDGYFKIYSKHTPINLVRDLPQGFSALEPLVDLPIGINITRFQTLLALHRSYLTPGDSSSGWTAGAAAYYVGYLQPRTFLLKYNENGTITDAVDCALDPLSETKCTLKSFTVEKGIYQTSNFRVQPTESIVRFPNITNLCPFGEVFNATRFASVYAWNRKRISNCVADYSVLYNSASFSTFKCYGVSPTKLNDLCFTNVYADSFVIRGDEVRQIAPGQTGKIADYNYKLPDDFTGCVIAWNSNNLDSKVGGNYNYLYRLFRKSNLKPFERDISTEIYQAGSTPCNGAEGFNCYFPLQSYGFQPTNGVGYQPYRVVVLSFELLHAPATVCGPKKSTNLVKNKCVNFNFNGLTGTGVLTESNKKFLPFQQFGRDIADTTDAVRDPQTLEILDITPCSFGGVSVITPGTNTSNQVAVLYQDVNCTEVPVAIHADQLTPTWRVYSTGSNVFQTRAGCLIGAEHVNNSYECDIPIGAGICASYQTQTNSPRRARSVASQSIIAYTMSLGAENSVAYSNNSIAIPTNFTISVTTEILPVSMTKTSVDCTMYICGDSTECSNLLLQYGSFCTQLNRALTGIAVEQDKNTQEVFAQVKQIYKTPPIKDFGGFNFSQILPDPSKPSKRSFIEDLLFNKVTLADAGFIKQYGDCLGDIAARDLICAQKFNGLTVLPPLLTDEMIAQYTSALLAGTITSGWWFGAGAALQIPFAMQMAYRFNGIGVTQNVLYENQKLIANQFNSAIGKIQDSLSSTASALGKLQDVVNQNAQALNTLVKQLSSNFGAISSVLNDILSRLDPPEAEVQIDRLITGRLQSLQTYVTQQLIRAAEIRWSANLAATKMSECVLGQSKRVDFCGKGYHLMSFPQSAPHGVVFLHVTYVPAQEKNFTTAPAICHDGKAHFPREGVFVSNGTHWFVTQRNFYEPQIITTDNTFVSGNCDVVIGIVNNTVYDPLQPELDSFKEELDKYFKNHTSPDVDLGDISGINASVVNIQKEIDRLNEVAKNLNESLIDLQELGKYEQYIKWPWYIWLGFIAGLIAIVMVTIMLCCMTSCCSCLKGCCSCGSCCKFDEDDSEPVLKGVKLHYT

SEQ ID NO: 443 - protein, 1273 aa, Artificial Sequence
  SARS-CoV-2/South Korea/SNU01/2020__EPI_ISL_411929 spike protein (1-1273)(K986P_V987P_T887W_A1020W)
MFVFLVLLPLVSSQCVNLTTRTQLPPAYTNSFTRGVYYPDKVFRSSVLHSTQDLFLPFFSNVTWFHAIHVSGTNGTKRFDNPVLPFNDGVYFASTEKSNIIRGWIFGTTLDSKTQSLLIVNNATNVVIKVCEFQFCNDPFLGVYYHKNNKSWMESEFRVYSSANNCTFEYVSQPFLMDLEGKQGNFKNLREFVFKNIDGYFKIYSKHTPINLVRDLPQGFWALEPLVDLPIGINITRFQTLLALHRSYLTPGDSSSGWTAGAAAYYVGYLQPRTFLLKYNENGTITDAVDCALDPLSETKCTLKSFTVEKGIYQTSNFRVQPTESIVRFPNITNLCPFGEVFNATRFASVYAWNRKRISNCVADYSVLYNSASFSTFKCYGVSPTKLNDLCFTNVYADSFVIRGDEVRQIAPGQTGKIADYNYKLPDDFTGCVIAWNSNNLDSKVGGNYNYLYRLFRKSNLKPFERDISTEIYQAGSTPCNGVEGFNCYFPLQSYGFQPTNGVGYQPYRVVVLSFELLHAPATVCGPKKSTNLVKNKCVNFNFNGLTGTGVLTESNKKFLPFQQFGRDIADTTDAVRDPQTLEILDITPCSFGGVSVITPGTNTSNQVAVLYQDVNCTEVPVAIHADQLTPTWRVYSTGSNVFQTRAGCLIGAEHVNNSYECDIPIGAGICASYQTQTNSPRRARSVASQSIIAYTMSLGAENSVAYSNNSIAIPTNFTISVTTEILPVSMTKTSVDCTMYICGDSTECSNLLLQYGSFCTQLNRALTGIAVEQDKNTQEVFAQVKQIYKTPPIKDFGGFNFSQILPDPSKPSKRSFIEDLLFNKVTLADAGFIKQYGDCLGDIAARDLICAQKFNGLTVLPPLLTDEMIAQYTSALLAGTITSGWWFGAGAALQIPFAMQMAYRFNGIGVTQNVLYENQKLIANQFNSAIGKIQDSLSSTASALGKLQDVVNQNAQALNTLVKQLSSNFGAISSVLNDILSRLDPPEAEVQIDRLITGRLQSLQTYVTQQLIRAAEIRWSANLAATKMSECVLGQSKRVDFCGKGYHLMSFPQSAPHGVVFLHVTYVPAQEKNFTTAPAICHDGKAHFPREGVFVSNGTHWFVTQRNFYEPQIITTDNTFVSGNCDVVIGIVNNTVYDPLQPELDSFKEELDKYFKNHTSPDVDLGDISGINASVVNIQKEIDRLNEVAKNLNESLIDLQELGKYEQYIKWPWYIWLGFIAGLIAIVMVTIMLCCMTSCCSCLKGCCSCGSCCKFDEDDSEPVLKGVKLHYT

SEQ ID NO: 444 - protein, 1273 aa, Artificial Sequence
  SARS-CoV-2/China/WF0004/2020__EPI_ISL_413694 spike protein (1-1273)(K986P_V987P_T887W_A1020W)
MFVFLVLLPLVSSQCVNLTTRTQLPPAYTNSFTRGVYYPDKVFRSSVLHSTQDLFLPFFSNVTWFHAIHVSGTNGTKRFDNPVLPFNDGVYFASTEKSNIIRGWIFGTTLDSKTQSLLIVNNATNVVIKVCEFQFCNDPFLGVYYHKNNKSWTESEFRVYSSANNCTFEYVSQPFLMDLEGKQGNFKNLREFVFKNIDGYFKIYSKHTPINLVRDLPQGFSALEPLVDLPIGINITRFQTLLALHRSYLTPGDSSSGWTAGAAAYYVGYLQPRTFLLKYNENGTITDAVDCALDPLSETKCTLKSFTVEKGIYQTSNFRVQPTESIVRFPNITNLCPFGEVFNATRFASVYAWNRKRISNCVADYSVLYNSASFSTFKCYGVSPTKLNDLCFTNVYADSFVIRGDEVRQIAPGQTGKIADYNYKLPDDFTGCVIAWNSNNLDSKVGGNYNYLYRLFRKSNLKPFERDISTEIYQAGSTPCNGVEGFNCYFPLQSYGFQPTNGVGYQPYRVVVLSFELLHAPATVCGPKKSTNLVKNKCVNFNFNGLTGTGVLTESNKKFLPFQQFGRDIADTTDAVRDPQTLEILDITPCSFGGVSVITPGTNTSNQVAVLYQDVNCTEVPVAIHADQLTPTWRVYSTGSNVFQTRAGCLIGAEHVNNSYECDIPIGAGICASYQTQTNSPRRARSVASQSIIAYTMSLGAENSVAYSNNSIAIPTNFTISVTTEILPVSMTKTSVDCTMYICGDSTECSNLLLQYGSFCTQLNRALTGIAVEQDKNTQEVFAQVKQIYKTPPIKDFGGFNFSQILPDPSKPSKRSFIEDLLFNKVTLADAGFIKQYGDCLGDIAARDLICAQKFNGLTVLPPLLTDEMIAQYTSALLAGTITSGWWFGAGAALQIPFAMQMAYRFNGIGVTQNVLYENQKLIANQFNSAIGKIQDSLSSTASALGKLQDVVNQNAQALNTLVKQLSSNFGAISSVLNDILSRLDPPEAEVQIDRLITGRLQSLQTYVTQQLIRAAEIRWSANLAATKMSECVLGQSKRFDFCGKGYHLMSFPQSAPHGVVFLHVTYVPAQEKNFTTAPAICHDGKAHFPREGVFVSNGTHWFVTQRNFYEPQIITTDNTFVSGNCDVVIGIVNNTVYDPLQPELDSFKEELDKYFKNHTSPDVDLGDISGINASVVNIQKEIDRLNEVAKNLNESLIDLQELGKYEQYIKWPWYIWLGFIAGLIAIVMVTIMLCCMTSCCSCLKGCCSCGSCCKFDEDDSEPVLKGVKLHYT

SEQ ID NO: 445 - protein, 1273 aa, Artificial Sequence
  SARS-CoV-2/China/WF0028/2020__EPI_ISL_413791 spike protein (1-1273)(K986P_V987P_T887W_A1020W)
MFVFLVLLPLVSSQCVNLTTRTQLPPAYTNSFTRGVYYPDKVFRSSVLHSTQDLFLPFFSNVTWFHAIHVSGTNGTKRFDNPVLPFNDGVYFASTEKSNIIRGWIFGTTLDSKTQSLLIVNNATNVVIKVCEFQFCNDPFLGVYYHKNNKSWMESEFRVYSSANNCTFEYVSQPFLMDLEGKQGNFKNLREFVFKNIDGYFKIYSKHTPINLVRDLPQGFSALEPLVDLPIGINITRFQTLLALHRSYLTPGDSSSGWTAGAAAYYVGYLQPRTFLLKYNENGTITDAVDCALDPLSETKCTLKSFTVEKGIYQTSNFRVQPTESIVRFPNITNLCPFGEVFNATRFASVYAWNRKRISNCVADYSVLYNSASFSTFKCYGVSPTKLNDLCFTNVYADSFVIRGDEVRQIAPGQTGKIADYNYKLPDDFTGCVIAWNSNNLDSKVGGNYNYLYRLFRKSNLKPFERDISTEIYQAGSTPCNGVEGFNCYFPLQSYGFQPTNGVGYQPYRVVVLSFELLHAPATVCGPKKSTNLVKNKCVNFNFNGLTGTGVLTESNKKFLPFQQFGRDIADTTDAVRDPQTLEILDITPCSFGGVSVITPGTNTSNQVAVLYQDVNCTEVPVAIHADQLTPTWRVYSTGSNVFQTRAGCLIGAEHVNNSYECDIPIGAGICASYQTQTNSPRRARSVASQSIIAYTMSLGAENSVAYSNNSIAIPTNFTISVTTEILPVSMTKTSVDCTMYICGDSTECSNLLLQYGSFCTQLNRALTGIAVEQDKNTQEVFAQVKQIYKTPPIKDFGGFNFSQILPDPSKPSKRSFIEDLLFNKVTLADAGFIKQYGDCLGDIAARDLICAQKFNGLTVLPPLLTDEMIAQYTSALLAGTITSGWWFGAGAALQIPFAMQMAYRFNGIGVTQNVLYENQKLIANQFNSAIGKIQDSLSSTASALGKLQDVVNQNAQALNTLVKQLSSNFGAISSVLNDILSRLDPPEAEVQIDRLITGRLQSLQTYVTQQLIRAAEIRWSANLAATKMSECVLGQSKRVDFCGKGYHLMSFPQSAPHGVVFLHVTYVPAQEKNFTTAPAICHDGKAHFPREGVFVSNGTHWFVTQRNFYEPQIITTDNTFVSGNCDVVIGIVNNTVYDPLQPELESFKEELDKYFKNHTSPDVDLGDISGINASVVNIQKEIDRLNEVAKNLNESLIDLQELGKYEQYIKWPWYIWLGFIAGLIAIVMVTIMLCCMTSCCSCLKGCCSCGSCCKFDEDDSEPVLKGVKLHYT

SEQ ID NO: 446 - protein, 1273 aa, Artificial Sequence
  SARS-CoV-2/2019-nCoV/USA-CruiseA-18/2020__MT159716.1 spike protein (1-1273)(K986P_V987P_T887W_A1020W)
MFVFLVLLPLVSSQCVNLTTRTQLPPAYTNSFTRGVYYPDKVFRSSVLHSTQDLFLPFFSNVTWFHAIHVSGTNGTKRFDNPVLPFNDGVYFASTEKSNIIRGWIFGTTLDSKTQSLLIVNNATNVVIKVCEFQFCNDPFLGVYYHKNNKSWMESELRVYSSANNCTFEYVSQPFLMDLEGKQGNFKNLREFVFKNIDGYFKIYSKHTPINLVRDLPQGFSALEPLVDLPIGINITRFQTLLALHRSYLTPGDSSSGWTAGAAAYYVGYLQPRTFLLKYNENGTITDAVDCALDPLSETKCTLKSFTVEKGIYQTSNFRVQPTESIVRFPNITNLCPFGEVFNATRFASVYAWNRKRISNCVADYSVLYNSASFSTFKCYGVSPTKLNDLCFTNVYADSFVIRGDEVRQIAPGQTGKIADYNYKLPDDFTGCVIAWNSNNLDSKVGGNYNYLYRLFRKSNLKPFERDISTEIYQAGSTPCNGVEGFNCYFPLQSYGFQPTNGVGYQPYRVVVLSFELLHAPATVCGPKKSTNLVKNKCVNFNFNGLTGTGVLTESNKKFLPFQQFGRDIADTTDAVRDPQTLEILDITPCSFGGVSVITPGTNTSNQVAVLYQDVNCTEVPVAIHADQLTPTWRVYSTGSNVFQTRAGCLIGAEHVNNSYECDIPIGAGICASYQTQTNSPRRARSVASQSIIAYTMSLGAENSVAYSNNSIAIPTNFTISVTTEILPVSMTKTSVDCTMYICGDSTECSNLLLQYGSFCTQLNRALTGIAVEQDKNTQEVFAQVKQIYKTPPIKDFGGFNFSQILPDPSKPSKRSFIEDLLFNKVTLADAGFIKQYGDCLGDIAARDLICAQKFNGLTVLPPLLTDEMIAQYTSALLAGTITSGWWFGAGAALQIPFAMQMAYRFNGIGVTQNVLYENQKLIANQFNSAIGKIQDSLSSTASALGKLQDVVNQNAQALNTLVKQLSSNFGAISSVLNDILSRLDPPEAEVQIDRLITGRLQSLQTYVTQQLIRAAEIRWSANLAATKMSECVLGQSKRVDFCGKGYHLMSFPQSAPHGVVFLHVTYVPAQEKNFTTAPAICHDGKAHFPREGVFVSNGTHWFVTQRNFYEPQIITTDNTFVSGNCDVVIGIVNNTVYDPLQPELDSFKEELDKYFKNHTSPDVDLGDISGINASVVNIQKEIDRLNEVAKNLNESLIDLQELGKYEQYIKWPWYIWLGFIAGLIAIVMVTIMLCCMTSCCSCLKGCCSCGSCCKFDEDDSEPVLKGVKLHYT

SEQ ID NO: 447 - protein, 1273 aa, Artificial Sequence
  SARS-CoV-2/SARS-CoV-2/Yunnan-01/human/2020/CHN__MT049951.1 spike protein (1-1273)(K986P_V987P_T887W_A1020W)
MFVFLVLLPLVSSQCVNLTTRTQLPPANTNSFTRGVYYPDKVFRSSVLHSTQDLFLPFFSNVTWFHAIHVSGTNGTKRFDNPVLPFNDGVYFASTEKSNIIRGWIFGTTLDSKTQSLLIVNNATNVVIKVCEFQFCNDPFLGVYYHKNNKSWMESEFRVYSSANNCTFEYVSQPFLMDLEGKQGNFKNLREFVFKNIDGYFKIYSKHTPINLVRDLPQGFSALEPLVDLPIGINITRFQTLLALHRSYLTPGDSSSGWTAGAAAYYVGYLQPRTFLLKYNENGTITDAVDCALDPLSETKCTLKSFTVEKGIYQTSNFRVQPTESIVRFPNITNLCPFGEVFNATRFASVYAWNRKRISNCVADYSVLYNSASFSTFKCYGVSPTKLNDLCFTNVYADSFVIRGDEVRQIAPGQTGKIADYNYKLPDDFTGCVIAWNSNNLDSKVGGNYNYLYRLFRKSNLKPFERDISTEIYQAGSTPCNGVEGFNCYFPLQSYGFQPTNGVGYQPYRVVVLSFELLHAPATVCGPKKSTNLVKNKCVNFNFNGLTGTGVLTESNKKFLPFQQFGRDIADTTDAVRDPQTLEILDITPCSFGGVSVITPGTNTSNQVAVLYQDVNCTEVPVAIHADQLTPTWRVYSTGSNVFQTRAGCLIGAEHVNNSYECDIPIGAGICASYQTQTNSPRRARSVASQSIIAYTMSLGAENSVAYSNNSIAIPTNFTISVTTEILPVSMTKTSVDCTMYICGDSTECSNLLLQYGSFCTQLNRALTGIAVEQDKNTQEVFAQVKQIYKTPPIKDFGGFNFSQILPDPSKPSKRSFIEDLLFNKVTLADAGFIKQYGDCLGDIAARDLICAQKFNGLTVLPPLLTDEMIAQYTSALLAGTITSGWWFGAGAALQIPFAMQMAYRFNGIGVTQNVLYENQKLIANQFNSAIGKIQDSLSSTASALGKLQDVVNQNAQALNTLVKQLSSNFGAISSVLNDILSRLDPPEAEVQIDRLITGRLQSLQTYVTQQLIRAAEIRWSANLAATKMSECVLGQSKRVDFCGKGYHLMSFPQSAPHGVVFLHVTYVPAQEKNFTTAPAICHDGKAHFPREGVFVSNGTHWFVTQRNFYEPQIITTDNTFVSGNCDVVIGIVNNTVYDPLQPELDSFKEELDKYFKNHTSPDVDLGDISGINASVVNIQKEIDRLNEVAKNLNESLIDLQELGKYEQYIKWPWYIWLGFIAGLIAIVMVTIMLCCMTSCCSCLKGCCSCGSCCKFDEDDSEPVLKGVKLHYT

SEQ ID NO: 448 - protein, 1273 aa, Artificial Sequence
  SARS-CoV-2/USA/WA-UW292/2020__EPI_ISL_418077 spike protein (1-1273)(K986P_V987P_T887W_A1020W)
MFVFLVLLPLVSSQCVNLTTRTQLPPAYTNSFTRGVYYPDKVFRSSVLHSTQDLFLPFFSNVTWFHAIHVSGTNGTKRFDNPVLPFNDGVYFASTEKSNIIRGWIFGTTLDSKTQSLLIVNNATNVVIKVCEFQFCNDPFLGVYYHKNNKSWMESEFRVYSSANNCTFEYVSQPFLMDLEGKQGNFKNLREFVFKNIDGYFKIYSKHTPINLVRDLPQGFSALEPLVDLPIGINITRFQTLLALHRSYLTPGDSSSGWTAGAAAYYVGYLQPRTFLLKYNENGTITDAVDCALDPLSETKCTLKSFTVEKGIYQTSNFRVQPTESIVRFPNITNLCPFGEVFNATRFASVYAWNRKRISNCVADYSVLYNSASFSTFKCYGVSPTKLNDLCFTNVYADSFVIRGDEVRQIAPGQTGKIADYNYKLPDDFTGCVIAWNSNNLDSKVGGNYNYLYRLFRKSNLKPFERDISTEIYQASSTPCNGVEGFNCYFPLQSYGFQPTNGVGYQPYRVVVLSFELLHAPATVCGPKKSTNLVKNKCVNFNFNGLTGTGVLTESNKKFLPFQQFGRDIADTTDAVRDPQTLEILDITPCSFGGVSVITPGTNTSNQVAVLYQDVNCTEVPVAIHADQLTPTWRVYSTGSNVFQTRAGCLIGAEHVNNSYECDIPIGAGICASYQTQTNSPRRARSVASQSIIAYTMSLGAENSVAYSNNSIAIPTNFTISVTTEILPVSMTKTSVDCTMYICGDSTECSNLLLQYGSFCTQLNRALTGIAVEQDKNTQEVFAQVKQIYKTPPIKDFGGFNFSQILPDPSKPSKRSFIEDLLFNKVTLADAGFIKQYGDCLGDIAARDLICAQKFNGLTVLPPLLTDEMIAQYTSALLAGTITSGWWFGAGAALQIPFAMQMAYRFNGIGVTQNVLYENQKLIANQFNSAIGKIQDSLSSTASALGKLQDVVNQNAQALNTLVKQLSSNFGAISSVLNDILSRLDPPEAEVQIDRLITGRLQSLQTYVTQQLIRAAEIRWSANLAATKMSECVLGQSKRVDFCGKGYHLMSFPQSAPHGVVFLHVTYVPAQEKNFTTAPAICHDGKAHFPREGVFVSNGTHWFVTQRNFYEPQIITTDNTFVSGNCDVVIGIVNNTVYDPLQPELDSFKEELDKYFKNHTSPDVDLGDISGINASVVNIQKEIDRLNEVAKNLNESLIDLQELGKYEQYIKWPWYIWLGFIAGLIAIVMVTIMLCCMTSCCSCLKGCCSCGSCCKFDEDDSEPVLKGVKLHYT

SEQ ID NO: 449 - protein, 1273 aa, Artificial Sequence
  SARS-CoV-2/Iceland/192/2020__EPI_ISL_417819 spike protein (1-1273)(K986P_V987P_T887W_A1020W)
MFVFFVLLPLVSSQCVNLTTRTQLPPAYTNSFTRGVYYPDKVFRSSVLHSTQDLFLPFFSNVTWFHAIHVSGTNGTKRFDNPVLPFNDGVYFASTEKSNIIRGWIFGTTLDSKTQSLLIVNNATNVVIKVCEFQFCNDPFLGVYYHKNNKSWMESEFRVYSSANNCTFEYVSQPFLMDLEGKQGNFKNLREFVFKNIDGYFKIYSKHTPINLVRDLPQGFSALEPLVDLPIGINITRFQTLLALHRSYLTPGDSSSGWTAGAAAYYVGYLQPRTFLLKYNENGTITDAVDCALDPLSETKCTLKSFTVEKGIYQTSNFRVQPTESIVRFPNITNLCPFGEVFNATRFASVYAWNRKRISNCVADYSVLYNSASFSTFKCYGVSPTKLNDLCFTNVYADSFVIRGDEVRQIAPGQTGKIADYNYKLPDDFTGCVIAWNSNNLDSKVGGNYNYLYRLFRKSNLKPFERDISTEIYQAGSTPCNGVEGFNCYFPLQSYGFQPTNGVGYQPYRVVVLSFELLHAPATVCGPKKSTNLVKNKCVNFNFNGLTGTGVLTESNKKFLPFQQFGRDIADTTDAVRDPQTLEILDITPCSFGGVSVITPGTNTSNQVAVLYQGVNCTEVPVAIHADQLTPTWRVYSTGSNVFQTRAGCLIGAEHVNNSYECDIPIGAGICASYQTQTNSPRRARSVASQSIIAYTMSLGAENSVAYSNNSIAIPTNFTISVTTEILPVSMTKTSVDCTMYICGDSTECSNLLLQYGSFCTQLNRALTGIAVEQDKNTQEVFAQVKQIYKTPPIKDFGGFNFSQILPDPSKPSKRSFIEDLLFNKVTLADAGFIKQYGDCLGDIAARDLICAQKFNGLTVLPPLLTDEMIAQYTSALLAGTITSGWWFGAGAALQIPFAMQMAYRFNGIGVTQNVLYENQKLIANQFNSAIGKIQDSLSSTASALGKLQDVVNQNAQALNTLVKQLSSNFGAISSVLNDILSRLDPPEAEVQIDRLITGRLQSLQTYVTQQLIRAAEIRWSANLAATKMSECVLGQSKRVDFCGKGYHLMSFPQSAPHGVVFLHVTYVPAQEKNFTTAPAICHDGKAHFPREGVFVSNGTHWFVTQRNFYEPQIITTDNTFVSGNCDVVIGIVNNTVYDPLQPELDSFKEELDKYFKNHTSPDVDLGDISGINASVVNIQKEIDRLNEVAKNLNESLIDLQELGKYEQYIKWPWYIWLGFIAGLIAIVMVTIMLCCMTSCCSCLKGCCSCGSCCKFDEDDSEPVLKGVKLHYT

SEQ ID NO: 450 - protein, 1273 aa, Artificial Sequence
  SARS-CoV-2/Belgium/ULG-6939/2020__EPI_ISL_417020 spike protein (1-1273)(K986P_V987P_T887W_A1020W)
MFVFLVLLPLVSSQCVNLTTRTQLPPAYTNSFTRGVYYPDKVFRSSVLHSTQDLFLPFFSNVTWFHAIHVSGTNGTKRFDNPVLPFNDGVYFASTEKSNIIRGWIFGTTLDSKTQSLLIVNNATNVVIKVCEFQFCNDPFLGVYYHKNNKSWMESEFRVYSSANNCTFEYVSQPFLMDLEGKQGNFKNLREFVFKNIDGYFKIYSKHTPINLVRDLPQGFSALEPLVDLPIGINITRFQTLLALHRSYLTPGDSSSGWTAGAAAYYVGYLQPRTFLLKYNENGTITDAVDCALDPLSETKCTLKSFTVEKGIYQTSNFRVQPTESIVRFPNITNLCPFGEVFNATRFASVYAWNRKRISNCVADYSVLYNSASFSTFKCYGVSPTKLNDLCFTNVYADSFVIRGDEVRQIAPGQTGKIADYNYKLPDDFTGCVIAWNSNNLDSKVGGNYNYLYRLFRKSNLKPFERDISTEIYQAGSTPCNGVEGFNCYFPLQSYGFQPTNGVGYQPYRVVVLSFELLHAPATVCGPKKSTNLVKNKCVNFNFNGLTGTGVLTESNKKFLPFQQFGRDIADTTDAVRDPQTLEILDITPCSFGGVSVITPGTNTSNQVAVLYQGVNCTEVPVAIHADQLTPTWRVYSTGSNVFQTRAGCLIGAEHVNNSYECDIPIGAGICASYQTQTNSPRRARSVASQSIIAYTMSLGAENSVVYSNNSIAIPTNFTISVTTEILPVSMTKTSVDCTMYICGDSTECSNLLLQYGSFCTQLNRALTGIAVEQDKNTQEVFAQVKQIYKTPPIKDFGGFNFSQILPDPSKPSKRSFIEDLLFNKVTLADAGFIKQYGDCLGDIAARDLICAQKFNGLTVLPPLLTDEMIAQYTSALLAGTITSGWWFGAGAALQIPFAMQMAYRFNGIGVTQNVLYENQKLIANQFNSAIGKIQDSLSSTASALGKLQDVVNQNAQALNTLVKQLSSNFGAISSVLNDILSRLDPPEAEVQIDRLITGRLQSLQTYVTQQLIRAAEIRWSANLAATKMSECVLGQSKRVDFCGKGYHLMSFPQSAPHGVVFLHVTYVPAQEKNFTTAPAICHDGKAHFPREGVFVSNGTHWFVTQRNFYEPQIITTDNTFVSGNCDVVIGIVNNTVYDPLQPELDSFKEELDKYFKNHTSPDVDLGDISGINASVVNIQKEIDRLNEVAKNLNESLIDLQELGKYEQYIKWPWYIWLGFIAGLIAIVMVTIMLCCMTSCCSCLKGCCSCGSCCKFDEDDSEPVLKGVKLHYT

SEQ ID NO: 451 - protein, 1273 aa, Artificial Sequence
  SARS-CoV-2/France/HF2496/2020__EPI_ISL_418231 spike protein (1-1273)(K986P_V987P_T887W_A1020W)
MFVFLVLLPLVSSQCVNLTTRTQLPPAYTNSFTRGVYYPDKVFRSSVLHSTQDLFLPFFSNVTWFHAIHVSGTNGTKRFDNPVLPFNDGVYFASTEKSNIIRGWIFGTTLDSKTQSLLIVNNATNVVIKVCEFQFCNDPFLGVYYHKNNKSWMESEFRVYSSANNCTFEYVSQPFLMDLEGKQGNFKNLREFVFKNIDGYFKIYSKHTPINLVRDLPQGFSALEPLVDLPIGINITRFQTLLALHRSYLTPGDSSSGWTAGAAAYYVGYLQPRTFLLKYNENGTITDAVDCALDPLSETKCTLKSFTVEKGIYQTSNFRVQPTESIVRFPNITNLCPFGEVFNATRFASVYAWNRKRISNCVADYSVLYNSASFSTFKCYGVSPTKLNDLCFTNVYADSFVIRGDEVRQIAPGQTGKIADYNYKLPDDFTGCVIAWNSNNLDSKVGGNYNYLYRLFRKSNLKPFERDISTEIYQAGSTPCNGVEGFNCYFPLQSYGFQPTNGVGYQPYRVVVLSFELLHAPATVCGPKKSTNLVKNKCVNFNFNGLTGTGVLTESNKKFLPFQQFGRDIADTTDAVRDPQTLEILDITPCSFGGVSVITPGTNTSNQVAVLYQGVNCTEVPVAIHADQLTPTWRVYSTGSNVFQTRAGCLIGAEHVNNSYECDIPIGAGICASYQTQTNSPRRARSVASQSIIAYTMSLGAENSVAYSNNSIAIPTNFTISVTTEILPVSMTKTSVDCTMYICGDSTECSNLLLQYGSFCTQLNRALTGIAVEQDKNTQEVFAQVKQIYKTPPIKDFGGFNFSQILPDPSKPSKRSFIEDLLFNKVTLADAGFIKQYGDCLGDIVARDLICAQKFNGLTVLPPLLTDEMIAQYTSALLAGTITSGWWFGAGAALQIPFAMQMAYRFNGIGVTQNVLYENQKLIANQFNSAIGKIQDSLSSTASALGKLQDVVNQNAQALNTLVKQLSSNFGAISSVLNDILSRLDPPEAEVQIDRLITGRLQSLQTYVTQQLIRAAEIRWSANLAATKMSECVLGQSKRVDFCGKGYHLMSFPQSAPHGVVFLHVTYVPAQEKNFTTAPAICHDGKAHFPREGVFVSNGTHWFVTQRNFYEPQIITTDNTFVSGNCDVVIGIVNNTVYDPLQPELDSFKEELDKYFKNHTSPDVDLGDISGINASVVNIQKEIDRLNEVAKNLNESLIDLQELGKYEQYIKWPWYIWLGFIAGLIAIVMVTIMLCCMTSCCSCLKGCCSCGSCCKFDEDDSEPVLKGVKLHYT

SEQ ID NO: 452 - protein, 1273 aa, Artificial Sequence
  SARS-CoV-2/USA/WA-UW291/2020__EPI_ISL_418076 spike protein (1-1273)(K986P_V987P_T887W_A1020W)
MFVFLVLLPLVSSQCVNLTTRTQLPPAYTNSFTRGVYYPDKVFRSSVLHSTQDLFLPFFSNVTWFHAIHVSGTNGTKRFDNPVLPFNDGVYFASTEKSNIIRGWIFGTTLDSKTQSLLIVNNATNVVIKVCEFQFCNDPFLGVYYHKNNKSWMESEFRVYSSANNCTFEYVSQPFLMDLEGKQGNFKNLREFVFKNIDGYFKIYSKHTPINLVRDLPQGFSALEPLVDLPIGINITRFQTLLALHRSYLTPGDSSSGWTAGAAAYYVGYLQPRTFLLKYNENGTITDAVDCALDPLSETKCTLKSFTVEKGIYQTSNFRVQPTESIVRFPNITNLCPFGEVFNATRFASVYAWNRKRISNCVADYSVLYNSASFSTFKCYGVSPTKLNDLCFTNVYADSFVIRGDEVRQIAPGQTGKIADYNYKLPDDFTGCVIAWNSNNLDSKVGGNYNYLYRLFRKSNLKPFERDISTEIYQAGSTPCNGVEGFNCYFPLQSYGFQPTNGVGYQPYRVVVLSFELLHAPATVCGPKKSTNLVKNKCVNFNFNGLTGTGVLTESNKKFLPFQQFGRDIADTTDAVRDPQTLEILDITPCSFGGVSVITPGTNTSNQVAVLYQGVNCTEVPVAIHADQLTPTWRVYSTGSNVFQTRAGCLIGAEHVNNSYECDIPIGAGICASYQTQTNSPRRARSVASQSIIAYTMSLGAENSVAYSNNSIAIPTNFTISVTTEILPVSMTKTSVDCTMYICGDSTECSNLLLQYGSFCTQLNRALTGIAVEQDKNTQEVFAQVKQIYKTPPIKDFGGFNFSQILPDPSKPSKRSFIEDLLFNKVTLADAGFIKQYGDCLGDIAARDLICAQKFNGLTVLPPLLTDEMIAQYTSALLAGTITSGWWFGAGAALQIPFAMQMAYRFNGIGVTQNVLYENQKLIANQFNSAIGKIQYSLSSTASALGKLQDVVNQNAQALNTLVKQLSSNFGAISSVLNDILSRLDPPEAEVQIDRLITGRLQSLQTYVTQQLIRAAEIRWSANLAATKMSECVLGQSKRVDFCGKGYHLMSFPQSAPHGVVFLHVTYVPAQEKNFTTAPAICHDGKAHFPREGVFVSNGTHWFVTQRNFYEPQIITTDNTFVSGNCDVVIGIVNNTVYDPLQPELDSFKEELDKYFKNHTSPDVDLGDISGINASVVNIQKEIDRLNEVAKNLNESLIDLQELGKYEQYIKWPWYIWLGFIAGLIAIVMVTIMLCCMTSCCSCLKGCCSCGSCCKFDEDDSEPVLKGVKLHYT

SEQ ID NO: 453 - protein, 1273 aa, Artificial Sequence
  SARS-CoV-2/Portugal/PT0034/2020__EPI_ISL_418019 spike protein (1-1273)(K986P_V987P_T887W_A1020W)
MFVFLVLLPLVSSQCVNLTTRTQLPPAYTNSFTRGVYYPDKVFRSSVLHSTQDLFLPFFSNVTWFHAIHVSGTNGTKRFDNPVLPFNDGVYFASTEKSNIIRGWIFGTTLDSKTQSLLIVNNATNVVIKVCEFQFCNDPFLGVYYHKNNKSWMESEFRVYSSANNCTFEYVSQPFLMDLEGKQGNFKNLREFVFKNIDGYFKIYSKHTPINLVRDLPQGFSALEPLVDLPIGINITRFQTLLALHRSYLTPGDSSSGWTAGAAAYYVGYLQPRTFLLKYNENGTITDAVDCALDPLSETKCTLKSFTVEKGIYQTSNFRVQPTESIVRFPNITNLCPFGEVFNATRFASVYAWNRKRISNCVADYSVLYNSASFSTFKCYGVSPTKLNDLCFTNVYADSFVIRGDEVRQIAPGQTGKIADYNYKLPDDFTGCVIAWNSNNLDSKVGGNYNYLYRLFRKSNLKPFERDISTEIYQAGSTPCNGVEGFNCYFPLQSYGFQPTNGVGYQPYRVVVLSFELLHAPATVCGPKKSTNLVKNKCVNFNFNGLTGTGVLTESNKKFLPFQQFGRDIADTTDAVRDPQTLEILDITPCSFGGVSVITPGTNTSNQVAVLYQGVNCTEVPVAIHADQLTPTWRVYSTGSNVFQTRAGCLIGAEHVNNSYECDIPIGAGICASYQTQTNSPRRARSVASQSIIAYTMSLGAENSVAYSNNSIAIPTNFTISVTTEILPVSMTKTSVDCTMYICGDSTECSNLLLQYGSFCTQLNRALTGIAVEQDKNTQEVFAQVKQIYKTPPIKDFGGFNFSQILPDPSKPSKRSFIEDLLFNKVTLADAGFIKQYGDCLGDIAARDLICAQKFNGLTVLPPLLTDEMIAQYTSALLAGTITSGWWFGAGAALQIPFAMQMAYRFNGIGVTQNVLYENQKLIANQFNSAIGKIQDSLSSTASALGKLQDVVNQNAQALNTLVKQLSSNFGAISSVLNDILSRLDPPEAEVQIDRLITGRLQSLQTYVTQQLIRAAEIRWSANLAATKMSECVLGQSKRVDFCGKGYHLMSFPQSAPHGVVFLHVTYVPAQEKNFTTAPAICHDGKAHFPREGVFVSNGTHWFVTQRNFYEPQIITTDNTFVSGNCDVVIGIVNNTVYDPLQPELDSFKEELDKYFKNHTSPDVDLGDISGINASVVNIQKEIDRLNEVAKNLNESLIDLQELGKYEQYIKWPWYIWLGFIAGLIAIVMVTIMLCCITSCCSCLKGCCSCGSCCKFDEDDSEPVLKGVKLHYT

SEQ ID NO: 454 - protein, 1273 aa, Artificial Sequence
  SARS-CoV-2/Iceland/202/2020__EPI_ISL_417750 spike protein (1-1273)(K986P_V987P_T887W_A1020W)
MFVFLVLLPLVSSQCVNLTTRTQLPPAYTNSFTRGVYYPDKVFRSSVLHSTQDLFLPFFSNVTWFHAIHVSGTNGTKRFDNPVLPFNDGVYFASTEKSNIIRGWIFGTTLDSKTQSLLIVNNATNVVIKVCEFQFCNDPFLGVYYHKNNKSWMESEFRVYSSANNCTFEYVSQPFLMDLEGKQGNFKNLREFVFKNIDGYFKIYSKHTPINLVRDLPQGFSALEPLVDLPIGINITRFQTLLALHRSYLTPGDSSSGWTAGAAAYYVGYLQPRTFLLKYNENGTITDAVDCALDPLSETKCTLKSFTVEKGIYQTSNFRVQPTESIVRFPNITNLCPFGEVFNATRFASVYAWNRKRISNCVADYSVLYNSASFSTFKCYGVSPTKLNDLCFTNVYADSFVIRGDEVRQIAPGQTGKIADYNYKLPDDFTGCVIAWNSNNLDSKVGGNYNYLYRLFRKSNLKPFERDISTEIYQAGSTPCNGVEGFNCYFPLQSYGFQPTNGVGYQPYRVVVLSFELLHAPATVCGPKKSTNLVKNKCVNFNFNGLTGTGVLTESNKKFLPFQQFGRDIADTTDAVRDPQTLEILDITPCSFGGVSVITPGTNTSNQVAVLYQDVNCTEVPVAIHADQLTPTWRVYSTGSNVFQTRAGCLIGAEHVNNSYECDIPIGAGICASYQTQTNSPRRARSVASQSIIAYTMSLGAENSVAYSNNSIAIPTNFTISVTTEILPVSMTKTSVDCTMYICGDSTECSNLLLQYGSFCTQLNRALTGIAVEQDKNTQEVFAQVKQIYKTPPIKDFGGFNFSQILPDPSKPSKRSFIEDLLFNKVTLADAGFIKQYGDCLGDIAARDLICAQKFNGLTVLPPLLTDEMIAQYTSALLAGTITSGWWFGAGAALQIPFAMQMAYRFNGIGVTQNVLYENQKLIANQFNSAIGKIQDSLSSTASALGKLQDVVNQNAQALNTLVKQLSSNFGAISSVLNDILSRLDPPEAEVQIDRLITGRLQSLQTYVTQQLIRAAEIRWSANLAATKMSECVLGQSKRVDFCGKGYHLMSFPQSAPHGVVFLHVTYVPAQEKNFTTAPAICHDGKAHFPREGVFVSNGTHWFVTQRNFYEPQIITTDNTFVSGNCDVVIGIVNNTVYDPLQPELDSFKEELDKYFKNHTSPDVDLGDIPGINASVVNIQKEIDRLNEVAKNLNESLIDLQELGKYEQYIKWPWYIWLGFIAGLIAIVMVTIMLCCMTSCCSCLKGCCSCGSCCKFDEDDSEPVLKGVKLHYT

SEQ ID NO: 455 - protein, 1273 aa, Artificial Sequence
  SARS-CoV-2/USA/WA-UW261/2020__EPI_ISL_418046 spike protein (1-1273)(K986P_V987P_T887W_A1020W)
MFVFLVLLPLVSSQCVNLTTRTQLPPAYTNSFTRGVYYPDKVFRSSVLHSTQDLFLPFFSNVTWFHAIHVSGTNGTKRFDNPVLPFNDGVYFASTEKSNIIRGWIFGTTLDSKTQSLLIVNNATNVVIKVCEFQFCNDPFLGVYYHKNNKSWMESEFRVYSSANNCTFEYVSQPFLMDLEGKQGNFKNLREFVFKNIDGYFKIYSKHTPINLVRDLPQGFSALEPLVDLPIGINITRFQTLLALHRSYLTPGDSSSGWTAGAAAYYVGYLQPRTFLLKYNENGTITDAVDCALDPLSETKCTLKSFTVEKGIYQTSNFRVQPTESIVRFPNITNLCPFGEVFNATRFTSVYAWNRKRISNCVADYSVLYNSASFSTFKCYGVSPTKLNDLCFTNVYADSFVIRGDEVRQIAPGQTGKIADYNYKLPDDFTGCVIAWNSNNLDSKVGGNYNYLYRLFRKSNLKPFERDISTEIYQAGSTPCNGVEGFNCYFPLQSYGFQPTNGVGYQPYRVVVLSFELLHAPATVCGPKKSTNLVKNKCVNFNFNGLTGTGVLTESNKKFLPFQQFGRDIADTTDAVRDPQTLEILDITPCSFGGVSVITPGTNTSNQVAVLYQDVNCTEVPVAIHADQLTPTWRVYSTGSNVFQTRAGCLIGAEHVNNSYECDIPIGAGICASYQTQTNSPRRARSVASQSIIAYTMSLGAENSVAYSNNSIAIPTNFTISVTTEILPVSMTKTSVDCTMYICGDSTECSNLLLQYGSFCTQLNRALTGIAVEQDKNTQEVFAQVKQIYKTPPIKDFGGFNFSQILPDPSKPSKRSFIEDLLFNKVTLADAGFIKQYGDCLGDIAARDLICAQKFNGLTVLPPLLTDEMIAQYTSALLAGTITSGWWFGAGAALQIPFAMQMAYRFNGIGVTQNVLYENQKLIANQFNSAIGKIQDSLSSTASALGKLQDVVNQNAQALNTLVKQLSSNFGAISSVLNDILSRLDPPEAEVQIDRLITGRLQSLQTYVTQQLIRAAEIRWSANLAATKMSECVLGQSKRVDFCGKGYHLMSFPQSAPHGVVFLHVTYVPAQEKNFTTAPAICHDGKAHFPREGVFVSNGTHWFVTQRNFYEPQIITTDNTFVSGNCDVVIGIVNNTVYDPLQPELDSFKEELDKYFKNHTSPDVDLGDISGINASVVNIQKEIDRLNEVAKNLNESLIDLQELGKYEQYIKWPWYIWLGFIAGLIAIVMVTIMLCCMTSCCSCLKGCCSCGSCCKFDEDDSEPVLKGVKLHYT

SEQ ID NO: 456 - protein, 1273 aa, Artificial Sequence
  SARS-CoV-2/Portugal/PT0035/2020__EPI_ISL_418020 spike protein (1-1273)(K986P_V987P_T887W_A1020W)
MFVFLVLLPLVSSQCVNLTTRTQLPPAYTNSFTRGVYYPDKVFRSSVLHSTQDLFLPFFSNVTWFHAIHVSGTNGTKRFDNPVLPFNDGVYFASTEKSNIIRGWIFGTTLDSKTQSLLIVNNATNVVIKVCEFQFCNDPFLGVYYHKNNKSWMESEFRVYSSANNCTFEYVSQPFLMDLEGKQGNFKNLREFVFKNIDGYFKIYSKHTPINLVRDLPQGFSALEPLVDLPIGINITRFQTLLALHRSYLTPGDSSSGWTAGAAAYYVGYLQPRTFLLKYNENGTITDAVDCALDPLSETKCTLKSFTVEKGIYQTSNFRVQPTESIVRFPNITNLCPFGEVFNATRFASVYAWNRKRISNCVADYSVLYNSASFSTFKCYGVSPTKLNDLCFTNVYADSFVIRGDEVRQIAPGQTGKIADYNYKLPDDFTGCVIAWNSNNLDSKVGGNYNYLYRLFRKSNLKPFERDISTEIYQAGSTPCNGVEGFNCYFPLQSYGFQPTNGVGYQPYRVVVLSFELLHAPATVCGPKKSTNLVKNKCVNFNFNGLTGTGVLTESNKKFLPFQQFGRDIADTTDAVRDPQTLEILDITPCSFGGVSVITPGTNTSNQVAVLYQDVNCTEVPVAIHADQLTPTWRVYSTGSNVFQTRAGCLIGAEHVNNSYECDIPIGAGICASYQTQTNSPRRARSVASQSIIAYTMSLGAENSVAYSNNSIAIPTNFTISVTTEILPVSMTKTSVDCTMYICGDSTECSNLLLQYGSFCTQLNRALTGIAVEQDKNTQEVFAQVKQIYKTPPIKDFGGFNFSQILPDPSKPSKRSFIEDLLFNKVTLADAGFIKQYGDCLGDISARDLICAQKFNGLTVLPPLLTDEMIAQYTSALLAGTITSGWWFGAGAALQIPFAMQMAYRFNGIGVTQNVLYENQKLIANQFNSAIGKIQDSLSSTASALGKLQDVVNQNAQALNTLVKQLSSNFGAISSVLNDILSRLDPPEAEVQIDRLITGRLQSLQTYVTQQLIRAAEIRWSANLAATKMSECVLGQSKRVDFCGKGYHLMSFPQSAPHGVVFLHVTYVPAQEKNFTTAPAICHDGKAHFPREGVFVSNGTHWFVTQRNFYEPQIITTDNTFVSGNCDVVIGIVNNTVYDPLQPELDSFKEELDKYFKNHTSPDVDLGDISGINASVVNIQKEIDRLNEVAKNLNESLIDLQELGKYEQYIKWPWYIWLGFIAGLIAIVMVTIMLCCMTSCCSCLKGCCSCGSCCKFDEDDSEPVLKGVKLHYT

SEQ ID NO: 457 - protein, 1273 aa, Artificial Sequence
  SARS-CoV-2/USA/NY-NYUMC7/2020__EPI_ISL_418192 spike protein (1-1273)(K986P_V987P_T887W_A1020W)
MFVFLVLLPLVSSQCVNLTTRTQLPPAYTNSFTRGVYYPDKVFRSSVLHSTQDLFLPFFSNVTWFHAIHVSGTNGTKRFDNPVLPFNDGVYFASTEKSNIIRGWIFGTTLDSKTQSLLIVNNATNVVIKVCEFQFCNDPFLGVYHHKNNKSWMESEFRVYSSANNCTFEYVSQPFLMDLEGKQGNFKNLREFVFKNIDGYFKIYSKHTPINLVRDLPQGFSALEPLVDLPIGINITRFQTLLALHRSYLTPGDSSSGWTAGAAAYYVGYLQPRTFLLKYNENGTITDAVDCALDPLSETKCTLKSFTVEKGIYQTSNFRVQPTESIVRFPNITNLCPFGEVFNATRFASVYAWNRKRISNCVADYSVLYNSASFSTFKCYGVSPTKLNDLCFTNVYADSFVIRGDEVRQIAPGQTGKIADYNYKLPDDFTGCVIAWNSNNLDSKVGGNYNYLYRLFRKSNLKPFERDISTEIYQAGSTPCNGVEGFNCYFPLQSYGFQPTNGVGYQPYRVVVLSFELLHAPATVCGPKKSTNLVKNKCVNFNFNGLTGTGVLTESNKKFLPFQQFGRDIADTTDAVRDPQTLEILDITPCSFGGVSVITPGTNTSNQVAVLYQGVNCTEVPVAIHADQLTPTWRVYSTGSNVFQTRAGCLIGAEHVNNSYECDIPIGAGICASYQTQTNSPRRARSVASQSIIAYTMSLGAENSVAYSNNSIAIPTNFTISVTTEILPVSMTKTSVDCTMYICGDSTECSNLLLQYGSFCTQLNRALTGIAVEQDKNTQEVFAQVKQIYKTPPIKDFGGFNFSQILPDPSKPSKRSFIEDLLFNKVTLADAGFIKQYGDCLGDIAARDLICAQKFNGLTVLPPLLTDEMIAQYTSALLAGTITSGWWFGAGAALQIPFAMQMAYRFNGIGVTQNVLYENQKLIANQFNSAIGKIQDSLSSTASALGKLQDVVNQNAQALNTLVKQLSSNFGAISSVLNDILSRLDPPEAEVQIDRLITGRLQSLQTYVTQQLIRAAEIRWSANLAATKMSECVLGQSKRVDFCGKGYHLMSFPQSAPHGVVFLHVTYVPAQEKNFTTAPAICHDGKAHFPREGVFVSNGTHWFVTQRNFYEPQIITTDNTFVSGNCDVVIGIVNNTVYDPLQPELDSFKEELDKYFKNHTSPDVDLGDISGINASVVNIQKEIDRLNEVAKNLNESLIDLQELGKYEQYIKWPWYIWLGFIAGLIAIVMVTIMLCCMTSCCSCLKGCCSCGSCCKFDEDDSEPVLKGVKLHYT

SEQ ID NO: 458 - protein, 1273 aa, Artificial Sequence
  SARS-CoV-2/Iceland/189/2020__EPI_ISL_417709 spike protein (1-1273)(K986P_V987P_T887W_A1020W)
MFVFLVLLPLVSSQCVNLTTRTQLPPAYTNSFTRGVYYPDKVFRSSVLHSTQDLFLPFFSNVTWFHAIHVSGTNGTKRFDNPVLPFNDGVYFASTEKSNIIRGWIFGTTLDSKTQSLLIVNNATNVVIKVCEFQFCNDPFLGVYYHKNNKSWMESEFRVYSSANNCTFEYVSQPFLMDLEGKQGNFKNLREFVFKNIDGYFKIYSKHTPINLVRDLPQGFSALEPLVDLPIGINITRFQTLLALHRSYLTPGDSSSGWTAGAAAYYVGYLQPRTFLLKYNENGTITDAVDCALDPLSETKCTLKSFTVEKGIYQTSNFRVQPTESIVRFPNITNLCPFGEVFNATRFASVYAWNRKRISNCVADYSVLYNSASFSTFKCYGVSPTKLNDLCFTNVYADSFVIRGDEVRQIAPGQTGKIADYNYKLPDDFTGCVIAWNSNNLDSKVGGNYNYLYRLFRKSNLKPFERDISTEIYQAGSTPCNGVEGFNCYFPLQSYGFQPTNGVGYQPYRVVVLSFELLHAPATVCGPKKSTNLVKNKCVNFNFNGLTGTGVLTESNKKFLPFQQFGRDIADTTDAVRDPQTLEILDITPCSFGGVSVITPGTNTSNQVAVLYQGVNCTEVPVAIHADQLTPTWRVYSTGSNVFQTRAGCLIGAEHVNNSYECDIPIGAGICASYQTQTNSPRRARSVASQSIIAYTMSLGAENSVAYSNNSIAIPTNFTISVTTEILPVSMTKTSVDCTMYICGDSTECSNLLLQYGSFCTQLNRALTGIAVEQDKNTQEVFAQVKQIYKTPPIKDFGGFNFSQILPDPSKPSKRSFIEDLLFNKVTLADAGFTKQYGDCLGDIAARDLICAQKFNGLTVLPPLLTDEMIAQYTSALLAGTITSGWWFGAGAALQIPFAMQMAYRFNGIGVTQNVLYENQKLIANQFNSAIGKIQDSLSSTASALGKLQDVVNQNAQALNTLVKQLSSNFGAISSVLNDILSRLDPPEAEVQIDRLITGRLQSLQTYVTQQLIRAAEIRWSANLAATKMSECVLGQSKRVDFCGKGYHLMSFPQSAPHGVVFLHVTYVPAQEKNFTTAPAICHDGKAHFPREGVFVSNGTHWFVTQRNFYEPQIITTDNTFVSGNCDVVIGIVNNTVYDPLQPELDSFKEELDKYFKNHTSPDVDLGDISGINASVVNIQKEIDRLNEVAKNLNESLIDLQELGKYEQYIKWPWYIWLGFIAGLIAIVMVTIMLCCMTSCCSCLKGCCSCGSCCKFDEDDSEPVLKGVKLHYT

SEQ ID NO: 459 - protein, 1273 aa, Artificial Sequence
  SARS-CoV-2/Australia/NSW56/2020__EPI_ISL_417408 spike protein (1-1273)(K986P_V987P_T887W_A1020W)
MFVFLVLLPLVSSQCVNLTTRTQLPPAYTNSFTRGVYYPDKVFRSSVLHSTQDLFLPFFSNVTWFHAIHVSGTNGTKRFDNPVLPFNDGVYFASTEKSNIIRGWIFGTTLDSKTQSLLIVNNATNVVIKVCEFQFCNDPFLGVYYHKNNKSWMESEFRVYSSANNCTFEYVSQPFLMDLEGKQGNFKNLREFVFKNIDGYFKIYSKHTPINLVRDLPQGFSALEPLVDLPIGINITRFQTLLALHRSYLTPGDSSSGWTAGAAAYYVGYLQPRTFLLKYNENGTITDAVDCALDPLSETKCTLKSFTVEKGIYQTSNFRVQPTESIVRFPNITNLCPFGEVFNATRFASVYAWNRKRISNCVADYSVLYNSASFSTFKCYGVSPTKLNDLCFTNVYADSFVIRGDEVRQIAPGQTGKIADYNYKLPDDFTGCVIAWNSNNLDSKVGGNYNYLYRLFRKSNLKPFERDISTEIYQAGSTPCNGVEGFNCYFPLQSYGFQPTNGVGYQPYRVVVLSFELLHAPATVCGPKKSTNLVKNKCVNFNFNGLTGTGVLTESNKKFLPFQQFGRDIADTTDAVRDPQTLEILDITPCSFGGVSVITPGTNTSNQVAVLYQDVNCTEVPVAIHADQLTPTWRVYSTGSNVFQTRAGCLIGAEHVNNSYECDIPIGAGICASYQTQTNSPRRARSVASQSIIAYTMSLGAENSVAYSNNSIAIPTNFTISVTTEILPVSMTKTSVDCTMYICGDSTECSNLLLQYGSFCTQLNRALTGIAVEQDKNTQEVFAQVKQIYKTPPIKDFGGFNFSQILPDSSKPSKRSFIEDLLFNKVTLADAGFIKQYGDCLGDIAARDLICAQKFNGLTVLPPLLTDEMIAQYTSALLAGTITSGWWFGAGAALQIPFAMQMAYRFNGIGVTQNVLYENQKLIANQFNSAIGKIQDSLSSTASALGKLQDVVNQNAQALNTLVKQLSSNFGAISSVLNDILSRLDPPEAEVQIDRLITGRLQSLQTYVTQQLIRAAEIRWSANLAATKMSECVLGQSKRVDFCGKGYHLMSFPQSAPHGVVFLHVTYVPAQEKNFTTAPAICHDGKAHFPREGVFVSNGTHWFVTQRNFYEPQIITTDNTFVSGNCDVVIGIVNNTVYDPLQPELDSFKEELDKYFKNHTSPDVDLGDISGINASVVNIQKEIDRLNEVAKNLNESLIDLQELGKYEQYIKWPWYIWLGFIAGLIAIVMVTIMLCCMTSCCSCLKGCCSCGSCCKFDEDDSEPVLKGVKLHYT

SEQ ID NO: 460 - protein, 1273 aa, Artificial Sequence
  SARS-CoV-2/Iceland/280/2020__EPI_ISL_417608 spike protein (1-1273)(K986P_V987P_T887W_A1020W)
MFVFLVLLPLVSSQCVNLTTRTQLPPAYTNSFTRGVYYPDKVFRSSVLHSTQDLFLPFFSNVTWFHAIHVSGTNGTKRFDNPVLPFNDGVYFASTEKSNIIRGWIFGTTLDSKTQSLLIVNNATNVVIKVCEFQFCNDPFLGVYYHKNNKSWMESEFRVYSSANNCTFEYVSQPFLMDLEGKQGNFKNLREFVFKNIDGYFKIYSKHTPINLVRDLPQGFSALEPLVDLPIGINITRFQTLLALHRSYLTPGDSSSGWTAGAAAYYVGYLQPRTFLLKYNENGTITDAVDCALDPLSETKCTLKSFTVEKGIYQTSNFRVQPTESIVRFPNITNLCPFGEVFNATRFASVYAWNRKRISNCVADYSVLYNSASFSTFKCYGVSPTKLNDLCFTNVYADSFVIRGDEVRQIAPGQTGKIADYNYKLPDDFTGCVIAWNSNNLDSKVGGNYNYLYRLFRKSNLKPFERDISTEIYQAGSTPCNGVEGFNCYFPLQSYGFQPTNGVGYQPYRVVVLSFELLHAPATVCGPKKSTNLVKNKCVNFNFNGLTGTGVLTESNKKFLPFQQFGRDIADTTDAVRDPQTLEILDITPCSFGGVSVITPGTNTSNQVAVLYQGVNCTEVPVAIHADQLTPTWRVYSTGSNVFQTRAGCLIGAEHVNNSYECDIPIGAGICASYHTQTNSPRRARSVASQSIIAYTMSLGAENSVAYSNNSIAIPTNFTISVTTEILPVSMTKTSVDCTMYICGDSTECSNLLLQYGSFCTQLNRALTGIAVEQDKNTQEVFAQVKQIYKTPPIKDFGGFNFSQILPDPSKPSKRSFIEDLLFNKVTLADAGFIKQYGDCLGDIAARDLICAQKFNGLTVLPPLLTDEMIAQYTSALLAGTITSGWWFGAGAALQIPFAMQMAYRFNGIGVTQNVLYENQKLIANQFNSAIGKIQDSLSSTASALGKLQDVVNQNAQALNTLVKQLSSNFGAISSVLNDILSRLDPPEAEVQIDRLITGRLQSLQTYVTQQLIRAAEIRWSANLAATKMSECVLGQSKRVDFCGKGYHLMSFPQSAPHGVVFLHVTYVPAQEKNFTTAPAICHDGKAHFPREGVFVSNGTHWFVTQRNFYEPQIITTDNTFVSGNCDVVIGIVNNTVYDPLQPELDSFKEELDKYFKNHTSPDVDLGDISGINASVVNIQKEIDRLNEVAKNLNESLIDLQELGKYEQYIKWPWYIWLGFIAGLIAIVMVTIMLCCMTSCCSCLKGCCSCGSCCKFDEDDSEPVLKGVKLHYT

SEQ ID NO: 461 - protein, 1273 aa, Artificial Sequence
  SARS-CoV-2/Iceland/247/2020__EPI_ISL_417575 spike protein (1-1273)(K986P_V987P_T887W_A1020W)
MFVFLVLLPLVSSQCVNLTTRTQLPPAYTNSFTRGVYYPDKVFRSSVLHSTQDLFLPFFSNVTWFHAIHVSGTNGTKRFDNPVLPFNDGVYFASTEKSNIIRGWIFGTTLDSKTQSLLIVNNATNVVIKVCEFQFCNDPFLGVYYHKNNKSWMESEFRVYSSANNCTFEYVSQPFLMDLEGKQGNFKNLREFVFKNIDGYFKIYSKHTPINLVRDLPQGFSALEPLVDLPIGINITRFQTLLALHRSYLTPGDSSSGWTAGAAAYYVGYLQPRTFLLKYNENGTITDAVDCALDPLSETKCTLKSFTVEKGIYQTSNFRVQPTESIVRFPNITNLCPFGEVFNATRFASVYAWNRKRISNCVADYSVLYNSASFSTFKCYGVSPTKLNDLCFTNVYADSFVIRGDEVRQIAPGQTGKIADYNYKLPDDFTGCVIAWNSNNLDSKVGGNYNYLYRLFRKSNLKPFERDISTEIYQAGSTPCNGVEGFNCYFPLQSYGFQPTNGVGYQPYRVVVLSFELLHAPATVCGPKKSTNLVKNKCVNFNFNGLTGTGVLTESNKKFLPFQQFGRDIADTTDAVRDPQTLEILDITPCSFGGVSVITPGTNTSNQVAVLYQGVNCTEVPVAIHADQLTPTWRVYSTGSNVFQTRAGCLIGAEHVNNSYECDIPIGAGICASYQTQTNSPRRARSVASQSIIAYTMSLGAENSVAYSNNSIAIPTNFTISVTTEILPVSMTKTSVDCTMYICGDSTECSNLLLQYGSFCTQLNRALTGIAVEQDKNTQEVFAQVKQIYKTPPIKDFGGFNFSQILPDPSKPSKRSFIEDLLFNKVTLADAGFIKQYGDCLGDIAARDLICAQKFNGLTVLPPLLTDEMIAQYTSALLAGTITSGWWFGAGAALQIPFAMQMAYRFNGIGVTQNVLYENQKLIANQFNSAIGKIQDSLSSTASALGKLQDVVNQNAQALNTLVKQLSSNFGAISSVLNDILSRLDPPEAEVQIDRLITGRLQSLQTYVTQQLIRAAEIRWSANLAATKMSECVLGQSKRVDFCGKGYHLMSFPQSAPHGVVFLHVTYVPAQEKNFTTAPAICHDGKAHFPREGVFVSNGTHWFVTQRNFYEPQIITTDNTFVSGNCDVVIGIVNNTVYDPLQPELDSFKEELDKYFKNHTSPDVDLGDISGINASVVNIQKEIDRLNEVAKNLNESLIDLQELGKYEQYIKWPWYIWLGFIAGLIAIVIVTIMLCCMTSCCSCLKGCCSCGSCCKFDEDDSEPVLKGVKLHYT

SEQ ID NO: 462 - protein, 1273 aa, Artificial Sequence
  SARS-CoV-2/Iceland/238/2020__EPI_ISL_417566 spike protein (1-1273)(K986P_V987P_T887W_A1020W)
MFVFLVLLPLVSSQCVNLTTRTQLPPAYTNSFTRGVYYPDKVFRSSVLHSTQDLFLPFFSNVTWFHAIHVSGTNGTKRFDNPVLPFNDGVYFASTEKSNIIRGWIFGTTLDSKTQSLLIVNNATNVVIKVCEFQFCNDPFLGVYYHKNNKSWMESEFRVYSSANNCTFEYVSQPFLMDLEGKQGNFKNLREFVFKNIDGYFKIYSKHTPINLVRDLPQGFSALEPLVDLPIGINITRFQTLLALHRSYLTPGDSSSGWTAGAAAYYVGYLQPRTFLLKYNENGTITDAVDCALDPLSETKCTLKSFTVEKGIYQTSNFRVQPTESIVRFPNITNLCPFGEVFNATRFASVYAWNRKRISNCVADYSVLYNSASFSTFKCYGVSPTKLNDLCFTNVYADSFVIRGDEVRQIAPGQTGKIADYNYKLPDDFTGCVIAWNSNNLDSKVGGNYNYLYRLFRKSNLKPFERDISTEIYQAGSTPCNGVEGFNCYFPLQSYGFQPTNGVGYQPYRVVVLSFELLHAPATVCGPKKSTNLVKNKCVNFNFNGLTGTGVLTESNKKFLPFQQFGRDIADTTDAVRDPQTLEILDITPCSFGGVSVITPGTNTSNQVAVLYQGVNCTEVPVAIHADQLTPTWRVYSTGSNVFQTRAGCLIGAEHVNNSYECDIPIGAGICASYQTQTNSPRRARSVASQSIIAYTMSLGAENSVAYSNNSIAIPTNFTISVTTEILPVSMTKTSVDCTMYICGDSTECSNLLLQYGSFCTQLNRALTGIAVEQDKNTQEVFAQVKQIYKTPPIKDFGGFNFSQILPDPSKPSKRSFIEDLLFNKVTLADVGFIKQYGDCLGDIAARDLICAQKFNGLTVLPPLLTDEMIAQYTSALLAGTITSGWWFGAGAALQIPFAMQMAYRFNGIGVTQNVLYENQKLIANQFNSAIGKIQDSLSSTASALGKLQDVVNQNAQALNTLVKQLSSNFGAISSVLNDILSRLDPPEAEVQIDRLITGRLQSLQTYVTQQLIRAAEIRWSANLAATKMSECVLGQSKRVDFCGKGYHLMSFPQSAPHGVVFLHVTYVPAQEKNFTTAPAICHDGKAHFPREGVFVSNGTHWFVTQRNFYEPQIITTDNTFVSGNCDVVIGIVNNTVYDPLQPELDSFKEELDKYFKNHTSPDVDLGDISGINASVVNIQKEIDRLNEVAKNLNESLIDLQELGKYEQYIKWPWYIWLGFIAGLIAIVMVTIMLCCMTSCCSCLKGCCSCGSCCKFDEDDSEPVLKGVKLHYT

SEQ ID NO: 463 - protein, 1273 aa, Artificial Sequence
  SARS-CoV-2/Greece/16/2020__EPI_ISL_418265 spike protein (1-1273)(K986P_V987P_T887W_A1020W)
MFVFLVLLPLVSSQCVNLTTRTQLPPAYTNSFTRGVYYPDKVFRSSVLHSTQDLFLPFFSNVTWFHAIHVSGTNGTKRFDNPVLPFNDGVYFASTEKSNIIRGWIFGTTLDSKTQSLLIVNNATNVVIKVCEFQFCNDPFLGVYYHKNNKSWMESEFRVYSSANNCTFEYVSQPFLMDLEGKQGNFKNLREFVFKNVDGYFKIYSKHTPINLVRDLPQGFSALEPLVDLPIGINITRFQTLLALHRSYLTPGDSSSGWTAGAAAYYVGYLQPRTFLLKYNENGTITDAVDCALDPLSETKCTLKSFTVEKGIYQTSNFRVQPTESIVRFPNITNLCPFGEVFNATRFASVYAWNRKRISNCVADYSVLYNSASFSTFKCYGVSPTKLNDLCFTNVYADSFVIRGDEVRQIAPGQTGKIADYNYKLPDDFTGCVIAWNSNNLDSKVGGNYNYLYRLFRKSNLKPFERDISTEIYQAGSTPCNGVEGFNCYFPLQSYGFQPTNGVGYQPYRVVVLSFELLHAPATVCGPKKSTNLVKNKCVNFNFNGLTGTGVLTESNKKFLPFQQFGRDIADTTDAVRDPQTLEILDITPCSFGGVSVITPGTNTSNQVAVLYQDVNCTEVPVAIHADQLTPTWRVYSTGSNVFQTRAGCLIGAEHVNNSYECDIPIGAGICASYQTQTNSPRRARSVASQSIIAYTMSLGAENSVAYSNNSIAIPTNFTISVTTEILPVSMTKTSVDCTMYICGDSTECSNLLLQYGSFCTQLNRALTGIAVEQDKNTQEVFAQVKQIYKTPPIKDFGGFNFSQILPDPSKPSKRSFIEDLLFNKVTLADAGFIKQYGDCLGDIAARDLICAQKFNGLTVLPPLLTDEMIAQYTSALLAGTITSGWWFGAGAALQIPFAMQMAYRFNGIGVTQNVLYENQKLIANQFNSAIGKIQDSLSSTASALGKLQDVVNQNAQALNTLVKQLSSNFGAISSVLNDILSRLDPPEAEVQIDRLITGRLQSLQTYVTQQLIRAAEIRWSANLAATKMSECVLGQSKRVDFCGKGYHLMSFPQSAPHGVVFLHVTYVPAQEKNFTTAPAICHDGKAHFPREGVFVSNGTHWFVTQRNFYEPQIITTDNTFVSGNCDVVIGIVNNTVYDPLQPELDSFKEELDKYFKNHTSPDVDLGDISGINASVVNIQKEIDRLNEVAKNLNESLIDLQELGKYEQYIKWPWYIWLGFIAGLIAIVMVTIMLCCMTSCCSCLKGCCSCGSCCKFDEDDSEPVLKGVKLHYT

SEQ ID NO: 464 - protein, 1273 aa, Artificial Sequence
  SARS-CoV-2/Iceland/319/2020__EPI_ISL_417648 spike protein (1-1273)(K986P_V987P_T887W_A1020W)
MFVFLVLLPLVSSQCVNLTTRTQLPPAYTNSFTRGVYYPDKVFRSSVLHSTQDLFLPFFSNVTWFHAIHVSGTNGTKRFDNPVLPFNDGVYFASTEKSNIIRGWIFGTTLDSKTQSLLIVNNATNVVIKVCEFQFCNDPFLGVYYHKNNKSWMESEFRVYSSANNCTFEYVSQPFLIDLEGKQGNFKNLREFVFKNIDGYFKIYSKHTPINLVRDLPQGFSALEPLVDLPIGINITRFQTLLALHRSYLTPGDSSSGWTAGAAAYYVGYLQPRTFLLKYNENGTITDAVDCALDPLSETKCTLKSFTVEKGIYQTSNFRVQPTESIVRFPNITNLCPFGEVFNATRFASVYAWNRKRISNCVADYSVLYNSASFSTFKCYGVSPTKLNDLCFTNVYADSFVIRGDEVRQIAPGQTGKIADYNYKLPDDFTGCVIAWNSNNLDSKVGGNYNYLYRLFRKSNLKPFERDISTEIYQAGSTPCNGVEGFNCYFPLQSYGFQPTNGVGYQPYRVVVLSFELLHAPATVCGPKKSTNLVKNKCVNFNFNGLTGTGVLTESNKKFLPFQQFGRDIADTTDAVRDPQTLEILDITPCSFGGVSVITPGTNTSNQVAVLYQGVNCTEVPVAIHADQLTPTWRVYSTGSNVFQTRAGCLIGAEHVNNSYECDIPIGAGICASYQTQTNSPRRARSVASQSIIAYTMSLGAENSVAYSNNSIAIPTNFTISVTTEILPVSMTKTSVDCTMYICGDSTECSNLLLQYGSFCTQLNRALTGIAVEQDKNTQEVFAQVKQIYKTPPIKDFGGFNFSQILPDPSKPSKRSFIEDLLFNKVTLADAGFIKQYGDCLGDIAARDLICAQKFNGLTVLPPLLTDEMIAQYTSALLAGTITSGWWFGAGAALQIPFAMQMAYRFNGIGVTQNVLYENQKLIANQFNSAIGKIQDSLSSTASALGKLQDVVNQNAQALNTLVKQLSSNFGAISSVLNDILSRLDPPEAEVQIDRLITGRLQSLQTYVTQQLIRAAEIRWSANLAATKMSECVLGQSKRVDFCGKGYHLMSFPQSAPHGVVFLHVTYVPAQEKNFTTAPAICHDGKAHFPREGVFVSNGTHWFVTQRNFYEPQIITTDNTFVSGNCDVVIGIVNNTVYDPLQPELDSFKEELDKYFKNHTSPDVDLGDISGINASVVNIQKEIDRLNEVAKNLNESLIDLQELGKYEQYIKWPWYIWLGFIAGLIAIVMVTIMLCCMTSCCSCLKGCCSCGSCCKFDEDDSEPVLKGVKLHYT

SEQ ID NO: 465 - protein, 1273 aa, Artificial Sequence
  SARS-CoV-2/Congo/94/2020__EPI_ISL_417947 spike protein (1-1273)(K986P_V987P_T887W_A1020W)
MFVFLVLLPLVSSQCVNLTTRTQLPPAYTNSFTRGVYYPDKVFRSSVLHSTQDLFLPFFSNVTWFHAIHVSGTNGTKRFDNPVLPFNDGVYFASTEKSNIIRGWIFGTTLDSKTQSLLIVNNATNVVIKVCEFQFCNDPFLGVYYHKNNKSWMESEFRVYSSANNCTFEYVSQPFLMDLEGKQGNFKNLREFVFKNIDGYFKIYSKHTPINLVRDLPQGFSALEPLVDLPIGINITRFQTLLALHRSYLTPGDSSSGWTAGAAAYYVGYLQPRTFLLKYNENGTITDAVDCALDPLSETKCTLKSFTVEKGIYQTSNFRVQPTESIVRFPNITNLCPFGEVFNATRFASVYAWNRKRISNCVADYSVLYNSASFSTFKCYGVSPTKLNDLCFTNVYADSFVIRGDEVRQIAPGQTGKIADYNYKLPDDFTGCVIAWNSNNLDSKVGGNYNYLYRLFRKSNLKPFERDISTEIYQAGSTPCNGVEGFNCYFPLQSYGFQPTNGVGYQPYRVVVLSFELLHAPATVCGPKKSTNLVKNKCVNFNFNGLTGTGVLTESNKKFLPFQQFGRDIADTTDAVRDPQTLEILDITPCSFGGVSVITPGTNTSNQVAVLYQGVNCTEVPVAIHADQLTPTWRVYSTGSNVFQTRAGCLIGAEHVNNSYECDIPIGAGICASYQTQTNSPRRARSVASQSIIAYTMSLGAENSVAYSNNSIAIPTNFTISVTTEILPVSMTKTSVDCTMYICGDSTECSNLLLQYGSFCTQLNRALTGIAVEQDKNTQEVFAQVKQIYKTPPIKDFGGFNFSQILPDPSKPSKRSFIEDILFNKVTLADAGFIKQYGDCLGDIAARDLICAQKFNGLTVLPPLLTDEMIAQYTSALLAGTITSGWWFGAGAALQIPFAMQMAYRFNGIGVTQNVLYENQKLIANQFNSAIGKIQDSLSSTASALGKLQDVVNQNAQALNTLVKQLSSNFGAISSVLNDILSRLDPPEAEVQIDRLITGRLQSLQTYVTQQLIRAAEIRWSANLAATKMSECVLGQSKRVDFCGKGYHLMSFPQSAPHGVVFLHVTYVPAQEKNFTTAPAICHDGKAHFPREGVFVSNGTHWFVTQRNFYEPQIITTDNTFVSGNCDVVIGIVNNTVYDPLQPELDSFKEELDKYFKNHTSPDVDLGDISGINASVVNIQKEIDRLNEVAKNLNESLIDLQELGKYEQYIKWPWYIWLGFIAGLIAIVMVTIMLCCMTSCCSCLKGCCSCGSCCKFDEDDSEPVLKGVKLHYT

SEQ ID NO: 466 - protein, 1273 aa, Artificial Sequence
  SARS-CoV-2/Congo/158/2020__EPI_ISL_417950 spike protein (1-1273)(K986P_V987P_T887W_A1020W)
MFVFLVLLPLVSSQCVNLTTRTQLPPAYTNSFTRGVYYPDKVFRSSVLHSTQDLFLPFFSNVTWFHAIHVSGTNGTKRFDNPVLPFNDGVYFASTEKSNIIRGWIFGTTLDSKTQSLLIVNNATNVVIKVCEFQFCNDPFLGVYYHKNNKSWMESEFRVYSSANNCTFEYVSQPFLMDLEGKQGNFKNLREFVFKNIDGYFKIYSKHTPINLVRDLPQGFSALEPLVDLPIGINITRFQTLLALHRSYLTPGDSSSGWTAGAAAYYVGYLQPRTFLLKYNENGTITDAVDCALDPLSETKCTLKSFTVEKGIYQTSNFRVQPTESIVRFPNITNLCPFGEVFNATRFASVYAWNRKRISNCVADYSVLYNSASFSTFKCYGVSPTKLNDLCFTNVYADSFVIRGDEVRQIAPGQTGKIADYNYKLPDDFTGCVIAWNSNNLDSKVGGNYNYLYRLFRKSNLKPFERDISTEIYQAGSTPCNGVEGFNCYFPLQSYGFQPTNGVGYQPYRVVVLSFELLHAPATVCGPKKSTNLVKNKCVNFNFNGLTGTGVLTESNKKFLPFQQFGRDIADTTDAVRDPQTLEILDITPCSFGGVSVITPGTNTSNQVAVLYQDVNCTEVPVAIHADQLTPTWRVYSTGSNVFQTRAGCLIGAEHVNNSYECDIPIGAGICASYQTQTNSPRRARSVASQSIIAYTMSLGAENSVAYSNNSIAIPTNFTISVTTEILPVSMTKTSVDCTMYICGDSTECSNLLLQYGSFCTQLNRALTGIAVEQDKNTQEVFAQVKQIYKTPPIKDFGGFNFSQILPDPSKPSKRSFIEDLLFNKVTLADAGFIKQYGDCLGDIAARDLICAQKFNGLTVLPPLLTDEMIAQYTSALLAGTITSGWWFGAGAALQIPFAMQMAYRFNGIGVTQNVLYENQKLIANQFNSAIGKIQDSLSSTASALGKLQDVVNQNAQALNTLVKQLSSNFGAISSVLNDILSRLDPPEAEVQIDRLITGRLQSLQTYVTQQLIRAAEIRWSANLAATKMSECVLGQSKRVDFCGKGYHLMSFPQSAPHGVVFLHVTYVPAQEKNFTTAPAICHDGKAHFPREGVFVSNGTHWFVTQRNFYEPQIITTDNTFLSGNCDVVIGIVNNTVYDPLQPELDSFKEELDKYFKNHTSPDVDLGDISGINASVVNIQKEIDRLNEVAKNLNESLIDLQELGKYEQYIKWPWYIWLGFIAGLIAIVMVTIMLCCMTSCCSCLKGCCSCGSCCKFDEDDSEPVLKGVKLHYT

SEQ ID NO: 467 - protein, 1273 aa, Artificial Sequence
  SARS-CoV-2/USA/UT-00034/2020__EPI_ISL_417977 spike protein (1-1273)(K986P_V987P_T887W_A1020W)
MFVFLVLLPLVSSQCVNLTTRTQLPPAYTNSFTRGVYYPDKVFRSSVLHSTQDLFLPFFSNVTWFHAIHVSGTNGTKRFDNPVLPFNDGVYFASTEKSNIIRGWIFGTTLDSKTQSLLIVNNATNVVIKVCEFQFCNDPFLGVYYYKNNKSWMESEFRVYSSANNCTFEYVSQPFLMDLEGKQGNFKNLREFVFKNIDGYFKIYSKHTPINLVRDLPQGFSALEPLVDLPIGINITRFQTLLALHRSYLTPGDSSSGWTAGAAAYYVGYLQPRTFLLKYNENGTITDAVDCALDPLSETKCTLKSFTVEKGIYQTSNFRVQPTESIVRFPNITNLCPFGEVFNATRFASVYAWNRKRISNCVADYSVLYNSASFSTFKCYGVSPTKLNDLCFTNVYADSFVIRGDEVRQIAPGQTGKIADYNYKLPDDFTGCVIAWNSNNLDSKVGGNYNYLYRLFRKSNLKPFERDISTEIYQAGSTPCNGVEGFNCYFPLQSYGFQPTNGVGYQPYRVVVLSFELLHAPATVCGPKKSTNLVKNKCVNFNFNGLTGTGVLTESNKKFLPFQQFGRDIADTTDAVRDPQTLEILDITPCSFGGVSVITPGTNTSNQVAVLYQGVNCTEVPVAIHADQLTPTWRVYSTGSNVFQTRAGCLIGAEHVNNSYECDIPIGAGICASYQTQTNSPRRARSVASQSIIAYTMSLGAENSVAYSNNSIAIPTNFTISVTTEILPVSMTKTSVDCTMYICGDSTECSNLLLQYGSFCTQLNRALTGIAVEQDKNTQEVFAQVKQIYKTPPIKDFGGFNFSQILPDPSKPSKRSFIEDLLFNKVTLADAGFIKQYGDCLGDIAARDLICAQKFNGLTVLPPLLTDEMIAQYTSALLAGTITSGWWFGAGAALQIPFAMQMAYRFNGIGVTQNVLYENQKLIANQFNSAIGKIQDSLSSTASALGKLQDVVNQNAQALNTLVKQLSSNFGAISSVLNDILSRLDPPEAEVQIDRLITGRLQSLQTYVTQQLIRAAEIRWSANLAATKMSECVLGQSKRVDFCGKGYHLMSFPQSAPHGVVFLHVTYVPAQEKNFTTAPAICHDGKAHFPREGVFVSNGTHWFVTQRNFYEPQIITTDNTFVSGNCDVVIGIVNNTVYDPLQPELDSFKEELDKYFKNHTSPDVDLGDISGINASVVNIQKEIDRLNEVAKNLNESLIDLQELGKYEQYIKWPWYIWLGFIAGLIAIVMVTIMLCCMTSCCSCLKGCCSCGSCCKFDEDDSEPVLKGVKLHYT

SEQ ID NO: 468 - protein, 1273 aa, Artificial Sequence
  SARS-CoV-2/USA/UT-00033/2020__EPI_ISL_417976 spike protein (1-1273)(K986P_V987P_T887W_A1020W)
MFVFLVLLPLVSSQCVNLTTRTQLPPAYTNSFTRGVYYPDKVFRSSVLHSTQDLFLPFFSNVTWFHAIHVSGTNGTKRFDNPVLPFNDGVYFASTEKSNIIRGWIFGTTLDSKTQSLLIVNNATNVVIKVCEFQFCNDPFLGVYYHKNNKSWMESEFRVYSSANNCTFEYVSQPFLMDLEGKQGNFKNLREFVFKNIDGYFKIYSKHTPINLVRDLPQGFSALEPLVDLPIGINITRFQTLLALHRSYLTPGDSSSGLTAGAAAYYVGYLQPRTFLLKYNENGTITDAVDCALDPLSETKCTLKSFTVEKGIYQTSNFRVQPTESIVRFPNITNLCPFGEVFNATRFASVYAWNRKRISNCVADYSVLYNSASFSTFKCYGVSPTKLNDLCFTNVYADSFVIRGDEVRQIAPGQTGKIADYNYKLPDDFTGCVIAWNSNNLDSKVGGNYNYLYRLFRKSNLKPFERDISTEIYQAGSTPCNGVEGFNCYFPLQSYGFQPTNGVGYQPYRVVVLSFELLHAPATVCGPKKSTNLVKNKCVNFNFNGLTGTGVLTESNKKFLPFQQFGRDIADTTDAVRDPQTLEILDITPCSFGGVSVITPGTNTSNQVAVLYQGVNCTEVPVAIHADQLTPTWRVYSTGSNVFQTRAGCLIGAEHVNNSYECDIPIGAGICASYQTQTNSPRRARSVASQSIIAYTMSLGAENSVAYSNNSIAIPTNFTISVTTEILPVSMTKTSVDCTMYICGDSTECSNLLLQYGSFCTQLNRALTGIAVEQDKNTQEVFAQVKQIYKTPPIKDFGGFNFSQILPDPSKPSKRSFIEDLLFNKVTLADAGFIKQYGDCLGDIAARDLICAQKFNGLTVLPPLLTDEMIAQYTSALLAGTITSGWWFGAGAALQIPFAMQMAYRFNGIGVTQNVLYENQKLIANQFNSAIGKIQDSLSSTASALGKLQDVVNQNAQALNTLVKQLSSNFGAISSVLNDILSRLDPPEAEVQIDRLITGRLQSLQTYVTQQLIRAAEIRWSANLAATKMSECVLGQSKRVDFCGKGYHLMSFPQSAPHGVVFLHVTYVPAQEKNFTTAPAICHDGKAHFPREGVFVSNGTHWFVTQRNFYEPQIITTDNTFVSGNCDVVIGIVNNTVYDPLQPELDSFKEELDKYFKNHTSPDVDLGDISGINASVVNIQKEIDRLNEVAKNLNESLIDLQELGKYEQYIKWPWYIWLGFIAGLIAIVMVTIMLCCMTSCCSCLKGCCSCGSCCKFDEDDSEPVLKGVKLHYT

SEQ ID NO: 469 - protein, 1273 aa, Artificial Sequence
  SARS-CoV-2/USA/WI-13/2020__EPI_ISL_417516 spike protein (1-1273)(K986P_V987P_T887W_A1020W)
MFVFLVLLPLVSSQCVNLTTRTQLPPAYTNSFTRGVYYPDKVFRSSVLHSTQDLFLPFFSNVTWFHAIHVSGTNGTKRFDNPVLPFNDGVYFASTEKSNIIRGWIFGTTLDSKTQSLLIVNNATNVVIKVCEFQFCNDPFLGVYYHKNNKSWMESEFRVYSSANNCTFEYVSQPFLMDLEGKQGNFKNLREFVFKNIDGYFKIYSKHTPINLVRDLPQGFSALEPLVDLPIGINITRFQTLLALHRSYLTPGDSSSGWTAGAAAYYVGYLQPRTFLLKYNENGTITDAVDCALDPLSETKCTLKSFTVEKGIYQTSNFRVLPTESIVRFPNITNLCPFGEVFNATRFASVYAWNRKRISNCVADYSVLYNSASFSTFKCYGVSPTKLNDLCFTNVYADSFVIRGDEVRQIAPGQTGKIADYNYKLPDDFTGCVIAWNSNNLDSKVGGNYNYLYRLFRKSNLKPFERDISTEIYQAGSTPCNGVEGFNCYFPLQSYGFQPTNGVGYQPYRVVVLSFELLHAPATVCGPKKSTNLVKNKCVNFNFNGLTGTGVLTESNKKFLPFQQFGRDIADTTDAVRDPQTLEILDITPCSFGGVSVITPGTNTSNQVAVLYQGVNCTEVPVAIHADQLTPTWRVYSTGSNVFQTRAGCLIGAEHVNNSYECDIPIGAGICASYQTQTNSPRRARSVASQSIIAYTMSLGAENSVAYSNNSIAIPTNFTISVTTEILPVSMTKTSVDCTMYICGDSTECSNLLLQYGSFCTQLNRALTGIAVEQDKNTQEVFAQVKQIYKTPPIKDFGGFNFSQILPDPSKPSKRSFIEDLLFNKVTLADAGFIKQYGDCLGDIAARDLICAQKFNGLTVLPPLLTDEMIAQYTSALLAGTITSGWWFGAGAALQIPFAMQMAYRFNGIGVTQNVLYENQKLIANQFNSAIGKIQDSLSSTASALGKLQDVVNQNAQALNTLVKQLSSNFGAISSVLNDILSRLDPPEAEVQIDRLITGRLQSLQTYVTQQLIRAAEIRWSANLAATKMSECVLGQSKRVDFCGKGYHLMSFPQSAPHGVVFLHVTYVPAQEKNFTTAPAICHDGKAHFPREGVFVSNGTHWFVTQRNFYEPQIITTDNTFVSGNCDVVIGIVNNTVYDPLQPELDSFKEELDKYFKNHTSPDVDLGDISGINASVVNIQKEIDRLNEVAKNLNESLIDLQELGKYEQYIKWPWYIWLGFIAGLIAIVMVTIMLCCMTSCCSCLKGCCSCGSCCKFDEDDSEPVLKGVKLHYT

SEQ ID NO: 470 - protein, 1272 aa, Artificial Sequence
  SARS-CoV-2/India/1-27/2020__EPI_ISL_413522 spike protein (1-1272)(K985P_V986P_T886W_A1019W)
MFVFLVLLPLVSSQCVNLTTRTQLPPAYTNSFTRGVYYPDKVFRSSVLHSTQDLFLPFFSNVTWFHAIHVSGTNGTKRFDNPVLPFNDGVYFASTEKSNIIRGWIFGTTLDSKTQSLLIVNNATNVVIKVCEFQFCNDPFLGVYHKNNKSWMESEFRVYSSANNCTFEYVSQPFLMDLEGKQGNFKNLREFVFKNIDGYFKIYSKHTPINLVRDLPQGFSALEPLVDLPIGINITRFQTLLALHRSYLTPGDSSSGWTAGAAAYYVGYLQPRTFLLKYNENGTITDAVDCALDPLSETKCTLKSFTVEKGIYQTSNFRVQPTESIVRFPNITNLCPFGEVFNATRFASVYAWNRKRISNCVADYSVLYNSASFSTFKCYGVSPTKLNDLCFTNVYADSFVIRGDEVIQIAPGQTGKIADYNYKLPDDFTGCVIAWNSNNLDSKVGGNYNYLYRLFRKSNLKPFERDISTEIYQAGSTPCNGVEGFNCYFPLQSYGFQPTNGVGYQPYRVVVLSFELLHAPATVCGPKKSTNLVKNKCVNFNFNGLTGTGVLTESNKKFLPFQQFGRDIADTTDAVRDPQTLEILDITPCSFGGVSVITPGTNTSNQVAVLYQDVNCTEVPVAIHADQLTPTWRVYSTGSNVFQTRAGCLIGAEHVNNSYECDIPIGAGICASYQTQTNSPRRARSVASQSIIAYTMSLGAENSVAYSNNSIAIPTNFTISVTTEILPVSMTKTSVDCTMYICGDSTECSNLLLQYGSFCTQLNRALTGIAVEQDKNTQEVFAQVKQIYKTPPIKDFGGFNFSQILPDPSKPSKRSFIEDLLFNKVTLADAGFIKQYGDCLGDIAARDLICAQKFNGLTVLPPLLTDEMIAQYTSALLAGTITSGWWFGAGAALQIPFAMQMAYRFNGIGVTQNVLYENQKLIANQFNSAIGKIQDSLSSTASALGKLQDVVNQNAQALNTLVKQLSSNFGAISSVLNDILSRLDPPEAEVQIDRLITGRLQSLQTYVTQQLIRAAEIRWSANLAATKMSECVLGQSKRVDFCGKGYHLMSFPQSAPHGVVFLHVTYVPAQEKNFTTAPAICHDGKAHFPREGVFVSNGTHWFVTQRNFYEPQIITTDNTFVSGNCDVVIGIVNNTVYDPLQPELDSFKEELDKYFKNHTSPDVDLGDISGINASVVNIQKEIDRLNEVAKNLNESLIDLQELGKYEQYIKWPWYIWLGFIAGLIAIVMVTIMLCCMTSCCSCLKGCCSCGSCCKFDEDDSEPVLKGVKLHYT

SEQ ID NO: 471 - protein, 1267 aa, Artificial Sequence
  SARS-CoV-2/pangolin/Guangxi/P4L/2017__EPI_ISL_410538 spike protein (1-1267)(K980P_V981P_T881W_A1014W)
MFVFLFVLPLVSSQCVNLTTRTGIPPGYTNSSTRGVYYPDKVFRSSILHLTQDLFLPFFSNVTWFNTINYQGGFKKFDNPVLPFNDGVYFASTEKSNIIRGWIFGTTLDARTQSLLIVNNATNVVIKVCEFQFCTDPFLGVYYHNNNKTWVENEFRVYSSANNCTFEYISQPFLMDLEGKQGNFKNLREFVFKNVDGYFKIYSKHTPIDLVRDLPRGFAALEPLVDLPIGINITRFQTLLALHRSYLTPGNLESGWTTGAAAYYVGYLQQRTFLLSYNQNGTITDAVDCSLDPLSETKCTLKSLTVEKGIYQTSNFRVQPTISIVRFPNITNLCPFGEVFNASKFASVYAWNRKRISNCVADYSVLYNSTSFSTFKCYGVSPTKLNDLCFTNVYADSFVVKGDEVRQIAPGQTGVIADYNYKLPDDFTGCVIAWNSVKQDALTGGNYGYLYRLFRKSKLKPFERDISTEIYQAGSTPCNGQVGLNCYYPLERYGFHPTTGVNYQPFRVVVLSFELLNGPATVCGPKLSTTLVKDKCVNFNFNGLTGTGVLTTSKKQFLPFQQFGRDISDTTDAVRDPQTLEILDITPCSFGGVSVITPGTNTSNQVAVLYQDVNCTEVPMAIHAEQLTPAWRVYSAGANVFQTRAGCLVGAEHVNNSYECDIPVGAGICASYHSMSSLRSVNQRSIIAYTMSLGAENSVAYSNNSIAIPTNFTISVTTEILPVSMTKTSVDCTMYICGDSIECSNLLLQYGSFCTQLNRALTGIAVEQDKNTQEVFAQVKQIYKTPPIKDFGGFNFSQILPDPSKPSKRSFIEDLLFNKVTLADAGFIKQYGDCLGDIAARDLICAQKFNGLTVLPPLLTDEMIAQYTSALLAGTITSGWWFGAGAALQIPFAMQMAYRFNGIGVTQNVLYENQKLIANQFNSAIGKIQDSLSSTASALGKLQDVVNQNAQALNTLVKQLSSNFGAISSVLNDILSRLDPPEAEVQIDRLITGRLQSLQTYVTQQLIRAAEIRWSANLAATKMSECVLGQSKRVDFCGKGYHLMSFPQSAPHGVVFLHVTYVPAQEKNFTTAPAICHEGKAHFPREGVFVSNGTHWFITQRNFYEPQIITTDNTFVSGSCDVVIGIVNNTVYDPLQPELDSFKEELDKYFKNHTSPDVDLGDISGINASVVNIQKEIDRLNEVAKNLNESPIDLQELGKYEQYIKWPWYIWLGFIAGLIAIIMVTIMLCCMTSCCSCLKGCCSCGSCCKFDEDDSEPVLKGVKLHYT

SEQ ID NO: 472 - protein, 1267 aa, Artificial Sequence
  SARS-CoV-2/pangolin/Guangxi/P5L/2017__EPI_ISL_410540 spike protein (1-1267)(K980P_V981P_T881W_A1014W)
MFVFLFVLPLVSSQCVNLTTRTGIPPGYTNSSTRGVYYPDKVFRSSILHLTQDLFLPFFSNVTWFNTINYQGGFKKFDNPVLPFNDGVYFASTEKSNIIRGWIFGTTLDARTQSLLIVNNATNVVIKVCEFQFCTDPFLGVYYHNNNKTWVENEFRVYSSANNCTFEYISQPFLMDLEGKQGNFKNLREFVFKNVDGYFKIYSKHTPIDLVRDLPRGFAALEPLVDLPIGINITRFQTLLALHRSYLTPGKLESGWTTGAAAYYVGYLQQRTFLLSYNQNGTITDAVDCSLDPLSETKCTLKSLTVEKGIYQTSNFRVQPTISIVRFPNITNLCPFGEVFNASKFASVYAWNRKRISNCVADYSVLYNSTSFSTFKCYGVSPTKLNDLCFTNVYADSFVVKGDEVRQIAPGQTGVIADYNYKLPDDFTGCVIAWNSVKQDALTGGNYGYLYRLFRKSKLKPFERDISTEIYQAGSTPCNGQVGLNCYYPLERYGFHPTTGVNYQPFRVVVLSFELLNGPATVCGPKLSTTLVKDKCVNFNFNGLTGTGVLTTSKKQFLPFQQFGRDISDTTDAVRDPQTLEILDITPCSFGGVSVITPGTNTSNQVAVLYQDVNCTEVPMAIHAEQLTPAWRVYSAGANVFQTRAGCLVGAEHVNNSYECDIPVGAGICASYHSMSSFRSVNQRSIIAYTMSLGAENSVAYSNNSIAIPTNFTISVTTEILPVSMTKTSVDCTMYICGDSIECSNLLLQYGSFCTQLNRALTGIAVEQDKNTQEVFAQVKQIYKTPPIKDFGGFNFSQILPDPSKPSKRSFIEDLLFNKVTLADAGFIKQYGDCLGDIAARDLICAQKFNGLTVLPPLLTDEMIAQYTSALLAGTITSGWWFGAGAALQIPFAMQMAYRFNGIGVTQNVLYENQKLIANQFNSAIGKIQDSLSSTASALGKLQDVVNQNAQALNTLVKQLSSNFGAISSVLNDILSRLDPPEAEVQIDRLITGRLQSLQTYVTQQLIRAAEIRWSANLAATKMSECVLGQSKRVDFCGKGYHLMSFPQSAPHGVVFLHVTYVPAQEKNFTTAPAICHEGKAHFPREGVFVSNGTHWFITQRNFYEPQIITTDNTFVSGSCDVVIGIVNNTVYDPLQPELDSFKEELDKYFKNHTSPDVDLGDISGINASVVNIQKEIDRLNEVAKNLNESLIDLQELGKYEQYIKWPWYIWLGFIAGLIAIIMVTIMLCCMTSCCSCLKGCCSCGSCCKFDEDDSEPVLKGVKLHYT

SEQ ID NO: 473 - protein, 1267 aa, Artificial Sequence
  SARS-CoV-2/pangolin/Guangxi/P5E/2017__EPI_ISL_410541 spike protein (1-1267)(K980P_V981P_T881W_A1014W)
MFVFLFVLPLVSSQCVNLTTRTGIPPGYTNSSTRGVYYPDKVFRSSILHLTQDLFLPFFSNVTWFNTITYQGGSKKFDNPVLPFNDGVYFASTEKSNIIRGWIFGTTLDARTQSLLIVNNATNVVIKVCEFQFCTDPFLGVYYHNNNKTWVENEFRVYSSANNCTFEYISQPFLMDLEGKQGNFKNLREFVFKNVDGYFKIYSKHTPIDLVRDLPRGFAALEPLVDLPIGINITRFQTLLALHRSYLTPGKLESGWTTGAAAYYVGYLQQRTFLLSYNQNGTITDAVDCSLDPLSETKCTLKSLTVEKGIYQTSNFRVQPTISIVRFPNITNLCPFGEVFNASKFASVYAWNRKRISNCVADYSVLYNSTSFSTFKCYGVSPTKLNDLCFTNVYADSFVVKGDEVRQIAPGQTGVIADYNYKLPDDFTGCVIAWNSVKQDALTGDNYGYLYRLFRKSKLKPFERDISTEIYQAGSTPCNGQVGLNCYYPLERYGFHPTTGVNYQPFRVVVLSFELLNGPATVCGPKLSTTLVKDKCVNFNFNGLTGTGVLTTSKKQFLPFQQFGRDISDTTDAVRDPQTLEILDITPCSFGGVSVITPGTNTSNQVAVLYQDVNCTEVPMAIHAEQLTPAWRVYSAGANVFQTRAGCLVGAEHVNNSYECDIPVGAGICASYHSMSSFRSVNQRSIIAYTMSLGAENSVAYSNNSIAIPTNFTISVTTEILPVSMTKTSVDCTMYICGDSIECSNLLLQYGSFCTQLNRALTGIAVEQDKNTQEVFAQVKQIYKTPPIKDFGGFNFSQILPDPSKPSKRSFIEDLLFNKVTLADAGFIKQYGDCLGDIAARDLICAQKFNGLTVLPPLLTDEMIAQYTSALLAGTITSGWWFGAGAALQIPFAMQMAYRFNGIGVTQNVLYENQKLIANQFNSAIGKIQDSLSSTASALGKLQDVVNQNAQALNTLVKQLSSNFGAISSVLNDILSRLDPPEAEVQIDRLITGRLQSLQTYVTQQLIRAAEIRWSANLAATKMSECVLGQSKRVDFCGKGYHLMSFPQSAPHGVVFLHVTYVPAQEKNFTTAPAICHEGKAHFPREGVFVSNGTHWFITQRNFYEPQIITTDNTFVSGSCDVVIGIVNNTVYDPLQPELDSFKEELDKYFKNHTSPDVDLGDISGINASVVNIQKEIDRLNEVAKNLNESLIDLQELGKYEQYIKWPWYIWLGFIAGLIAIIMVTIMLCCMTSCCSCLKGCCSCGSCCKFDEDDSEPVLKGVKLHYT

SEQ ID NO: 474 - protein, 1265 aa, Artificial Sequence
  SARS-CoV-2/pangolin/Guangxi/P1E/2017__EPI_ISL_410539 spike protein (1-1265)(K978P_V979P_T879W_A1012W)
MFVFLFVLPLVSSQCVNLTTRTGIQPGYTNSSTRGVYYPDKVFRSSILHLTQDLFLPFFSNVTWFNTINYQGGFKKFDNPVLPFNDGVYFASTEKSNIIRGWIFGTTLDARTQSLLIVNNATNVVIKVCEFQFCTDPFLGVYYHNNNKTWVENEFRVYSSANNCTFEYISQPFLMDLEGKQGNFKNLREFVFKNVDGYFKIYSKHTPIDLVRDLPRGFAALEPLVDLPIGINITRFQTLLALHRSYLTPGKLESGWTTGAAAYYVGYLQQRTFLLSYNQNGTITDAVDCSLDPLSETKCTLKSLTVEKGIYQTSNFRVQPTISIVRFPNITNLCPFGEVFNASKFASVYAWNRKRISNCVADYSVLYNSTSFSTFKCYGVSPTKLNDLCFTNVYADSFVVKGDEVRQIAPGQTGVIADYNYKLPDDFTGCVIAWNSVKQDALTGGNYLYRLFRKSKLKPFERDISTEIYQAGSTPCNGQVGLNCYYPLERYGFHPTTGVNYQPFRVVVLSFELLNGPATVCGPKLSTTLVKDKCVNFNFNGLTGTGVLTTSKKQFLPFQQFGRDISDTTDAVRDPQTLEILDITPCSFGGVSVITPGTNTSNQVAVLYQDVNCTEVPMAIHAEQLTPAWRVYSAGANVFQTRAGCLVGAEHVNNSYECDIPVGAGICASYHSMSSLRSVNQRSIIAYTMSLGAENSVAYSNNSIAIPTNFTISVTTEILPVSMTKTSVDCTMYICGDSIECSNLLLQYGSFCTQLNRALTGIAVEQDKNTQEVFAQVKQIYKTPPIKDFGGFNFSQILPDPSKPSKRSFIEDLLFNKVTLADAGFIKQYGDCLGDIAARDLICAQKFNGLTVLPPLLTDEMIAQYTSALLAGTITSGWWFGAGAALQIPFAMQMAYRFNGIGVTQNVLYENQKLIANQFNSAIGKIQDSLSSTASALGKLQDVVNQNAQALNTLVKQLSSNFGAISSVLNDILSRLDPPEAEVQIDRLITGRLQSLQTYVTQQLIRAAEIRWSANLAATKMSECVLGQSKRVDFCGKGYHLMSFPQSAPHGVVFLHVTYVPAQEKNFTTAPAICHEGKAHFPREGVFVSNGTHWFITQRNFYEPQIITTDNTFVSGSCDVVIGIVNNTVYDPLQPELDSFKEELDKYFKNHTSPDVDLGDISGINASVVNIQKEIDRLNEVAKNLNESLIDLQELGKYEQYIKWPWYIWLGFIAGLIAIIMVTIMLCCMTSCCSCLKGCCSCGSCCKFDEDDSEPVLKGVKLHYT

SEQ ID NO: 475 - protein, 1273 aa, Artificial Sequence
  SARS-CoV-2/Wuhan/WIV05/2019__EPI_ISL_402128 spike protein (1-1273)(K986P_V987P_P1069F)
MFVFLVLLPLVSSQCVNLTTRTQLPPAYTNSFTRGVYYPDKVFRSSVLHSTQDLFLPFFSNVTWFHAIHVSGTNGTKRFDNPVLPFNDGVYFASTEKSNIIRGWIFGTTLDSKTQSLLIVNNATNVVIKVCEFQFCNDPFLGVYYHKNNKSWMESEFRVYSSANNCTFEYVSQPFLMDLEGKQGNFKNLREFVFKNIDGYFKIYSKHTPINLVRDLPQGFSALEPLVDLPIGINITRFQTLLALHRSYLTPGDSSSGWTAGAAAYYVGYLQPRTFLLKYNENGTITDAVDCALDPLSETKCTLKSFTVEKGIYQTSNFRVQPTESIVRFPNITNLCPFGEVFNATRFASVYAWNRKRISNCVADYSVLYNSASFSTFKCYGVSPTKLNDLCFTNVYADSFVIRGDEVRQIAPGQTGKIADYNYKLPDDFTGCVIAWNSNNLDSKVGGNYNYLYRLFRKSNLKPFERDISTEIYQAGSTPCNGVEGFNCYFPLQSYGFQPTNGVGYQPYRVVVLSFELLHAPATVCGPKKSTNLVKNKCVNFNFNGLTGTGVLTESNKKFLPFQQFGRDIADTTDAVRDPQTLEILDITPCSFGGVSVITPGTNTSNQVAVLYQDVNCTEVPVAIHADQLTPTWRVYSTGSNVFQTRAGCLIGAEHVNNSYECDIPIGAGICASYQTQTNSPRRARSVASQSIIAYTMSLGAENSVAYSNNSIAIPTNFTISVTTEILPVSMTKTSVDCTMYICGDSTECSNLLLQYGSFCTQLNRALTGIAVEQDKNTQEVFAQVKQIYKTPPIKDFGGFNFSQILPDPSKPSKRSFIEDLLFNKVTLADAGFIKQYGDCLGDIAARDLICAQKFNGLTVLPPLLTDEMIAQYTSALLAGTITSGWTFGAGAALQIPFAMQMAYRFNGIGVTQNVLYENQKLIANQFNSAIGKIQDSLSSTASALGKLQDVVNQNAQALNTLVKQLSSNFGAISSVLNDILSRLDPPEAEVQIDRLITGRLQSLQTYVTQQLIRAAEIRASANLAATKMSECVLGQSKRVDFCGKGYHLMSFPQSAPHGVVFLHVTYVFAQEKNFTTAPAICHDGKAHFPREGVFVSNGTHWFVTQRNFYEPQIITTDNTFVSGNCDVVIGIVNNTVYDPLQPELDSFKEELDKYFKNHTSPDVDLGDISGINASVVNIQKEIDRLNEVAKNLNESLIDLQELGKYEQYIKWPWYIWLGFIAGLIAIVMVTIMLCCMTSCCSCLKGCCSCGSCCKFDEDDSEPVLKGVKLHYT

SEQ ID NO: 476 - protein, 1269 aa, Artificial Sequence
  SARS-CoV-2/bat/Yunnan/RaTG13/2013__EPI_ISL_402131 spike protein (1-1269)(K982P_V983P_P1065F)
MFVFLVLLPLVSSQCVNLTTRTQLPPAYTNSSTRGVYYPDKVFRSSVLHLTQDLFLPFFSNVTWFHAIHVSGTNGIKRFDNPVLPFNDGVYFASTEKSNIIRGWIFGTTLDSKTQSLLIVNNATNVVIKVCEFQFCNDPFLGVYYHKNNKSWMESEFRVYSSANNCTFEYVSQPFLMDLEGKQGNFKNLREFVFKNIDGYFKIYSKHTPINLVRDLPPGFSALEPLVDLPIGINITRFQTLLALHRSYLTPGDSSSGWTAGAAAYYVGYLQPRTFLLKYNENGTITDAVDCALDPLSETKCTLKSFTVEKGIYQTSNFRVQPTDSIVRFPNITNLCPFGEVFNATTFASVYAWNRKRISNCVADYSVLYNSTSFSTFKCYGVSPTKLNDLCFTNVYADSFVITGDEVRQIAPGQTGKIADYNYKLPDDFTGCVIAWNSKHIDAKEGGNFNYLYRLFRKANLKPFERDISTEIYQAGSKPCNGQTGLNCYYPLYRYGFYPTDGVGHQPYRVVVLSFELLNAPATVCGPKKSTNLVKNKCVNFNFNGLTGTGVLTESNKKFLPFQQFGRDIADTTDAVRDPQTLEILDITPCSFGGVSVITPGTNASNQVAVLYQDVNCTEVPVAIHADQLTPTWRVYSTGSNVFQTRAGCLIGAEHVNNSYECDIPIGAGICASYQTQTNSRSVASQSIIAYTMSLGAENSVAYSNNSIAIPTNFTISVTTEILPVSMTKTSVDCTMYICGDSTECSNLLLQYGSFCTQLNRALTGIAVEQDKNTQEVFAQVKQIYKTPPIKDFGGFNFSQILPDPSKPSKRSFIEDLLFNKVTLADAGFIKQYGDCLGDIAARDLICAQKFNGLTVLPPLLTDEMIAQYTSALLAGTITSGWTFGAGAALQIPFAMQMAYRFNGIGVTQNVLYENQKLIANQFNSAIGKIQDSLSSTASALGKLQDVVNQNAQALNTLVKQLSSNFGAISSVLNDILSRLDPPEAEVQIDRLITGRLQSLQTYVTQQLIRAAEIRASANLAATKMSECVLGQSKRVDFCGKGYHLMSFPQSAPHGVVFLHVTYVFAQEKNFTTAPAICHDGKAHFPREGVFVSNGTHWFVTQRNFYEPQIITTDNTFVSGSCDVVIGIVNNTVYDPLQPELDSFKEELDKYFKNHTSPDVDLGDISGINASVVNIQKEIDRLNEVAKNLNESLIDLQELGKYEQYIKWPWYIWLGFIAGLIAIIMVTIMLCCMTSCCSCLKGCCSCGSCCKFDEDDSEPVLKGVKLHYT

SEQ ID NO: 477 - protein, 1273 aa, Artificial Sequence
  SARS-CoV-2/Wuhan/HBCDC-HB-01/2019__EPI_ISL_402132 spike protein (1-1273)(K986P_V987P_P1069F)
MFVFLVLLPLVSSQCVNLTTRTQLPPAYTNSITRGVYYPDKVFRSSVLHSTQDLFLPFFSNVTWFHAIHVSGTNGTKRFDNPVLPFNDGVYFASTEKSNIIRGWIFGTTLDSKTQSLLIVNNATNVVIKVCEFQFCNDPFLGVYYHKNNKSWMESEFRVYSSANNCTFEYVSQPFLMDLEGKQGNFKNLREFVFKNIDGYFKIYSKHTPINLVRDLPQGFSALEPLVDLPIGINITRFQTLLALHRSYLTPGDSSSGWTAGAAAYYVGYLQPRTFLLKYNENGTITDAVDCALDPLSETKCTLKSFTVEKGIYQTSNFRVQPTESIVRFPNITNLCPFGEVFNATRFASVYAWNRKRISNCVADYSVLYNSASFSTFKCYGVSPTKLNDLCFTNVYADSFVIRGDEVRQIAPGQTGKIADYNYKLPDDFTGCVIAWNSNNLDSKVGGNYNYLYRLFRKSNLKPFERDISTEIYQAGSTPCNGVEGFNCYFPLQSYGFQPTNGVGYQPYRVVVLSFELLHAPATVCGPKKSTNLVKNKCVNFNFNGLTGTGVLTESNKKFLPFQQFGRDIADTTDAVRDPQTLEILDITPCSFGGVSVITPGTNTSNQVAVLYQDVNCTEVPVAIHADQLTPTWRVYSTGSNVFQTRAGCLIGAEHVNNSYECDIPIGAGICASYQTQTNSPRRARSVASQSIIAYTMSLGAENSVAYSNNSIAIPTNFTISVTTEILPVSMTKTSVDCTMYICGDSTECSNLLLQYGSFCTQLNRALTGIAVEQDKNTQEVFAQVKQIYKTPPIKDFGGFNFSQILPDPSKPSKRSFIEDLLFNKVTLADAGFIKQYGDCLGDIAARDLICAQKFNGLTVLPPLLTDEMIAQYTSALLAGTITSGWTFGAGAALQIPFAMQMAYRFNGIGVTQNVLYENQKLIANQFNSAIGKIQDSLSSTASALGKLQDVVNQNAQALNTLVKQLSSNFGAISSVLNDILSRLDPPEAEVQIDRLITGRLQSLQTYVTQQLIRAAEIRASANLAATKMSECVLGQSKRVDFCGKGYHLMSFPQSAPHGVVFLHVTYVFAQEKNFTTAPAICHDGKAHFPREGVFVSNGTHWFVTQRNFYEPQIITTDNTFVSGNCDVVIGIVNNTVYDPLQPELDSFKEELDKYFKNHTSPDVDLGDISGINASVVNIQKEIDRLNEVAKNLNESLIDLQELGKYEQYIKWPWYIWLGFIAGLIAIVMVTIMLCCMTSCCSCLKGCCSCGSCCKFDEDDSEPVLKGVKLHYT

SEQ ID NO: 478 - protein, 1273 aa, Artificial Sequence
  SARS-CoV-2/Guangdong/20SF028/2020__EPI_ISL_403936 spike protein (1-1273)(K986P_V987P_P1069F)
MFVFLVLLPLVSSQCVNLTTRTQLPPAYTNSFTRGVYYPDKVFRSSVLYSTQDLFLPFFSNVTWFHAIHVSGTNGTKRFDNPVLPFNDGVYFASTEKSNIIRGWIFGTTLDSKTQSLLIVNNATNVVIKVCEFQFCNDPFLGVYYHKNNKSWMESEFRVYSSANNCTFEYVSQPFLMDLEGKQGNFKNLREFVFKNIDGYFKIYSKHTPINLVRDLPQGFSALEPLVDLPIGINITRFQTLLALHRSYLTPGDSSSGWTAGAAAYYVGYLQPRTFLLKYNENGTITDAVDCALDPLSETKCTLKSFTVEKGIYQTSNFRVQPTESIVRFPNITNLCPFGEVFNATRFASVYAWNRKRISNCVADYSVLYNSASFSTFKCYGVSPTKLNDLCFTNVYADSFVIRGDEVRQIAPGQTGKIADYNYKLPDDFTGCVIAWNSNNLDSKVGGNYNYLYRLFRKSNLKPFERDISTEIYQAGSTPCNGVEGFNCYFPLQSYGFQPTNGVGYQPYRVVVLSFELLHAPATVCGPKKSTNLVKNKCVNFNFNGLTGTGVLTESNKKFLPFQQFGRDIADTTDAVRDPQTLEILDITPCSFGGVSVITPGTNTSNQVAVLYQDVNCTEVPVAIHADQLTPTWRVYSTGSNVFQTRAGCLIGAEHVNNSYECDIPIGAGICASYQTQTNSPRRARSVASQSIIAYTMSLGAENSVAYSNNSIAIPTNFTISVTTEILPVSMTKTSVDCTMYICGDSTECSNLLLQYGSFCTQLNRALTGIAVEQDKNTQEVFAQVKQIYKTPPIKDFGGFNFSQILPDPSKPSKRSFIEDLLFNKVTLADAGFIKQYGDCLGDIAARDLICAQKFNGLTVLPPLLTDEMIAQYTSALLAGTITSGWTFGAGAALQIPFAMQMAYRFNGIGVTQNVLYENQKLIANQFNSAIGKIQDSLSSTASALGKLQDVVNQNAQALNTLVKQLSSNFGAISSVLNDILSRLDPPEAEVQIDRLITGRLQSLQTYVTQQLIRAAEIRASANLAATKMSECVLGQSKRVDFCGKGYHLMSFPQSAPHGVVFLHVTYVFAQEKNFTTAPAICHDGKAHFPREGVFVSNGTHWFVTQRNFYEPQIITTDNTFVSGNCDVVIGIVNNTVYDPLQPELDSFKEELDKYFKNHTSPDVDLGDISGINASVVNIQKEIDRLNEVAKNLNESLIDLQELGKYEQYIKWPWYIWLGFIAGLIAIVMVTIMLCCMTSCCSCLKGCCSCGSCCKFDEDDSEPVLKGVKLHYT

SEQ ID NO: 479 - protein, 1273 aa, Artificial Sequence
  SARS-CoV-2/Shenzhen/SZTH-001/2020__EPI_ISL_406592 spike protein (1-1273)(K986P_V987P_P1069F)
MFVFLVLLPLVSSQCVNLTTRTQLPPAYTNSFTRGVYYPDKVFRSSVLHSTQDLFLPFFSNVTWFHAIHVSGTNGTKRFDNPVLPFNDGVYFASTEKSNIIRGWIFGTTLDSKTQSLLIVNNATNVVIKVCEFQFCNDPFLGVYYHKNNKSWMESEFRVYSSANNCTFEYVSQPFLMDLEGKQGNFKNLREFVFKNIDGYFKIYSKHTPINLVRDLPQGFSALEPLVDLPIGINITRFQTLLALHRSYLTPGDSSSGWTAGAAAYYVGYLQPRTFLLKYNENGTITDAVDCALDPLSETKCTLKSFTVEKGIYQTSNFRVQPTESIVRFPNITNLCPFGEVFNATRFASVYAWNRKRISNCVADYSVLYNSASFSTFKCYGVSPTKLNDLCFTNVYADSFVIRGDEVRQIAPGQTGKIADYNYKLPDDFTGCVIAWNSNNLDSKVGGNYNYLYRLFRKSNLKPFERDISTEIYQAGSTPCNGVEGFNCYFPLQSYGFQPTNGVGYQPYRVVVLSFELLHAPATVCGPKKSTNLVKNKCVNFNFNGLTGTGVLTESNKKFLPFQQFGRDIADTTDAVRDPQTLEILDITPCSFGGVSVITPGTNTSNQVAVLYQDVNCTEVPVAIHADQLTPTWRVYSTGSNVFQTRAGCLIGAEHVNNSYECDIPIGAGICASYQTQTNSPRRARSVASQSIIAYTMSLGAENSVAYSNNSIAIPTNFTISVTTEILPVSMTKTSVDCTMYICGDSTECSNLLLQYGSFCTQLNRALTGIAVEQDKNTQEVFAQVKQIYKTPPIKDFGGFNFSQILPDPSKPSKRSFIEDLLFNKVTLADAGFIKQYGDCLGDIAARDLICAQKFNGLTVLPPLLTDEMIAQYTSALLAGTITSGWTFGAGAALQIPFAMQMAYRFNGIGVTQNVLYENQKLIANQFNSAIGKIQDSLSSTASALGKLQDVVNQNAQALNTLVKQLSSNFGAISSVLNDILSRLDPPEAEVQIDRLITGRLQSLQTYVTQQLIRAAEIRASANLAATKMSECVLGQSKRVDFCGKGYHLMSFPQSAPHGVVFLHVTYVFAQEKNFTTAPAICHDGKAHFPREGVFVSNGTHWFVTQRNFYEPQIITTDNTFVSGNCDVLIGIVNNTVYDPLQPELDSFKEELDKYFKNHTSPDVDLGDISGINASVVNIQKEIDRLNEVAKNLNESLIDLQELGKYEQYIKWPWYIWLGFIAGLIAIVMVTIMLCCMTSCCSCLKGCCSCGSCCKFDEDDSGPVLKGVKLHYT

SEQ ID NO: 480 - protein, 1273 aa, Artificial Sequence
  SARS-CoV-2/Shenzhen/SZTH-004/2020__EPI_ISL_406595 spike protein (1-1273)(K986P_V987P_P1069F)
MFVFLVLLPLVSSQCVNLTTRTQLPPAYTNSFTRGVYYPDKVFRSSVLHSTQDLFLPFFSNVTWFHAIHVSGTNGTKRFDNPVLPFNDGVYFASTEKSNIIRGWIFGTTLDSKTQSLLIVNNATNVVIKVCEFQFCNDPFLGVYYHKNNKSWMESEFRVYSSANNCTFEYVSQPFLMDLEGKQGNFKNLREFVFKNIDGYFKIYSKHTPINLVRDLPQGFSALEPLVDLPIGINITRFQTLLALHRSYLTPGDSSSGWTAGAAAYYVGYLQPRTFLLKYNENGTITDAVDCALDPLSETKCTLKSFTVEKGIYQTSNFRVQPTESIVRFPNITNLCPFGEVFNATRFASVYAWDRKRISNCVAYYSVLYNSASFSTFKCYGVSPTKLNDLCFTNVYADSFVIRGDEVRQIAPGQTGKIADYNYKLPDDFTGCVIAWNSNNLDSKVGGNYNYLYRLFRKSNLKPFERDISTEIYQAGSTPCNGVEGFNCYFPLQSYGFQPTNGVGYQPYRVVVLSFELLHAPATVCGPKKSTNLVKNKCVNFNFNGLTGTGVLTESNKKFLPFQQFGRDIADTTDAVRDPQTLEILDITPCSFGGVSVITPGTNTSNQVAVLYQDVNCTEVPVAIHADQLTPTWRVYSTGSNVFQTRAGCLIGAEHVNNSYECDIPIGAGICASYQTQTNSPRRARSVASQSIIAYTMSLGAENSVAYSNNSIAIPTNFTISVTTEILPVSMTKTSVDCTMYICGDSTECSNLLLQYGSFCTQLNRALTGIAVEQDKNTQEVFAQVKQIYKTPPIKDFGGFNFSQILPDPSKPSKRSFIEDLLFNKVTLADAGFIKQYGDCLGDIAARDLICAQKFNGLTVLPPLLTDEMIAQYTSALLAGTITSGWTFGAGAALQIPFAMQMAYRFNGIGVTQNVLYENQKLIANQFNSAIGKIQDSLSSTASALGKLQDVVNQNAQALNTLVKQLSSNFGAISSVLNDILSRLDPPEAEVQIDRLITGRLQSLQTYVTQQLIRAAEIRASANLAATKMSECVLGQSKRVDFCGKGYHLMSFPQSAPHGVVFLHVTYVFAQEKNFTTAPAICHDGKAHFPREGVFVSNGTHWFVTQRNFYEPQIITTDNTFVSGNCDVVIGIVNNTVYDPLQPELDSFKEELDKYFKNHTSPDVDLGDISGINASVVNIQKEIDRLNEVAKNLNESLIDLQELGKYEQYIKWPWYIWLGFIAGLIAIVMVTIMLCCMTSCCSCLKGCCSCGSCCKFDEDDSEPVLKGVKLHYT

SEQ ID NO: 481 - protein, 1273 aa, Artificial Sequence
  SARS-CoV-2/France/IDF0372/2020__EPI_ISL_406596 spike protein (1-1273)(K986P_V987P_P1069F)
MFVFLVLLPLVSSQCVNLTTRTQLPPAYTNSFTRGVYYPDKVFRSSVLHSTQDLFLPFFSNVTWFHAIHVSGTNGTKRFDNPVLPFNDGVYFASTEKSNIIRGWIFGTTLDSKTQSLLIVNNATNVVIKVCEFQFCNDPFLGVYYHKNNKSWMESEFRVYSSANNCTFEYVSQPFLMDLEGKQGNFKNLREFVFKNIDGYFKIYSKHTPINLVRDLPQGFSALEPLVDLPIGINITRFQTLLALHRSYLTPGDSSSGWTAGAAAYYVGYLQPRTFLLKYNENGTITDAVDCALDPLSETKCTLKSFTVEKGIYQTSNFRVQPTESIVRFPNITNLCPFGEVFNATRFASVYAWNRKRISNCVADYSFLYNSASFSTFKCYGVSPTKLNDLCFTNVYADSFVIRGDEVRQIAPGQTGKIADYNYKLPDDFTGCVIAWNSNNLDSKVGGNYNYLYRLFRKSNLKPFERDISTEIYQAGSTPCNGVEGFNCYFPLQSYGFQPTNGVGYQPYRVVVLSFELLHAPATVCGPKKSTNLVKNKCVNFNFNGLTGTGVLTESNKKFLPFQQFGRDIADTTDAVRDPQTLEILDITPCSFGGVSVITPGTNTSNQVAVLYQDVNCTEVPVAIHADQLTPTWRVYSTGSNVFQTRAGCLIGAEHVNNSYECDIPIGAGICASYQTQTNSPRRARSVASQSIIAYTMSLGAENSVAYSNNSIAIPTNFTISVTTEILPVSMTKTSVDCTMYICGDSTECSNLLLQYGSFCTQLNRALTGIAVEQDKNTQEVFAQVKQIYKTPPIKDFGGFNFSQILPDPSKPSKRSFIEDLLFNKVTLADAGFIKQYGDCLGDIAARDLICAQKFNGLTVLPPLLTDEMIAQYTSALLAGTITSGWTFGAGAALQIPFAMQMAYRFNGIGVTQNVLYENQKLIANQFNSAIGKIQDSLSSTASALGKLQDVVNQNAQALNTLVKQLSSNFGAISSVLNDILSRLDPPEAEVQIDRLITGRLQSLQTYVTQQLIRAAEIRASANLAATKMSECVLGQSKRVDFCGKGYHLMSFPQSAPHGVVFLHVTYVFAQEKNFTTAPAICHDGKAHFPREGVFVSNGTHWFVTQRNFYEPQIITTDNTFVSGNCDVVIGIVNNTVYDPLQPELDSFKEELDKYFKNHTSPDVDLGDISGINASVVNIQKEIDRLNEVAKNLNESLIDLQELGKYEQYIKWPWYIWLGFIAGLIAIVMVTIMLCCMTSCCSCLKGCCSCGSCCKFDEDDSEPVLKGVKLHYT

SEQ ID NO: 482 - protein, 1273 aa, Artificial Sequence
  SARS-CoV-2/Australia/VIC01/2020__EPI_ISL_406844 spike protein (1-1273)(K986P_V987P_P1069F)
MFVFLVLLPLVSSQCVNLTTRTQLPPAYTNSFTRGVYYPDKVFRSSVLHSTQDLFLPFFSNVTWFHAIHVSGTNGTKRFDNPVLPFNDGVYFASTEKSNIIRGWIFGTTLDSKTQSLLIVNNATNVVIKVCEFQFCNDPFLGVYYHKNNKSWMESEFRVYSSANNCTFEYVSQPFLMDLEGKQGNFKNLREFVFKNIDGYFKIYSKHTPINLVRDLPQGFSALEPLVDLPIGINITRFQTLLALHRRYLTPGDSSSGWTAGAAAYYVGYLQPRTFLLKYNENGTITDAVDCALDPLSETKCTLKSFTVEKGIYQTSNFRVQPTESIVRFPNITNLCPFGEVFNATRFASVYAWNRKRISNCVADYSVLYNSASFSTFKCYGVSPTKLNDLCFTNVYADSFVIRGDEVRQIAPGQTGKIADYNYKLPDDFTGCVIAWNSNNLDSKVGGNYNYLYRLFRKSNLKPFERDISTEIYQAGSTPCNGVEGFNCYFPLQSYGFQPTNGVGYQPYRVVVLSFELLHAPATVCGPKKSTNLVKNKCVNFNFNGLTGTGVLTESNKKFLPFQQFGRDIADTTDAVRDPQTLEILDITPCSFGGVSVITPGTNTSNQVAVLYQDVNCTEVPVAIHADQLTPTWRVYSTGSNVFQTRAGCLIGAEHVNNSYECDIPIGAGICASYQTQTNSPRRARSVASQSIIAYTMSLGAENSVAYSNNSIAIPTNFTISVTTEILPVSMTKTSVDCTMYICGDSTECSNLLLQYGSFCTQLNRALTGIAVEQDKNTQEVFAQVKQIYKTPPIKDFGGFNFSQILPDPSKPSKRSFIEDLLFNKVTLADAGFIKQYGDCLGDIAARDLICAQKFNGLTVLPPLLTDEMIAQYTSALLAGTITSGWTFGAGAALQIPFAMQMAYRFNGIGVTQNVLYENQKLIANQFNSAIGKIQDSLSSTASALGKLQDVVNQNAQALNTLVKQLSSNFGAISSVLNDILSRLDPPEAEVQIDRLITGRLQSLQTYVTQQLIRAAEIRASANLAATKMSECVLGQSKRVDFCGKGYHLMSFPQSAPHGVVFLHVTYVFAQEKNFTTAPAICHDGKAHFPREGVFVSNGTHWFVTQRNFYEPQIITTDNTFVSGNCDVVIGIVNNTVYDPLQPELDSFKEELDKYFKNHTSPDVDLGDISGINASVVNIQKEIDRLNEVAKNLNESLIDLQELGKYEQYIKWPWYIWLGFIAGLIAIVMVTIMLCCMTSCCSCLKGCCSCGSCCKFDEDDSEPVLKGVKLHYT

SEQ ID NO: 483 - protein, 1273 aa, Artificial Sequence
  SARS-CoV-2/Germany/BavPat1/2020__EPI_ISL_406862 spike protein (1-1273)(K986P_V987P_P1069F)
MFVFLVLLPLVSSQCVNLTTRTQLPPAYTNSFTRGVYYPDKVFRSSVLHSTQDLFLPFFSNVTWFHAIHVSGTNGTKRFDNPVLPFNDGVYFASTEKSNIIRGWIFGTTLDSKTQSLLIVNNATNVVIKVCEFQFCNDPFLGVYYHKNNKSWMESEFRVYSSANNCTFEYVSQPFLMDLEGKQGNFKNLREFVFKNIDGYFKIYSKHTPINLVRDLPQGFSALEPLVDLPIGINITRFQTLLALHRSYLTPGDSSSGWTAGAAAYYVGYLQPRTFLLKYNENGTITDAVDCALDPLSETKCTLKSFTVEKGIYQTSNFRVQPTESIVRFPNITNLCPFGEVFNATRFASVYAWNRKRISNCVADYSVLYNSASFSTFKCYGVSPTKLNDLCFTNVYADSFVIRGDEVRQIAPGQTGKIADYNYKLPDDFTGCVIAWNSNNLDSKVGGNYNYLYRLFRKSNLKPFERDISTEIYQAGSTPCNGVEGFNCYFPLQSYGFQPTNGVGYQPYRVVVLSFELLHAPATVCGPKKSTNLVKNKCVNFNFNGLTGTGVLTESNKKFLPFQQFGRDIADTTDAVRDPQTLEILDITPCSFGGVSVITPGTNTSNQVAVLYQGVNCTEVPVAIHADQLTPTWRVYSTGSNVFQTRAGCLIGAEHVNNSYECDIPIGAGICASYQTQTNSPRRARSVASQSIIAYTMSLGAENSVAYSNNSIAIPTNFTISVTTEILPVSMTKTSVDCTMYICGDSTECSNLLLQYGSFCTQLNRALTGIAVEQDKNTQEVFAQVKQIYKTPPIKDFGGFNFSQILPDPSKPSKRSFIEDLLFNKVTLADAGFIKQYGDCLGDIAARDLICAQKFNGLTVLPPLLTDEMIAQYTSALLAGTITSGWTFGAGAALQIPFAMQMAYRFNGIGVTQNVLYENQKLIANQFNSAIGKIQDSLSSTASALGKLQDVVNQNAQALNTLVKQLSSNFGAISSVLNDILSRLDPPEAEVQIDRLITGRLQSLQTYVTQQLIRAAEIRASANLAATKMSECVLGQSKRVDFCGKGYHLMSFPQSAPHGVVFLHVTYVFAQEKNFTTAPAICHDGKAHFPREGVFVSNGTHWFVTQRNFYEPQIITTDNTFVSGNCDVVIGIVNNTVYDPLQPELDSFKEELDKYFKNHTSPDVDLGDISGINASVVNIQKEIDRLNEVAKNLNESLIDLQELGKYEQYIKWPWYIWLGFIAGLIAIVMVTIMLCCMTSCCSCLKGCCSCGSCCKFDEDDSEPVLKGVKLHYT

SEQ ID NO: 484 - protein, 1273 aa, Artificial Sequence
  SARS-CoV-2/Wuhan/HBCDC-HB-02/2020__EPI_ISL_412978 spike protein (1-1273)(K986P_V987P_P1069F)
MFVFLVLLPLVSSQCVNLTTRTQLPPAYTNSFTRGVYYPDKVFRSSVLHSTQDLFLPFFSNVTWFHAIHVSGTNGTKRFDNPVLPFNDGVYFASTEKSNIIRGWIFGTTLDSKTQSLLIVNNATNVVIKVCEFQFCNDPFLGVYYHKNNKSWMESEFRVYSSANNCTFEYVSQPFLMDLEGKQGNFKNLREFVFKNIDGYFKIYSKHTPINLVRDLPQGFSALEPLVDLPIGINITRFQTLLALHRSYLTPGDSSSGWTAGAAAYYVGYLQPRTFLLKYNENGTITDAVDCALDPLSETKCTLKSFTVEKGIYQTSNFRVQPTESIVRFPNITNLCPFGEVFNATRFASVYAWNRKRISNCVADYSVLYNSASFSTFKCYGVSPTKLNDLCFTNVYADSFVIRGDEVRQIAPGQTGKIADYNYKLPDDFTGCVIAWNSNNLDSKVGGNYNYLYRLFRKSNLKPFERDISTEIYQAGSTPCNGVEGFNCYFPLQSYGFQPTNGVGYQPYRVVVLSFELLHAPATVCGPKKSTNLVKNKCVNFNFNGLTGTGVLTESNKKFLPFQQFGRDIADTTDAVRDPQTLEILDITPCSFGGVSVITPGTNTSNQVAVLYQDVNCTEVPVAIHADQLTPTWRVYSTGSNVFQTRAGCLIGAEHVNNSYECDIPIGAGICASYQTQTNSPRRARSVASQSIIAYTMSLGAENSVAYSNNSIAIPTNFTISVTTEILPVSMTKTSVDCTMYICGDSTECSNFLLQYGSFCTQLNRALTGIAVEQDKNTQEVFAQVKQIYKTPPIKDFGGFNFSQILPDPSKPSKRSFIEDLLFNKVTLADAGFIKQYGDCLGDIAARDLICAQKFNGLTVLPPLLTDEMIAQYTSALLAGTITSGWTFGAGAALQIPFAMQMAYRFNGIGVTQNVLYENQKLIANQFNSAIGKIQDSLSSTASALGKLQDVVNQNAQALNTLVKQLSSNFGAISSVLNDILSRLDPPEAEVQIDRLITGRLQSLQTYVTQQLIRAAEIRASANLAATKMSECVLGQSKRVDFCGKGYHLMSFPQSAPHGVVFLHVTYVFAQEKNFTTAPAICHDGKAHFPREGVFVSNGTHWFVTQRNFYEPQIITTDNTFVSGNCDVVIGIVNNTVYDPLQPELDSFKEELDKYFKNHTSPDVDLGDISGINASVVNIQKEIDRLNEVAKNLNESLIDLQELGKYEQYIKWPWYIWLGFIAGLIAIVMVTIMLCCMTSCCSCLKGCCSCGSCCKFDEDDSEPVLKGVKLHYT

SEQ ID NO: 485 - protein, 1273 aa, Artificial Sequence
  SARS-CoV-2/Australia/QLD02/2020__EPI_ISL_407896 spike protein (1-1273)(K986P_V987P_P1069F)
MFVFLVLLPLVSSQCVNLTTRTQLPPAYTNSFTRGVYYPDKVFRSSVLHSTQDLFLPFFSNVTWFHAIHVSGTNGTKRFDNPVLPFNDGVYFASTEKSNIIRGWIFGTTLDSKTQSLLIVNNATNVVIKVCEFQFCNDPFLGVYYHKNNKSWMESEFRVYSSANNCTFEYVSQPFLMDLEGKQGNFKNLREFVFKNIDGYFKIYSKHTPINLVRDLPQGFSALEPLVDLPIGINITRFQTLLALHRSYLTPGDSSSGWTAGAAAYYVGYLQPRTFLLKYNENGTITDAVDCALDPLSETKCTLKSFTVEKGIYQTSNFRVQPTESIVRFPNITNLCPFGEVFNATRFASVYAWNRKRISNCVADYSVLYNSASFSTFKCYGVSPTKLNDLCFTNVYADSFVIRGDEVRQIAPGQTGKIADYNYKLPDDFTGCVIAWNSNNLDSKVGGNYNYLYRLFRKSNLKPFERDISTEIYQAGSTPCNGVEGFNCYFPLQSYGFQPTNGVGYQPYRVVVLSFELLHAPATVCGPKKSTNLVKNKCVNFNFNGLTGTGVLTESNKKFLPFQQFGRDIADTTDAVRDPQTLEILDITPCSFGGVSVITPGTNTSNQVAVLYQDVNCTEVPVAIHADQLTPTWRVYSTGSNVFQTRAGCLIGAEHVNNSYECDIPIGAGICASYQTQTNSPRRARSVASQSIIAYTMSLGAENSVAYSNNSIAIPTNFTISVTTEILPVSMTKTSVDCTMYICGDSTECSNLLLQYGSFCTQLNRALTGIAVEQDKNTQEVFAQVKQIYKTPPIKDFGGFNFSQILPDPSKPSKRSFIEDLLFNKVTLADAGFIKQYGDCLGDIAARDLICAQKFNGLTVLPPLLTDEMIAQYTSALLAGTITSGWTFGAGAALQIPFAMQMAYRFNGIGVTQNVLYENQKLIANQFNSAIGKIQDSLSSTASALGKLQDVVNQNAQALNTLVKQLSSNFGAISSVLNDILSRLDPPEAEVQIDRLITGRLQSLQTYVTQQLIRAAEIRASANLAATKMSECVLGQSKRVDFCGKGYHLMSFPQSAPHGVVFLHVTYVFAQEKNFTTAPAICHDGKAHFPREGVFVSNGTHWFVTQRNFYEPQIITTDNTFVSGNCDVVIGIVNNTVYDPLQLELDSFKEELDKYFKNHTSPDVDLGDISGINASVVNIQKEIDRLNEVAKNLNESLIDLQELGKYEQYIKWPWYIWLGFIAGLIAIVMVTIMLCCMTSCCSCLKGCCSCGSCCKFDEDDSEPVLKGVKLHYT

SEQ ID NO: 486 - protein, 1273 aa, Artificial Sequence
  SARS-CoV-2/India/1-31/2020__EPI_ISL_413523 spike protein (1-1273)(K986P_V987P_P1069F)
MFVFLVLLPLVSSQCVNLTTRTQLPPAYTNSFTRGVYYPDKVFRSSVLHSTQDLFLPFFSNVTWFHAIHVSGTNGTKRFDNPVLPFNDGVYFASTEKSNIIRGWIFGTTLDSKTQSLLIVNNATNVVIKVCEFQFCNDPFLGVYYHKNNKSWMESEFRVYSSANNCTFEYVSQPFLMDLEGKQGNFKNLREFVFKNIDGYFKIYSKHTPINLVRDLPQGFSALEPLVDLPIGINITRFQTLLALHRSYLTPGDSSSGWTAGAAAYYVGYLQPRTFLLKYNENGTITDAVDCALDPLSETKCTLKSFTVEKGIYQTSNFRVQPTESIVRFPNITNLCPFGEVFNATRFASVYAWNRKRISNCVADYSVLYNSASFSTFKCYGVSPTKLNDLCFTNVYADSFVIRGDEVRQIAPGQTGKIADYNYKLPDDFTGCVIAWNSNNLDSKVGGNYNYLYRLFRKSNLKPFERDISTEIYQAGSTPCNGVEGFNCYFPLQSYGFQPTNGVGYQPYRVVVLSFELLHAPATVCGPKKSTNLVKNKCVNFNFNGLTGTGVLTESNKKFLPFQQFGRDIADTTDAVRDPQTLEILDITPCSFGGVSVITPGTNTSNQVAVLYQDVNCTEVPVAIHADQLTPTWRVYSTGSNVFQTRAGCLIGAEHVNNSYECDIPIGAGICASYQTQTNSPRRARSVASQSIIAYTMSLGAENSVAYSNNSIAIPTNFTISVTTEILPVSMTKTSVDCTMYICGDSTECSNLLLQYGSFCTQLNRALTGIAVEQDKNTQEVFAQVKQIYKTPPIKDFGGFNFSQILPDPSKPSKRSFIEDLLFNKVTLADAGFIKQYGDCLGDIAARDLICAQKFNGLTVLPPLLTDEMIAQYTSALLAGTITSGWTFGAGAALQIPFAMQMAYRFNGIGVTQNVLYENQKLIANQFNSVIGKIQDSLSSTASALGKLQDVVNQNAQALNTLVKQLSSNFGAISSVLNDILSRLDPPEAEVQIDRLITGRLQSLQTYVTQQLIRAAEIRASANLAATKMSECVLGQSKRVDFCGKGYHLMSFPQSAPHGVVFLHVTYVFAQEKNFTTAPAICHDGKAHFPREGVFVSNGTHWFVTQRNFYEPQIITTDNTFVSGNCDVVIGIVNNTVYDPLQPELDSFKEELDKYFKNHTSPDVDLGDISGINASVVNIQKEIDRLNEVAKNLNESLIDLQELGKYEQYIKWPWYIWLGFIAGLIAIVMVTIMLCCMTSCCSCLKGCCSCGSCCKFDEDDSEPVLKGVKLHYT

SEQ ID NO: 487 - protein, 1273 aa, Artificial Sequence
  SARS-CoV-2/Guangdong/GD2020087-P0008/2020__EPI_ISL_413863 spike protein (1-1273)(K986P_V987P_P1069F)
MFVFLVLLPLVSSQCVNLTTRTQLPPAYTNSFTRGVYYPDKVFRSSVLHSTQDLFLPFFSNVTWFHAIHVSGTNGTKRFDNPVLPFNDGVYFASTEKSNIIRGWIFGTTLDSKTQSLLIVNNATNVVIKVCEFQFCNDPFLGVYYHKNNKSWMESEFRVYSSANNCTFEYVSQPFLMDLEGKQGNFKNLREFVFKNIDGYFKIYSKHTPINLVRDLPQGFSALEPLVDLPIGINITRFQTLLALHRSYLTPGDSSSGWTAGAAAYYVGYLQPRTFLLKYNENGTITDAVDCALDPLSETKCTLKSFTVEKGIYQTSNFRVQPTESIVRFPNITNLCPFGEVFNATRFASVYAWNRKRISNCVADYSVLYNSASFSTFKCYGVSPTKLNDLCFTNVYADSFVIRGDEVREIAPGQTGKIADYNYKLPDDFTGCVIAWNSNNLDSKVGGNYNYLYRLFRKSNLKPFERDISTEIYQAGSTPCNGVEGFNCYFPLQSYGFQPTNGVGYQPYRVVVLSFELLHAPATVCGPKKSTNLVKNKCVNFNFNGLTGTGVLTESNKKFLPFQQFGRDIADTTDAVRDPQTLEILDITPCSFGGVSVITPGTNTSNQVAVLYQDVNCTEVPVAIHADQLTPTWRVYSTGSNVFQTRAGCLIGAEHVNNSYECDIPIGAGICASYQTQTNSPRRARSVASQSIIAYTMSLGAENSVAYSNNSIAIPTNFTISVTTEILPVSMTKTSVDCTMYICGDSTECSNLLLQYGSFCTQLNRALTGIAVEQDKNTQEVFAQVKQIYKTPPIKDFGGFNFSQILPDPSKPSKRSFIEDLLFNKVTLADAGFIKQYGDCLGDIAARDLICAQKFNGLTVLPPLLTDEMIAQYTSALLAGTITSGWTFGAGAALQIPFAMQMAYRFNGIGVTQNVLYENQKLIANQFNSAIGKIQDSLSSTASALGKLQDVVNQNAQALNTLVKQLSSNFGAISSVLNDILSRLDPPEAEVQIDRLITGRLQSLQTYVTQQLIRAAEIRASANLAATKMSECVLGQSKRVDFCGKGYHLMSFPQSAPHGVVFLHVTYVFAQEKNFTTAPAICHDGKAHFPREGVFVSNGTHWFVTQRNFYEPQIITTDNTFVSGNCDVVIGIVNNTVYDPLQPELDSFKEELDKYFKNHTSPDVDLGDISGINASVVNIQKEIDRLNEVAKNLNESLIDLQELGKYEQYIKWPWYIWLGFIAGLIAIVMVTIMLCCMTSCCSCLKGCCSCGSCCKFDEDDSEPVLKGVKLHYT

SEQ ID NO: 488 - protein, 1273 aa, Artificial Sequence
  SARS-CoV-2/Sweden/01/2020__EPI_ISL_411951 spike protein (1-1273)(K986P_V987P_P1069F)
MFVFLVLLPLVSSQCVNLTTRTQLPPAYTNSFTRGVYYPDKVFRSSVLHSTQDLFLPFFSNVTWFHAIHVSGTNGTKRFDNPVLPFNDGVYFASTEKSNIIRGWIFGTTLDSKTQSLLIVNNATNVVIKVCEFQFCNDPFLGVYYHKNNKSWMESEFRVYSSANNCTFEYVSQPFLMDLEGKQGNFKNLREFVFKNIDGYFKIYSKHTPINLVRDLPQGFSALEPLVDLPIGINITRFQTLLALHRSYLTPGDSSSGWTAGAAAYYVGYLQPRTFLLKYNENGTITDAVDCALDPLSETKCTLKSFTVEKGIYQTSNFRVQPTESIVRFPNITNLCPFGEVFNATRFASVYAWNRKRISNCVADYSVLYNSASFSTFKCYGVSPTKLNDLCFTNVYADSFVIRGDEVRQIAPGQTGKIADYNYKLPDDFTGCVIAWNSNNLDSKVGGNYNYLYRLFRKSNLKPFERDISTEIYQAGSTPCNGVEGFNCYFPLQSYGFQPTNGVGYQPYRVVVLSFELLHAPATVCGPKKSTNLVKNKCVNFNFNGLTGTGVLTESNKKFLPFQQFGRDIADTTDAVRDPQTLEILDITPCSFGGVSVITPGTNTSNQVAVLYQDVNCTEVPVAIHADQLTPTWRVYSTGSNVFQTRAGCLIGAEHVNNSYECDIPIGAGICASYQTQTNSPRRARSVASQSIIAYTMSLGAENSVAYSNNSIAIPTNFTISVTTEILPVSMTKTSVDCTMYICGDSTECSNLLLQYGSFCTQLNRALTGIAVEQDKNTQEVFAQVKQIYKTPPIKDCGGFNFSQILPDPSKPSKRSFIEDLLFNKVTLADAGFIKQYGDCLGDIAARDLICAQKFNGLTVLPPLLTDEMIAQYTSALLAGTITSGWTFGAGAALQIPFAMQMAYRFNGIGVTQNVLYENQKLIANQFNSAIGKIQDSLSSTASALGKLQDVVNQNAQALNTLVKQLSSNFGAISSVLNDILSRLDPPEAEVQIDRLITGRLQSLQTYVTQQLIRAAEIRASANLAATKMSECVLGQSKRVDFCGKGYHLMSFPQSAPHGVVFLHVTYVFAQEKNFTTAPAICHDGKAHFPREGVFVSNGTHWFVTQRNFYEPQIITTDNTFVSGNCDVVIGIVNNTVYDPLQPELDSFKEELDKYFKNHTSPDVDLGDISGINASVVNIQKEIDRLNEVAKNLNESLIDLQELGKYEQYIKWPWYIWLGFIAGLIAIVMVTIMLCCMTSCCSCLKGCCSCGSCCKFDEDDSEPVLKGVKLHYT

SEQ ID NO: 489 - protein, 1273 aa, Artificial Sequence
  SARS-CoV-2/Tianmen/HBCDC-HB-07/2020__EPI_ISL_412983 spike protein (1-1273)(K986P_V987P_P1069F)
MFVFLVLLPLVSSQCVNLTTRTQLPPAYTNSFTRGVYYPDKVFRSSVLHSTQDLFLPFFSNVTWFHAIHVSGTNGTKRFDNPVLPFNDGVYFASTEKSNIIRGWIFGTTLDSKTQSLLIVNNATNVVIKVCEFQFCNDPFLGVYYHKNNKSWMESEFRVYSSANNCTFEYVSQPFLMDLEGKQGNFKNLREFVFKNIDGYFKIYSKHTPINLVRDLPQGFSALEPLVDLPIGINITRFQTLLALHRSYLTPGDSSSGWTAGAAAYYVGYLQPRTFLLKYNENGTITDAVDCALDPLSETKCTLKSFTVEKGIYQTSNFRVQPTESIVRFPNITNLCPFGEVFNATRFASVYAWNRKRISNCVADYSVLYNSASFSTFKCYGVSPTKLNDLCFTNVYADSFVIRGDEVRQIAPGQTGKIADYNYKLPDDFTGCVIAWNSNNLDSKVGGNYNYLYRLFRKSNLKPFERDISTEIYQAGSTPCNGVEGFNCYFPLQSYGFQPTNGVGYQPYRVVVLSFELLHAPATVCGPKKSTNLVKNKCVNFNFNGLTGTGVLTESNKKFLPFQQFGRDIADTTDAVRDPQTLEILDITPCSFGGVSVITPGTNTSNQVAVLYQDLNCTEVPVAIHADQLTPTWRVYSTGSNVFQTRAGCLIGAEHVNNSYECDIPIGAGICASYQTQTNSPRRARSVASQSIIAYTMSLGAENSVAYSNNSIAIPTNFTISVTTEILPVSMTKTSVDCTMYICGDSTECSNLLLQYGSFCTQLNRALTGIAVEQDKNTQEVFAQVKQIYKTPPIKDFGGFNFSQILPDPSKPSKRSFIEDLLFNKVTLADAGFIKQYGDCLGDIAARDLICAQKFNGLTVLPPLLTDEMIAQYTSALLAGTITSGWTFGAGAALQIPFAMQMAYRFNGIGVTQNVLYENQKLIANQFNSAIGKIQDSLSSTASALGKLQDVVNQNAQALNTLVKQLSSNFGAISSVLNDILSRLDPPEAEVQIDRLITGRLQSLQTYVTQQLIRAAEIRASANLAATKMSECVLGQSKRVDFCGKGYHLMSFPQSAPHGVVFLHVTYVFAQEKNFTTAPAICHDGKAHFPREGVFVSNGTHWFVTQRNFYEPQIITTDNTFVSGNCDVVIGIVNNTVYDPLQPELDSFKEELDKYFKNHTSPDVDLGDISGINASVVNIQKEIDRLNEVAKNLNESLIDLQELGKYEQYIKWPWYIWLGFIAGLIAIVMVTIMLCCMTSCCSCLKGCCSCGSCCKFDEDDSEPVLKGVKLHYT

SEQ ID NO: 490 - protein, 1273 aa, Artificial Sequence
  SARS-CoV-2/Hong Kong/case42_VM20002493/2020__EPI_ISL_414527 spike protein (1-1273)(K986P_V987P_P1069F)
MFVFLVLLPLVSSQCVNLTTRTQLPPAYTNSFTRGVYYPDKVFRSSVLHSTQDLFLPFFSNVTWFHAIHVSGTNGTKRFDNPVLPFNDGVYFASTEKSNIIRGWIFGTTLDSKTQSLLIVNNATNVVIKVCEFQFCNDPFLGVYYHKNNKSWMESEFRVYSSANNCTFEYVSQPFLMDLEGKQGNFKNLREFVFKNIDGYFKIYSKHTPINLVRDLPQGFSALEPLVDLPIGINITRFQTLLALHRSYLTPGDSSSGWTAGAAAYYVGYLQPRTFLLKYNENGTITDAVDCALDPLSETKCTLKSFTVEKGIYQTSNFRVQPTESIVRFPNITNLCPFGEVFNATRFASVYAWNRKRISNCVADYSVLYNSASFSTFKCYGVSPTKLNDLCFTNVYADSFVIRGDEVRQIAPGQTGKIADYNYKLPDDFTGCVIAWNSNNLDSKVGGNYNYLYRLFRKSNLKPFERDISTEIYQAGSTPCNGVEGFNCYFPLQSYGFQPTNGVGYQPYRVVVLSFELLHAPATVCGPKKSTNLVKNKCVNFNFNGLTGTGVLTESNKKFLPFQQFGRDIADTTDAVRDPQTLEILDITPCSFGGVSVITPGTNTSNQVAVLYQDVNCTEVPVAIHADQLTPTWRVYSTGSNVFQTRAGCLIGAEHVNNSYECDIPIGAGICASYQTQTNSPRRARSVASQSIIAYTMSLGAENSVAYSNNSIAIPTNFAISVTTEILPVSMTKTSVDCTMYICGDSTECSNLLLQYGSFCTQLNRALTGIAVEQDKNTQEVFAQVKQIYKTPPIKDFGGFNFSQILPDPSKPSKRSFIEDLLFNKVTLADAGFIKQYGDCLGDIAARDLICAQKFNGLTVLPPLLTDEMIAQYTSALLAGTITSGWTFGAGAALQIPFAMQMAYRFNGIGVTQNVLYENQKLIANQFNSAIGKIQDSLSSTASALGKLQDVVNQNAQALNTLVKQLSSNFGAISSVLNDILSRLDPPEAEVQIDRLITGRLQSLQTYVTQQLIRAAEIRASANLAATKMSECVLGQSKRVDFCGKGYHLMSFPQSAPHGVVFLHVTYVFAQEKNFTTAPAICHDGKAHFPREGVFVSNGTHWFVTQRNFYEPQIITTDNTFVSGNCDVVIGIVNNTVYDPLQPELDSFKEELDKYFKNHTSPDVDLGDISGINASVVNIQKEIDRLNEVAKNLNESLIDLQELGKYEQYIKWPWYIWLGFIAGLIAIVMVTIMLCCMTSCCSCLKGCCSCGSCCKFDEDDSEPVLKGVKLHYT

SEQ ID NO: 491 - protein, 1273 aa, Artificial Sequence
  SARS-CoV-2/USA/CruiseA-23/2020__EPI_ISL_414482 spike protein (1-1273)(K986P_V987P_P1069F)
MFVFLVLLPLVSSQCVNLTTRTQLPPAYTNSFTRGVYYPDKVFRSSVLHSTQDLFLPFFSNVTWFHAIHVSGTNGTKRFDNPVLPFNDGVYFASTEKSNIIRGWIFGTTLDSKTQSLLIVNNATNVVIKVCEFQFCNDPFLGVYYHKNNKSWMESEFRVYSSANNCTFEYVSQPFLMDLEVKQGNFKNLREFVFKNIDGYFKIYSKHTPINLVRDLPQGFSALEPLVDLPIGINITRFQTLLALHRSYLTPGDSSSGWTAGAAAYYVGYLQPRTFLLKYNENGTITDAVDCALDPLSETKCTLKSFTVEKGIYQTSNFRVQPTESIVRFPNITNLCPFGEVFNATRFASVYAWNRKRISNCVADYSVLYNSASFSTFKCYGVSPTKLNDLCFTNVYADSFVIRGDEVRQIAPGQTGKIADYNYKLPDDFTGCVIAWNSNNLDSKVGGNYNYLYRLFRKSNLKPFERDISTEIYQAGSTPCNGVEGFNCYFPLQSYGFQPTNGVGYQPYRVVVLSFELLHAPATVCGPKKSTNLVKNKCVNFNFNGLTGTGVLTESNKKFLPFQQFGRDIADTTDAVRDPQTLEILDITPCSFGGVSVITPGTNTSNQVAVLYQDVNCTEVPVAIHADQLTPTWRVYSTGSNVFQTRAGCLIGAEHVNNSYECDIPIGAGICASYQTQTNSPRRARSVASQSIIAYTMSLGAENSVAYSNNSIAIPTNFTISVTTEILPVSMTKTSVDCTMYICGDSTECSNLLLQYGSFCTQLNRALTGIAVEQDKNTQEVFAQVKQIYKTPPIKDFGGFNFSQILPDPSKPSKRSFIEDLLFNKVTLADAGFIKQYGDCLGDIAARDLICAQKFNGLTVLPPLLTDEMIAQYTSALLAGTITSGWTFGAGAALQIPFAMQMAYRFNGIGVTQNVLYENQKLIANQFNSAIGKIQDSLSSTASALGKLQDVVNQNAQALNTLVKQLSSNFGAISSVLNDILSRLDPPEAEVQIDRLITGRLQSLQTYVTQQLIRAAEIRASANLAATKMSECVLGQSKRVDFCGKGYHLMSFPQSAPHGVVFLHVTYVFAQEKNFTTAPAICHDGKAHFPREGVFVSNGTHWFVTQRNFYEPQIITTDNTFVSGNCDVVIGIVNNTVYDPLQPELDSFKEELDKYFKNHTSPDVDLGDISGINASVVNIQKEIDRLNEVAKNLNESLIDLQELGKYEQYIKWPWYIWLGFIAGLIAIVMVTIMLCCMTSCCSCLKGCCSCGSCCKFDEDDSEPVLKGVKLHYT

SEQ ID NO: 492 - protein, 1273 aa, Artificial Sequence
  SARS-CoV-2/Hong Kong/case85_VM20002868/2020__EPI_ISL_414519 spike protein (1-1273)(K986P_V987P_P1069F)
MFVFLVLVPLVSSQCVNLTTRTQLPPAYTNSFTRGVYYPDKVFRSSVLHSTQDLFLPFFSNVTWFHAIHVSGTNGTKRFDNPVLPFNDGVYFASTEKSNIIRGWIFGTTLDSKTQSLLIVNNATNVVIKVCEFQFCNDPFLGVYYHKNNKSWMESEFRVYSSANNCTFEYVSQPFLMDLEGKQGNFKNLREFVFKNIDGYFKIYSKHTPINLVRDLPQGFSALEPLVDLPIGINITRFQTLLALHRSYLTPGDSSSGWTAGAAAYYVGYLQPRTFLLKYNENGTITDAVDCALDPLSETKCTLKSFTVEKGIYQTSNFRVQPTESIVRFPNITNLCPFGEVFNATRFASVYAWNRKRISNCVADYSVLYNSASFSTFKCYGVSPTKLNDLCFTNVYADSFVIRGDEVRQIAPGQTGKIADYNYKLPDDFTGCVIAWNSNNLDSKVGGNYNYLYRLFRKSNLKPFERDISTEIYQAGSTPCNGVEGFNCYFPLQSYGFQPTNGVGYQPYRVVVLSFELLHAPATVCGPKKSTNLVKNKCVNFNFNGLTGTGVLTESNKKFLPFQQFGRDIADTTDAVRDPQTLEILDITPCSFGGVSVITPGTNTSNQVAVLYQDVNCTEVPVAIHADQLTPTWRVYSTGSNVFQTRAGCLIGAEHVNNSYECDIPIGAGICASYQTQTNSPRRARSVASQSIIAYTMSLGAENSVAYSNNSIAIPTNFTISVTTEILPVSMTKTSVDCTMYICGDSTECSNLLLQYGSFCTQLNRALTGIAVEQDKNTQEVFAQVKQIYKTPPIKDFGGFNFSQILPDPSKPSKRSFIEDLLFNKVTLADAGFIKQYGDCLGDIAARDLICAQKFNGLTVLPPLLTDEMIAQYTSALLAGTITSGWTFGAGAALQIPFAMQMAYRFNGIGVTQNVLYENQKLIANQFNSAIGKIQDSLSSTASALGKLQDVVNQNAQALNTLVKQLSSNFGAISSVLNDILSRLDPPEAEVQIDRLITGRLQSLQTYVTQQLIRAAEIRASANLAATKMSECVLGQSKRVDFCGKGYHLMSFPQSAPHGVVFLHVTYVFAQEKNFTTAPAICHDGKAHFPREGVFVSNGTHWFVTQRNFYEPQIITTDNTFVSGNCDVVIGIVNNTVYDPLQPELDSFKEELDKYFKNHTSPDVDLGDISGINASVVNIQKEIDRLNEVAKNLNESLIDLQELGKYEQYIKWPWYIWLGFIAGLIAIVMVTIMLCCMTSCCSCLKGCCSCGSCCKFDEDDSEPVLKGVKLHYT

SEQ ID NO: 493 - protein, 1273 aa, Artificial Sequence
  SARS-CoV-2/England/200990660/2020__EPI_ISL_414523 spike protein (1-1273)(K986P_V987P_P1069F)
MFVFLVLLPLVSSQCVNLTTRTQLPPAYTNSFTRGVYYPDKVFRSSVLHSTQDLFLPFFSNVTWFHAIHVSGTNGTKRFDNPVLPFNDGVYFASTEKSNIIRGWIFGTTLDSKTQSLLIVNNATNVVIKVCEFQFCNDPFLGVYYHKNNKSWMESEFRVYSSANNCTFEYVSQPFLMDLEGKQGNFKNLREFVFKNIDGYFKIYSKHTPINLVRDLPQGFSALEPLVDLPIGINITRFQTLLALHRSYLTPGDSSSGWTAGAAAYYVGYLQPRTFLLKYNENGTITDAVDCALDPLSETKCTLKSFTVEKGIYQTSNFRVQPTESIVRFPNITNLCPFGEVFNATRFASVYAWNRKRISNCVADYSVLYNSASFSTFKCYGVSPTKLNDLCFTNVYADSFVIRGDEVRQIAPGQTGKIADYNYKLPDDFTGCVIAWNSNNLDSKVGGNYNYLYRLFRKSNLKPFERDISTEIYQAGSTPCNGVEGFNCYFPLQSYGFQPTNGVGYQPYRVVVLSFELLHAPATVCGPKKSTNLVKNKCVNFNFNGLTGTGVLTESNKKFLPFQQFGRDIADTTDAVRDPQTLEILDITPCSFGGVSVITPGTNTSNQVAVLYQGVNCTEVPVAIHADQLTPTWRVYSTGSNVFQTRAGCLIGAEHVNNSYECDIPIGAGICASYQTQTNSPRRARSVASQSIIAYTMSLGAENSVAYSNNSIAIPTNFTISVTTEILPVSMTKTSVDCTMYICGDSTECSNLLLQYGSFCTQLNRALTGIAVEQDKNTQEVFAQVKQIYKTPPIKDFGGFNFSQILPDPSKPSKRSFIEDLLFNKVTLADAGFIKQYGDCLGDIAARDLICAQKFNGLTVLPPLLTDEMIAQYTSALLAGTITSGWTFGAGAALQIPFAMQMAYRFNGIGVTQNVLYENQKLIANQFNSAIGKIQDSLSSTASALGKLQDVVNQNAQALNTLVKQLSSNFGAISSVLNDILSRLDPPEAEVQIDRLITGRLQSLQTYVTQQLIRAAEIRASANLAATKMSECVLGQSKRVDFCGKGYHLMSFPQSAPHGVVFLHVTYVFAQEKNFTTAPAICHDGKAHFPREGVFVSNGTHWFVTQRNFYEPQIITTDNTFVSGNCDVVIGIVNNTVYDPLQPELDSFKEELDKYFKNHTSPDVDLGDISGINASVVNIQKEIDRLNEVAKNLNESLIDLQELGKYEQYIKWPWYIWLGFIAGLIAIVMVTIMLCCMTSCCSCLKGCCSCGSCCKFDEDDSELVLKGVKLHYT

SEQ ID NO: 494 - protein, 1273 aa, Artificial Sequence
  SARS-CoV-2/Australia/NSW09/2020__EPI_ISL_413595 spike protein (1-1273)(K986P_V987P_P1069F)
MFVFLVLLPLVSSQCVNLTTRTQLPPAYTNSFTRGVYYPDKVFRSSVLHSTQDLFLPFFSNVTWFHAIHVSGTNGTKRFDNPVLPFNDGVYFASTEKSNIIRGWIFGTTLDSKTQSLLIVNNATNVVIKVCEFQFCNDPFLGVYYHKNNKSWMESEFRVYSSANNCTFEYVSQPFLMDLEGKQGNFKNLREFVFKNIDGYFKIYSKHTPINLVRDLPQGFSALEPLVDLPIGINITRFQTLLALHRSYLTPGDSSSGWTAGAAAYYVGYLQPRTFLLKYNENGTITDAVDCALDPLSETKCTLKSFTVEKGIYQTSNFRVQPTESIVRFPNITNLCPFGEVFNATRFASVYAWNRKRISNCVADYSVLYNSASFSTFKCYGVSPTKLNDLCFTNVYADSFVIRGDEVRQIAPGQTGKIADYNYKLPDDFTGCVIAWNSNNLDSKVGGNYNYLYRLFRKSNLKPFERDISTEIYQAGSTPCNGVEGFNCYFPLQSYGFQPTNGVGYQPYRVVVLSFELLHAPATVCGPKKSTNLVKNKCVNFNFNGLTGTGVLTESNKKFLPFQQFGRDIADTTDAVRDPQTLEILDITPCSFGGVSVITPGTNTSNQVAVLYQDVNCTEVPVAIHADQLTPTWRVYSTGSNVFQTRAGCLIGAEHVNNSYECDIPIGAGICASYQTQTNSPRRARSVASQSIIAYTMSLGAENSVAYSNNSIAIPTNFTISVTTEILPVSMTKTSVDCTMYICGDSTECSNLLLQYGSFCTQLNRALTGIAVEQDKNTQEVFAQVKQIYKTPPIKDFGGFNFSQILPDPSKPSKRSFIEDLLFNKVTLADAGFIKQYGDCLGDIAARDLICAQKFNGLTVLPPLLTDEMIAQYTSALLAGTITSGWTFGAGAALQIPFAMQMAYRFNGIGVTQNVLYENQKLIANQFNSAIGKIQDSLSFTASALGKLQDVVNQNAQALNTLVKQLSSNFGAISSVLNDILSRLDPPEAEVQIDRLITGRLQSLQTYVTQQLIRAAEIRASANLAATKMSECVLGQSKRVDFCGKGYHLMSFPQSAPHGVVFLHVTYVFAQEKNFTTAPAICHDGKAHFPREGVFVSNGTHWFVTQRNFYEPQIITTDNTFVSGNCDVVIGIVNNTVYDPLQPELDSFKEELDKYFKNHTSPDVDLGDISGINASVVNIQKEIDRLNEVAKNLNESLIDLQELGKYEQYIKWPWYIWLGFIAGLIAIVMVTIMLCCMTSCCSCLKGCCSCGSCCKFDEDDSEPVLKGVKLHYT

SEQ ID NO: 495 - protein, 1273 aa, Artificial Sequence
  SARS-CoV-2/Australia/NSW10/2020__EPI_ISL_413596 spike protein (1-1273)(K986P_V987P_P1069F)
MFVFLVLLPLVSSQCVNLTTRTQLPPAYTNSFTRGVYYPDKVFRSSVLHSTQDLFLPFFSNVTWFHAIHVSGTNGTKRFDNPVLPFNDGVYFASTEKSNIIRGWIFGTTLDSKTQSLLIVNNATNVVIKVCEFQFCNDPFLGVYYHKNNKSWMESEFRVYSSANNCTFEYVSQPFLMDLEGKQGNFKNLREFVFKNIDGYFKIYSKHTPINLVRDLPQGFSALEPLVDLPIGINITRFQTLLALHRSYLTPGDSSSGWTAGAAAYYVGYLQPRTFLLKYNENGTITDAVDCALDPLSETKCTLKSFTVEKGIYQTSNFRVQPTESIVRFPNITNLCPFGEVFNATRFASVYAWNRKRISNCVADYSVLYNSASFSTFKCYGVSPTKLNDLCFTNVYADSFVIRGDEVRQIAPGQTGKIADYNYKLPDDFTGCVIAWNSNNLDSKVGGNYNYLYRLFRKSNLKPFERDISTEIYQAGSTPCNGVEGFNCYFPLQSYGFQPTNGVGYQPYRVVVLSFELLHAPATVCGPKKSTNLVKNKCVNFNFNGLTGTGVLTESNKKFLPFQQFGRDIADTTDAVRDPQTLEILDITPCSFGGVSVITPGTNTSNQVAVLYQDVNCTEVPVAIHADQLTPTWRVYSTGSNVFQTRAGCLIGAEHVNNSYECDIPIGAGICASYQTQTNSPRRARSVASQSIIAYTMSLGAENSVAYSNNSIAIPTNFTISVTTEILPVSMTKTSVDCTMYICGDSTECSNLLLQYGSFCTQLNRALTGIAVEQDKNTQEVFAQVKQIYKTPPIKDFGGFNFSQILPDPSKPSKRSFIEDLLFNKVTLADAGFIKQYGDCLGDIAARDLICAQKFNGLTVLPPLLTDEMIAQYTSALLAGTITSGWTFGAGAALQIPFAMQMAYRFNGIGVTQNVLYENQKLIANQFNSAIGKIQDSLSSTASALGKLQDVVNQNAQALNTLVKQLSSNFGAISSVLNDILSRLDPPEAEVQIDRLITGRLQSLQTYVTQQLIRAAEIRASANLAATKMSECVLGQSKRVDFCGKGYHLMSFPQSAPHGVVFLHVTYVFAQEKNFTTAPAICHDGKAHFPREGVFVSNGTHWFVTQRNFYEPQIITTDNTFVSGNCDVVIGIVNNTVYDPLQPELDSFKEELDKYFKNHTSPDVDLGDISGINASVVNIQKEIDRLNEVAKNLNESLIDLQELGKYEQYIKWPWYIWLGFIAGLIAIVMVTIMLCCMTSCCSCLKGCCSCGSCFKFDEDDSEPVLKGVKLHYT

SEQ ID NO: 496 - protein, 1273 aa, Artificial Sequence
  SARS-CoV-2/Switzerland/1000477797/2020__EPI_ISL_413023 spike protein (1-1273)(K986P_V987P_P1069F)
MFVFLVLLPLVSSQCVNLTTRTQLPPAYTNSFTRGVYYPDKVFRSSVLHSTQDLFLPFFSNVTWFHAIHVSGTNGTKRFDNPVLPFNDGVYFASTEKSNIIRGWIFGTTLDSKTQSLLIVNNATNVVIKVCEFQFCNDPFLGVYYHKNNKSWMESEFRVYSSANNCTFEYVSQPFLMDLEGKQGNFKNLREFVFKNIDGYFNIYSKHTPINLVRDLPQGFSALEPLVDLPIGINITRFQTLLALHRSYLTPGDSSSGWTAGAAAYYVGYLQPRTFLLKYNENGTITDAVDCALDPLSETKCTLKSFTVEKGIYQTSNFRVQPTESIVRFPNITNLCPFGEVFNATRFASVYAWNRKRISNCVADYSVLYNSASFSTFKCYGVSPTKLNDLCFTNVYADSFVIRGDEVRQIAPGQTGKIADYNYKLPDDFTGCVIAWNSNNLDSKVGGNYNYLYRLFRKSNLKPFERDISTEIYQAGSTPCNGVEGFNCYFPLQSYGFQPTNGVGYQPYRVVVLSFELLHAPATVCGPKKSTNLVKNKCVNFNFNGLTGTGVLTESNKKFLPFQQFGRDIADTTDAVRDPQTLEILDITPCSFGGVSVITPGTNTSNQVAVLYQGVNCTEVPVAIHADQLTPTWRVYSTGSNVFQTRAGCLIGAEHVNNSYECDIPIGAGICASYQTQTNSPRRARSVASQSIIAYTMSLGAENSVAYSNNSIAIPTNFTISVTTEILPVSMTKTSVDCTMYICGDSTECSNLLLQYGSFCTQLNRALTGIAVEQDKNTQEVFAQVKQIYKTPPIKDFGGFNFSQILPDPSKPSKRSFIEDLLFNKVTLADAGFIKQYGDCLGDIAARDLICAQKFNGLTVLPPLLTDEMIAQYTSALLAGTITSGWTFGAGAALQIPFAMQMAYRFNGIGVTQNVLYENQKLIANQFNSAIGKIQDSLSSTASALGKLQDVVNQNAQALNTLVKQLSSNFGAISSVLNDILSRLDPPEAEVQIDRLITGRLQSLQTYVTQQLIRAAEIRASANLAATKMSECVLGQSKRVDFCGKGYHLMSFPQSAPHGVVFLHVTYVFAQEKNFTTAPAICHDGKAHFPREGVFVSNGTHWFVTQRNFYEPQIITTDNTFVSGNCDVVIGIVNNTVYDPLQPELDSFKEELDKYFKNHTSPDVDLGDISGINASVVNIQKEIDRLNEVAKNLNESLIDLQELGKYEQYIKWPWYIWLGFIAGLIAIVMVTIMLCCMTSCCSCLKGCCSCGSCCKFDEDDSEPVLKGVKLHYT

SEQ ID NO: 497 - protein, 1273 aa, Artificial Sequence
  SARS-CoV-2/Belgium/BA-02291/2020__EPI_ISL_415159 spike protein (1-1273)(K986P_V987P_P1069F)
MFVFLVLLPLVSSQCVNLTTRTQLPPAYTNSFTRGVYYPDKVFRSSVLHSTQDLFLPFFSNVTWFHAIHVSGTNGTKRFDNPVLPFNDGVYFASTEKSNIIRGWIFGTTLDSKTQSLLIVNNATNVVIKVCEFQFCNDPFLGVYYHKNNKSWMESEFRVYSSANNCTFEYVSQPFLMDLEGKQGNFKNLREFVFKNIDGYFKIYSKHTPINLVRDLPQGFSALEPLVDLPIGINITRFQTLLALHRSYLTPGDSSSGWTAGAAAYYVGYLQPRTFLLKYNENGTITDAVDCALDPLSETKCTLKSFTVEKGIYQTSNFRVQPTESIVRFPNITNLCPFGEVFNATRFASVYAWNRKRISNCVADYSVLYNSASFSTFKCYGVSPTKLNDLCFTNVYADSFVIRGDEVRQIAPGQTGKIADYNYKLPDDFTGCVIAWNSNNLDSKVGGNYNYLYRLFRRSNLKPFERDISTEIYQAGSTPCNGVEGFNCYFPLQSYGFQPTNGVGYQPYRVVVLSFELLPAPATVCGPKKSTNLVKNKCVNFNFNGLTGTGVLTESNKKFLPFQQFGRDIADTTDAVRDPQTLEILDITPCSFGGVSVITPGTNTSNQVAVLYQGVNCTEVPVAIHADQLTPTWRVYSTGSNVFQTRAGCLIGAEHVNNSYECDIPIGAGICASYQTQTNSPRRARSVASQSIIAYTMSLGAENSVAYSNNSIAIPTNFTISVTTEILPVSMTKTSVDCTMYICGDSTECSNLLLQYGSFCTQLNRALTGIAVEQDKNTQEVFAQVKQIYKTPPIKDFGGFNFSQILPDPSKPSKRSFIEDLLFNKVTLADAGFIKQYGDCLGDIAARDLICAQKFNGLTVLPPLLTDEMIAQYTSALLAGTITSGWTFGAGAALQIPFAMQMAYRFNGIGVTQNVLYENQKLIANQFNSAIGKIQDSLSSAAPALGKLQDVVNQNAQALNTLVKQLSSNFGAISSVLNDILSRLDPPEAEVQIDRLITGRLQSLQTYVTQQLIRAAEIRASANLAATKMSECVLGQSKRVDFCGKGYHLMSFPQSAPHGVVFLHVTYVFAQEKNFTTAPAICHDGKAHFPREGVFVSNGTHWFVTQRNFYEPQIITTDNTFVSGNCDVVIGIVNNTVYDPLQPELDSFKEELDKYFKNHTSPDVDLGDISGINASVVNIQKEIDRLNEVAKNLNESLIDLQELGKYEQYIKWPWYIWLGFIAGLIAIVMVTIMLCCMTSCCSCLKGCCSCGSCCKFDEDDSEPVLKGVKLHYT

SEQ ID NO: 498 - protein, 1273 aa, Artificial Sequence
  SARS-CoV-2/USA/WA8-UW5/2020__EPI_ISL_413486 spike protein (1-1273)(K986P_V987P_P1069F)
MFVFLVLLPLVSSQCVNLTTRTQLPPAYTNSFTRGVYYPDKVFRSSVLHSTQDLFLPFFSNVTWFHAIHVSGTNGTKRFDNPVLPFNDGVYFASTEKSNIIRGWIFGTTLDSKTQSLLIVNNATNVVIKVCEFQFCNDPFLGVYYHKNNKSWMESEFRVYSSANNCTFEYVSQPFLMDLEGKQGNFKNLREFVFKNIDGYFKIYSKHTPINLVRDLPQGFSALEPLVDLPIGINITRFQTLLALHRSYLTPGDSSSGWTAGAAAYYVGYLQPRTFLLKYNENGTITDAVDCALDPLSETKCTLKSFTVEKGIYQTSNFRVQPTESIVRFPNITNLCPFGEVFNATRFASVYAWNRKRISNCVADYSVLYNSASFSTFKCYGVSPTKLNDLCFTNVYADSFVIRGDEVRQIAPGQTGKIADYNYKLPDDFTGCVIAWNSNNLDSKVGGNYNYLYRLFRKSNLKPFERDISTEIYQAGSTPCNGVEGFNCYFPLQSYGFQPTNGVGYQPYRVVVLSFELLHAPATVCGPKKSTNLVKNKCVNFNFNGLTGTGVLTESNKKFLPFQQFGRDIADTTDAVRDPQTLEILDITPCSFGGVSVITPGTNTSNQVAVLYQDVNCTEVPVAIHADQLTPTWRVYSTGSNVFQTRAGCLIGAEYVNNSYECDIPIGAGICASYQTQTNSPRRARSVASQSIIAYTMSLGAENSVAYSNNSIAIPTNFTISVTTEILPVSMTKTSVDCTMYICGDSTECSNLLLQYGSFCTQLNRALTGIAVEQDKNTQEVFAQVKQIYKTPPIKDFGGFNFSQILPDPSKPSKRSFIEDLLFNKVTLADAGFIKQYGDCLGDIAARDLICAQKFNGLTVLPPLLTDEMIAQYTSALLAGTITSGWTFGAGAALQIPFAMQMAYRFNGIGVTQNVLYENQKLIANQFNSAIGKIQDSLSSTASALGKLQDVVNQNAQALNTLVKQLSSNFGAISSVLNDILSRLDPPEAEVQIDRLITGRLQSLQTYVTQQLIRAAEIRASANLAATKMSECVLGQSKRVDFCGKGYHLMSFPQSAPHGVVFLHVTYVFAQEKNFTTAPAICHDGKAHFPREGVFVSNGTHWFVTQRNFYEPQIITTDNTFVSGNCDVVIGIVNNTVYDPLQPELDSFKEELDKYFKNHTSPDVDLGDISGINASVVNIQKEIDRLNEVAKNLNESLIDLQELGKYEQYIKWPWYIWLGFIAGLIAIVMVTIMLCCMTSCCSCLKGCCSCGSCCKFDEDDSEPVLKGVKLHYT

SEQ ID NO: 499 - protein, 1273 aa, Artificial Sequence
  SARS-CoV-2/England/20102000506/2020__EPI_ISL_415147 spike protein (1-1273)(K986P_V987P_P1069F)
MFVFLVLLPLVSSQCVNLTTRTQLPPAYTNSFTRGVYYPDKVFRSSVLHSTQDLFLPFFSNVTWFHAIHVSGTNGTKRFDNPVLPFNDGVYFASTEKSNIIRGWIFGTTLDSKTQSLLIVNNATNVVIKVCEFQFCNDPFLGVYYHKNNKSWMESEFRVYSSANNCTFEYVSQPFLMDLEGKQGNFKNLREFVFKNIDGYFKIYSKHTPINLVRDLPQGFSALEPLVDLPIGINITRFQTLLALHRSYLTPGDSSSGWTAGAAAYYVGYLQPRTFLLKYNENGTITDAVDCALDPLSETKCTLKSFTVEKGIYQTSNFRVQPTESIVRFPNITNLCPFGEVFNATRFASVYAWNRKRISNCVADYSVLYNSASFSTFKCYGVSPTKLNDLCFTNVYADSFVIRGDEVRQIAPGQTGKIADYNYKLPDDFTGCVIAWNSNNLDSKVGGNYNYLYRLFRKSNLKPFERDISTEIYQAGSTPCNGVEGFNCYFPLQSYGFQPTNGVGYQPYRVVVLSFELLHAPATVCGPKKSTNLVKNKCVNFNFNGLTGTGVLTESNKKFLPFQQFGRDIADTTDAVRDPQTLEILDITPCSFGGVSVITPGTNTSNQVAVLYQGVNCTEVPVAIHADQLTPTWRVYSTGSNVFQTRAGCLIGAEHVNNSYECDIPIGAGICASYQTQTNSPRRARSVASQSIIAYTMSLGAENSVAYSNNSIAIPTNFTISVTTEILPVSMTKTSVDCTMYICGDSTECSNLLLQYGSFCTQLNRALTGIAVEQDKNTQEVFAQVKQIYKTPPIKDFGGFNFSQILPDPSKPSKRSFIEDLLFNKVTLADAGFIKQYGYCLGDIAARDLICAQKFNGLTVLPPLLTDEMIAQYTSALLAGTITSGWTFGAGAALQIPFAMQMAYRFNGIGVTQNVLYENQKLIANQFNSAIGKIQDSLSSTASALGKLQDVVNQNAQALNTLVKQLSSNFGAISSVLNDILSRLDPPEAEVQIDRLITGRLQSLQTYVTQQLIRAAEIRASANLAATKMSECVLGQSKRVDFCGKGYHLMSFPQSAPHGVVFLHVTYVFAQEKNFTTAPAICHDGKAHFPREGVFVSNGTHWFVTQRNFYEPQIITTDNTFVSGNCDVVIGIVNNTVYDPLQPELDSFKEELDKYFKNHTSPDVDLGDISGINASVVNIQKEIDRLNEVAKNLNESLIDLQELGKYEQYIKWPWYIWLGFIAGLIAIVMVTIMLCCMTSCCSCLKGCCSCGSCCKFDEDDSEPVLKGVKLHYT

SEQ ID NO: 500 - protein, 1273 aa, Artificial Sequence
  SARS-CoV-2/Belgium/VAG-03013/2020__EPI_ISL_415155 spike protein (1-1273)(K986P_V987P_P1069F)
MFVFLVLLPLVSSQCVNLTTRTQLPPAYTNSFTRGVYYPDKVFRSSVLHSTQDLFLPFFSNVTWFHAIHVSGTNGTKRFDNPVLPFNDGVYFASTEKSNIIRGWIFGTTLDSKTQSLLIVNNATNVVIKVCEFQFCNDPFLGVYYHKNNKSWMESEFRVYSSANNCTFEYVSQPFLMDLEGKQGNFKNLREFVFKNIDGYFKIYSKHTPINLVRDLPQGFSALEPLVDLPIGINITRFQTLLALHRSYLTPGDSSSGWTAGAAAYYVGYLQPRTFLLKYNENGTITDAVDCALDPLSETKCTLKSFTVEKGIYQTSNFRVQPTESIVRFPNITNLCPFGEVFNATRFASVYAWNRKRISNCVADYSVLYNSASFSTFKCYGVSPTKLNDLCFTNVYADSFVIRGDEVRQIAPGQTGKIADYNYKLPDDFTGCVIAWNSNNLDSKVGGNYNYLYRLFRKSNLKPFERDISTEIYQAGSTPCNGVEGFNCYFPLQSYGFQPTNGVGYQPYRVVVLSFELLHAPATVCGPKKSTNLVKNKCVNFNFNGLTGTGVLTESNKKFLPFQQFGRDIADTTDAVRDPQTLEILDITPCSFGGVSVITPGTNTSNQVAVLYQGVNCTEVPVAIHADQLTPTWRVYSTGSNVFQTRAGCLIGAEHVNNSYECDIPIGAGICASYQTQTNSPRRARSVASQSIIAYTMSLGAENSVAYSNNSIAIPTNFTISVTTEILPVSMTKTSVDCTMYICGDSTECSNLLLQYGSFCTQLNRALTGIAVEQDKNTQEVFAQVKQIYKTPPIKDFGGFNFSQILPDPSKPSKRSFIEDLLFNKVTLADAGFIKQYGDCLGDIAARDLICAQKFNGLTVLPPLLTDEMIAQYTSALLAGTITSGWTFGAGAALQIPFAMQMAYRFNGIGVTQNVLYENQKLIANQFNSAIGKIQDSLSSTATALGKLQDVVNQNAQALNTLVKQLSSNFGAISSVLNDILSRLDPPEAEVQIDRLITGRLQSLQTYVTQQLIRAAEIRASANLAATKMSECVLGQSKRVDFCGKGYHLMSFPQSAPHGVVFLHVTYVFAQEKNFTTAPAICHDGKAHFPREGVFVSNGTHWFVTQRNFYEPQIITTDNTFVSGNCDVVIGIVNNTVYDPLQPELDSFKEELDKYFKNHTSPDVDLGDISGINASVVNIQKEIDRLNEVAKNLNESLIDLQELGKYEQYIKWPWYIWLGFIAGLIAIVMVTIMLCCMTSCCSCLKGCCSCGSCCKFDEDDSEPVLKGVKLHYT

SEQ ID NO: 501 - protein, 1273 aa, Artificial Sequence
  SARS-CoV-2/Belgium/BC-03016/2020__EPI_ISL_415157 spike protein (1-1273)(K986P_V987P_P1069F)
MFVFLVLLPLVSSQCVNLTTRTQLPPAYTNSFTRGVYYPDKVFRSSVLHSTQDLFLPFFSNVTWFHAIHVSGTNGTKRFDNPVLPFNDGVYFASTEKSNIIRGWIFGTTLDSKTQSLLIVNNATNVVIKVCEFQFCNDPFLGVYYHKNNKSWMESEFRVYSSANNCTFEYVSQPFLMDLEGKQGNFKNLREFVFKNIDGYFKIYSKHTPINLVRDLPQGFSALEPLVDLPIGINITRFQTLLALHRSYLTPGDSSSGWTAGAAAYYVGYLQPRTFLLKYNENGTITDAVDCALDPLSETKCTLKSFTVEKGIYQTSNFRVQPTESIVRFPNITNLCPFGEVFNATRFASVYAWNRKRISNCVADYSVLYNSASFSTFKCYGVSPTKLNDLCFTNVYADSFVIRGDEVRQIAPGQTGKIADYNYKLPDDFTGCVIAWNSNNLDSKVGGNYNYLYRLFRKSNLKPFERDISTEIYQAGSTPCNGVEGFNCYFPLQSYGFQPTNGVGYQPYRVVVLSFELLHAPATVCGPKKSTNLVKNKCVNFNFNGLTGTGVLTESNKKFLPFQQFGRDIADTTDAVRDPQTLEILDITPCSFGGVSVITPGTNTSNQVAVLYQGVNCTEVPVAIHADQLTPTWRVYSTGSNVFQTRAGCLIGAEHVNNSYECDIPIGAGICASYQTQTNSPRRARSVASQSIIAYTMSLGAENSVAYSNNSIAIPTNFTISVTTEILPVSMTKTSVDCTMYICGDSTECSNLLLQYGSFCTQLNRALTGIAVEQDKNTQEVFAQVKQIYKTPPIKDFGGFNFSQILPDPSKPSKRSFIEDLLFNKVTLADAGFIKQYGDCLGDIAARDLICAQKFNGLTVLPPLLTDEMIAQYTSALLAGTITSGWTFGAGAALQIPFAMQMAYRFNGIGVTQNVLYENQKLIANQFNSAIGKIQDSLSSTAPALGKLQDVVNQNAQALNTLVKQLSSNFGAISSVLNDILSRLDPPEAEVQIDRLITGRLQSLQTYVTQQLIRAAEIRASANLAATKMSECVLGQSKRVDFCGKGYHLMSFPQSAPHGVVFLHVTYVFAQEKNFTTAPAICHDGKAHFPREGVFVSNGTHWFVTQRNFYEPQIITTDNTFVSGNCDVVIGIVNNTVYDPLQPELDSFKEELDKYFKNHTSPDVDLGDISGINASVVNIQKEIDRLNEVAKNLNESLIDLQELGKYEQYIKWPWYIWLGFIAGLIAIVMVTIMLCCMTSCCSCLKGCCSCGSCCKFDEDDSEPVLKGVKLHYT

SEQ ID NO: 502 - protein, 1273 aa, Artificial Sequence
  SARS-CoV-2/Germany/BavPat3/2020__EPI_ISL_414521 spike protein (1-1273)(K986P_V987P_P1069F)
MFVFLVLLPLVSSQCVNLTTRTQLPPAYTNSFTRGVYYPDKVFRSSVLHSTQDLFLPFFSNVTWFHAIHVSGTNGTKRFDNPVLPFNDGVYFASTEKSNIIRGWIFGTTLDSKTQSLLIVNNATNVVIKVCEFQFCNDPFLGVYYHKNNKSWMESEFRVYSSANNCTFEYVSQPFLMDLEGKQGNFKNLREFVFKNIDGYFKIYSKHTPINLVRDLPQGFSALEPLVDLPIGINITRFQTLLALHRSYLTPGDSSSGWTAGAAAYYVGYLQPRTFLLKYNENGTITDAVDCALDPLSETKCTLKSFTVEKGIYQTSNFRVQPTESIVRFPNITNLCPFGEVFNATRFASVYAWNRKRISNCVADYSVLYNSASFSTFKCYGVSPTKLNDLCFTNVYADSFVIRGDEVRQIAPGQTGKIADYNYKLPDDFTGCVIAWNSNNLDSKVGGNYNYLYRLFRKSNLKPFERDISTEIYQAGSTPCNGVEGFNCYFPLQSYGFQPTNGVGYQPYRVVVLSFELLHAPATVCGPKKSTNLVKNKCVNFNFNGLTGTGVLTESNKKFLPFQQFGRDIADTTDAVRDPQTLEILDITPCSFGGVSVITPGTNTSNQVAVLYQDVNCTEVPVAIHADQLTPTWRVYSTGSNVFQTRAGCLIGAEHVNNSYECDIPIGAGICASYQTQTNSPRRARSVASQSIIAYTMSLGAENSVAYSNNSIAIPTNFTISVTTEILPVSMTKTSVDCTMYICGDSTECSNLLLQYGSFCTQLNRALTGIAVEQDKNTQQVFAQVKQIYKTPPIKDFGGFNFSQILPDPSKPSKRSFIEDLLFNKVTLADAGFIKQYGDCLGDIAARDLICAQKFNGLTVLPPLLTDEMIAQYTSALLAGTITSGWTFGAGAALQIPFAMQMAYRFNGIGVTQNVLYENQKLIANQFNSAIGKIQDSLSSTASALGKLQDVVNQNAQALNTLVKQLSSNFGAISSVLNDILSRLDPPEAEVQIDRLITGRLQSLQTYVTQQLIRAAEIRASANLAATKMSECVLGQSKRVDFCGKGYHLMSFPQSAPHGVVFLHVTYVFAQEKNFTTAPAICHDGKAHFPREGVFVSNGTHWFVTQRNFYEPQIITTDNTFVSGNCDVVIGIVNNTVYDPLQPELDSFKEELDKYFKNHTSPDVDLGDISGINASVVNIQKEIDRLNEVAKNLNESLIDLQELGKYEQYIKWPWYIWLGFIAGLIAIVMVTIMLCCMTSCCSCLKGCCSCGSCCKFDEDDSEPVLKGVKLHYT

SEQ ID NO: 503 - protein, 1273 aa, Artificial Sequence
  SARS-CoV-2/France/HF1805/2020__EPI_ISL_414628 spike protein (1-1273)(K986P_V987P_P1069F)
MFVFLVLLPLVSSQCVNLTTRTQLPPAYTNSFTRGVYYPDKVFRSSVLHSTQDLFLPFFSNVTWFHAIHVSGTNGTKRFDNPVLPFNDGVYFASTEKSNIIRGWIFGTTLDSKTQSLLIVNNATNVVIKVCEFQFCNDPFLGVYYHKNNKSWMESEFRVYSSANNCTFEYVSQPFLMDLEGKQGNFKNLREFVFKNIDGYFKIYSKHTPINLVRDLPQGFSALEPLVDLPIGINITRFQTLLALHRSYLTPGDSSSGWTAGAAAYYVGYLQPRTFLLKYNENGTITDAVDCALDPLSETKCTLKSFTVEKGIYQTSNFRVQPTESIVRFPNITNLCPFGEVFNATRFASVYAWNRKRISNCVADYSVLYNSASFSTFKCYGVSPTKLNDLCFTNVYADSFVIRGDEVRQIAPGQTGKIADYNYKLPDDFTGCVIAWNSNNLDSKVGGNYNYLYRLFRKSNLKPFERDISTEIYQAGSTPCNGVEGFNCYFPLQSYGFQPTNGVGYQPYRVVVLSFELLHAPATVCGPKKSTNLVKNKCVNFNFNGLTGTGVLTESNKKFLPFQQFGRDIADTTDAVRDPQTLEILDITPCSFGGVSVITPGTNTSNQVAVLYQGVNCTEVPVAIHADQLTPTWRVYSTGSNVFQTRAGCLIGAEHVNNSYECDIPIGAGICASYQTQTNSPRRARSVASQSIIAYTMSLGAENSVAYSNNSIAIPTNFTISVTTEILPVSMTKTSVDCTMYICGDSTECSNLLLQYGSFCTQLNRALTGIAVEQDKNTQEVFAQVKQIYKTPPIKDFGGFNFSQILPDPSKPSKRSFIEDLLFNKVTLADAGFIKQYGDCLGDIAARDLICAQKFNGLTVLPPLLTDEMIAQYTSALLAGTITSGWTFGAGAALQIPFAMQMAYRFNGIGVTQNVLYENQKLIANQFNSAIGKIQDSLSSTASALGKLQDVVNQNAQALNTLVKQLSSNFGAISSVLNDILSRLDPPEAEVQIDRLITGRLQSLQTYVTQQLIRAAEIRASANLAATKMSECVLGQSKRVDFCGKGYHLMSFPQSAPHGVVFLHVTYVFAQEKNFTTAPAICHDGKAHFPREGVFVSNGTHWFVTQRNFYEPQIITTDNTFVSGNCDVVIGVVNNTVYDPLQPELDSFKEELDKYFKNHTSPDVDLGDISGINASVVNIQKEIDRLNEVAKNLNESLIDLQELGKYEQYIKWPWYIWLGFIAGLIAIVMVTIMLCCMTSCCSCLKGCCSCGSCCKFDEDDSEPVLKGVKLHYT

SEQ ID NO: 504 - protein, 1273 aa, Artificial Sequence
  SARS-CoV-2/Netherlands/ZuidHolland_9/2020__EPI_ISL_414445 spike protein (1-1273)(K986P_V987P_P1069F)
MFVFLVLLPLVSSQCVNLTTRTQLPPAYTNSFTRGVYYPDKVFRSSVLHSTQDLFLPFFSNVTWFHAIHVSGTNGTKRFDNPVLPFNDGVYFASTEKSNIIRGWIFGTTLDSKTQSLLIVNNATNVVIKVCEFQFCNDPFLGVYYHKNNKSWMESEFRVYSSANNCTFEYVSQPFLMDLEGKQGNFKNLREFVFKNIDGYFKIYSKHTPINLVRDLPQGFSALEPLVDLPIGINITRFQTLLALHRSYLTPGDSSSGWTAGAAAYYVGYLQPRTFLLKYNENGTITDAVDCALDPLSETKCTLKSFTVEKGIYQTSNFRVQPTESIVRFPNITNLCPFGEVFNATRFASVYAWNRKRISNCVADYSVLYNSASFSTFKCYGVSPTKLNDLCFTNVYADSFVIRGDEVRQIAPGQTGKIADYNYKLPDDFTGCVIAWNSNNLDSKVGGNYNYLYRLFRKSNLKPFERDISTEIYQAGSTPCNGVEGFNCYFPLQSYGFQPTNGVGYQPYRVVVLSFELLHAPATVCGPKKSTNLVKNKCVNFNFNGLTGTGVLTESNKKFLPFQQFGRDIADTTDAVRDPQTLEILDITPCSFGGVSVITPGTNTSNQVAVLYQGVNCTEVPVAIHADQLTPTWRVYSTGSNVFQTRAGCLIGAEHVNNSYECDIPIGAGICASYQTQTNSPRRARSVASQSIIAYTMSLGAENSVAYSNNSIAIPTNFTISVTTEILPVSMTKTSVDCTMYICGDSTECSNLLLQYGSFCTQLNRALTGIAVEQDKNTQEVFAQVKQIYKTPPIKDFGGFNFSQILPDPSKPSKRSFIEDLLFNKVTLADAGFIKQYGDCLGDIAARDLICVQKFNGLTVLPPLLTDEMIAQYTSALLAGTITSGWTFGAGAALQIPFAMQMAYRFNGIGVTQNVLYENQKLIANQFNSAIGKIQDSLSSTASALGKLQDVVNQNAQALNTLVKQLSSNFGAISSVLNDILSRLDPPEAEVQIDRLITGRLQSLQTYVTQQLIRAAEIRASANLAATKMSECVLGQSKRVDFCGKGYHLMSFPQSAPHGVVFLHVTYVFAQEKNFTTAPAICHDGKAHFPREGVFVSNGTHWFVTQRNFYEPQIITTDNTFVSGNCDVVIGIVNNTVYDPLQPELDSFKEELDKYFKNHTSPDVDLGDISGINASVVNIQKEIDRLNEVAKNLNESLIDLQELGKYEQYIKWPWYIWLGFIAGLIAIVMVTIMLCCMTSCCSCLKGCCSCGSCCKFDEDDSEPVLKGVKLHYT

SEQ ID NO: 505 - protein, 1273 aa, Artificial Sequence
  SARS-CoV-2/Finland/FIN03032020A/2020__EPI_ISL_413602 spike protein (1-1273)(K986P_V987P_P1069F)
MFVFLVLLPLVSSQCVNLTTRTQLPPAYTNSFTRGVYYPDKVFRSSVLHSTQDLFLPFFSNVTWFHAIHVSGTNGTKRFDNPVLPFNDGVYFASTEKSNIIRGWIFGTTLDSKTQSLLIVNNATNVVIKVCEFQFCNDPFLGVYYHKNNKSWMESEFRVYSSANNCTFEYVSQPFLMDLEGKQGNFKNLREFVFKNIDGYFKIYSKHTPINLVRDLPQGFSALEPLVDLPIGINITRFQTLLALHRSYLTPGDSSSGWTAGAAAYYVGYLQPRTFLLKYNENGTITDAVDCALDPLSETKCTLKSFTVEKGIYQTSNFRVQPTESIVRFPNITNLCPFGEVFNATRFASVYAWNRKRISNCVADYSVLYNSASFSTFKCYGVSPTKLNDLCFTNVYADSFVIRGDEVRQIAPGQTGKIADYNYKLPDDFTGCVISWNSNNLDSKVGGNYNYLYRLFRKSNLKPFERDISTEIYQAGSTPCNGVEGFNCYFPLQSYGFQPTNGVGYQPYRVVVLSFELLHAPATVCGPKKSTNLVKNKCVNFNFNGLTGTGVLTESNKKFLPFQQFGRDIADTTDAVRDPQTLEILDITPCSFGGVSVITPGTNTSNQVAVLYQGVNCTEVPVAIHADQLTPTWRVYSTGSNVFQTRAGCLIGAEHVNNSYECDIPIGAGICASYQTQTNSPRRARSVASQSIIAYTMSLGAENSVAYSNNSIAIPTNFTISVTTEILPVSMTKTSVDCTMYICGDSTECSNLLLQYGSFCTQLNRALTGIAVEQDKNTQEVFAQVKQIYKTPPIKDFGGFNFSQILPDPSKPSKRSFIEDLLFNKVTLADAGFIKQYGDCLGDIAARDLICAQKFNGLTVLPPLLTDEMIAQYTSALLAGTITSGWTFGAGAALQIPFAMQMAYRFNGIGVTQNVLYENQKLIANQFNSAIGKIQDSLSSTASALGKLQDVVNQNAQALNTLVKQLSSNFGAISSVLNDILSRLDPPEAEVQIDRLITGRLQSLQTYVTQQLIRAAEIRASANLAATKMSECVLGQSKRVDFCGKGYHLMSFPQSAPHGVVFLHVTYVFAQEKNFTTAPAICHDGKAHFPREGVFVSNGTHWFVTQRNFYEPQIITTDNTFVSGNCDVVIGIVNNTVYDPLQPELDSFKEELDKYFKNHTSPDVDLGDISGINASVVNIQKEIDRLNEVAKNLNESLIDLQELGKYEQYIKWPWYIWLGFIAGLIAIVMVTIMLCCMTSCCSCLKGCCSCGSCCKFDEDDSEPVLKGVKLHYT

SEQ ID NO: 506 - protein, 1273 aa, Artificial Sequence
  SARS-CoV-2/France/GE1977/2020__EPI_ISL_414632 spike protein (1-1273)(K986P_V987P_P1069F)
MFVFLVLLPLVSSQCVNLTTRTQLPPAYTNSFTRGVYYPDKVFRSSVLHSTQDLFLPFFSNVTWFHAIHVSGTNGTKRFDNPVLPFNDGVYFASTEKSNIIRGWIFGTTLDSKTQSLLIVNNATNVVIKVCEFQFCNDPFLGVYYHKNNKSWMESEFRVYSSANNCTFEYVSQPFLMDLEGKQGNFKNLREFVFKNIDGYFKIYSKHTPINLVRDLPQGFSALEPLVDLPIGINITRFQTLLALHRSYLTPGDSSSGWTAGAAAYYVGYLQPRTFLLKYNENGTITDAVDCALDPLSETKCTLKSFTVEKGIYQTSNFRVQPTESIVRFPNITNLCPFGEVFNATRFASVYAWNRKRISNCVADYSVLYNSASFSTFKCYGVSPTKLNDLCFTNVYADSFVIRGDEVRQIAPGQTGKIADYNYKLPDDFTGCVIAWNSNNLDSKVGGNYNYLYRLFRKSNLKPFERDISTEIYQAGSTPCNGVEGFNCYFPLQSYGFQPTNGVGYQPYRVVVLSFELLHAPATVCGPKKSTNLVKNKCVNFNFNGLTGTGVLTESNKKFLPFQQFGRDIADTTDAVRDPQTLEILDITPCSFGGVSVITPGTNTSNQVAVLYQGVNCTEVPVAIHADQLTPTWRVYSTGSNVFQTRAGCLIGAEHVNNSYECDIPIGAGICASYQTQTNSPRRARSVASQSIIAYTMSLGAENSVAYSNNSIAIPTNFTISVTTEILPVSMTKTSVDCTMYICGDSTECSNLLLQYGSFCTQLNRALTGIAVEQDKNTQEVFAQVKQIYKTPPIKDFGGFNFSQILPDPSKPSKRSFIEDLLFNKVTLADAGFIKQYGDCLGDIAARDLICAQKFNGLTVLPPLLTDEMIAQYTSALLAGTITSGWTFGAGAALQIPFAMQMAYRFNGIGVTQNVLYENQKLIANQFNSAIGKIQDSLFSTASALGKLQDVVNQNAQALNTLVKQLSSNFGAISSVLNDILSRLDPPEAEVQIDRLITGRLQSLQTYVTQQLIRAAEIRASANLAATKMSECVLGQSKRVDFCGKGYHLMSFPQSAPHGVVFLHVTYVFAQEKNFTTAPAICHDGKAHFPREGVFVSNGTHWFVTQRNFYEPQIITTDNTFVSGNCDVVIGIVNNTVYDPLQPELDSFKEELDKYFKNHTSPDVDLGDISGINASVVNIQKEIDRLNEVAKNLNESLIDLQELGKYEQYIKWPWYIWLGFIAGLIAIVMVTIMLCCMTSCCSCLKGCCSCGSCCKFDEDDSEPVLKGVKLHYT

SEQ ID NO: 507 - protein, 1273 aa, Artificial Sequence
  SARS-CoV-2/Finland/FIN-313/2020__EPI_ISL_414641 spike protein (1-1273)(K986P_V987P_P1069F)
MFVFLVLLPLVSSQCVNLTTRTQLPPAYTNSFTRGVYYPDKVFRSSVLHSTQDLFLPFFSNVTWFHAIHVSGTNGTKRFDNPVLPFNDGVYFASTEKSNIIRGWIFGTTLDSKTQSLLIVNNATNVVIKVCEFQFCNDPFLGVYYHKNNKSWMESEFRVYSSANNCTFEYVSQPFLMDLEGKQGNFKNLREFVFKNIDGYFKIYSKHTPINLVRDLPQGFSALEPLVDLPIGINITRFKTLLALHRSYLTPGDSSSGWTAGAAAYYVGYLQPRTFLLKYNENGTITDAVDCALDPLSETKCTLKSFTVEKGIYQTSNFRVQPTESIVRFPNITNLCPFGEVFNATRFASVYAWNRKRISNCVADYSVLYNSASFSTFKCYGVSPTKLNDLCFTNVYADSFVIRGDEVRQIAPGQTGKIADYNYKLPDDFTGCVIAWNSNNLDSKVGGNYNYLYRLFRKSNLKPFERDISTEIYQAGSTPCNGVEGFNCYFPLQSYGFQPTNGVGYQPYRVVVLSFELLHAPATVCGPKKSTNLVKNKCVNFNFNGLTGTGVLTESNKKFLPFQQFGRDIADTTDAVRDPQTLEILDITPCSFGGVSVITPGTNTSNQVAVLYQGVNCTEVPVAIHADQLTPTWRVYSTGSNVFQTRAGCLIGAEHVNNSYECDIPIGAGICASYQTQTNSPRRARSVASQSIIAYTMSLGAENSVAYSNNSIAIPTNFTISVTTEILPVSMTKTSVDCTMYICGDSTECSNLLLQYGSFCTQLNRALTGIAVEQDKNTQEVFAQVKQIYKTPPIKDFGGFNFSQILPDPSKPSKRSFIEDLLFNKVTLADAGFIKQYGDCLGDIAARDLICAQKFNGLTVLPPLLTDEMIAQYTSALLAGTITSGWTFGAGAALQIPFAMQMAYRFNGIGVTQNVLYENQKLIANQFNSAIGKIQDSLSSTASALGKLQDVVNQNAQALNTLVKQLSSNFGAISSVLNDILSRLDPPEAEVQIDRLITGRLQSLQTYVTQQLIRAAEIRASANLAATKMSECVLGQSKRVDFCGKGYHLMSFPQSAPHGVVFLHVTYVFAQEKNFTTAPAICHDGKAHFPREGVFVSNGTHWFVTQRNFYEPQIITTDNTFVSGNCDVVIGIVNNTVYDPLQPELDSFKEELDKYFKNHTSPDVDLGDISGINASVVNIQKEIDRLNEVAKNLNESLIDLQELGKYEQYIKWPWYIWLGFIAGLIAIVMVTIMLCCMTSCCSCLKGCCSCGSCCKFDEDDSEPVLKGVKLHYT

SEQ ID NO: 508 - protein, 1273 aa, Artificial Sequence
  SARS-CoV-2/Netherlands/ZuidHolland_2/2020__EPI_ISL_414556 spike protein (1-1273)(K986P_V987P_P1069F)
MFVFLVLLPLVSSQCVNLTTRTQLPPAYTNSFTRGVYYPDKVFRSSVLHSTQDLFLPFFSNVTWFHAIHVSGTNGTKRFDNPVLPFNDGVYFASTEKSNIIRGWIFGTTLDSKTQSLLIVNNATNVVIKVCEFQFCNDPFLGVYYHKNNKSWMESEFRVYSSANNCTFEYVSQPFLMDLEGKQGNFKNLREFVFKNIDGYFKIYSKHTPINLVRDLPQGFSALEPLVDLPIGINITRFQTLLALHRSYLTPGDSSSGWTAGAAAYYVGYLQPRTFLLKYNENGTITDAVDCALDPLSETKCTLKSFTVEKGIYQTSNFRVQPTESIVRFPNITNLCPFGEVFNATRFASVYAWNRKRISNCVADYSVLYNSASFSTFKCYGVSPTKLNDLCFTNVYADSFVIRGDEVRQIAPGQTGKIADYNYKLPDDFTGCVIAWNSNNLDSKVGGNYNYLYRLFRKSNLKPFERDISTEIYQAGSTPCNGVEGFNCYFPLQSYGFQPTNGVGYQPYRVVVLSFELLHAPATVCGPKKSTNLVKNKCVNFNFNGLTGTGVLTESNKKFLPFQQFGRDIADTTDAVRDPQTLEILDITPCSFGGVSVITPGTNTSNQVAVLYQGVNCTEVPVAIHADQLTPTWRVYSTGSNVFQTRAGCLIGAEHVNNSYECDIPIGAGICASYQTQTNSPRRARSVASQSIIAYTMSLGAENSVAYSNNSIAIPTNFTISVTTEILPVSMTKTSVDCTMYICGDSTECSNLLLQYGSFCTQLNRALTGIALEQDKNTQEVFAQVKQIYKTPPIKDFGGFNFSQILPDPSKPSKRSFIEDLLFNKVTLADAGFIKQYGDCLGDIAARDLICAQKFNGLTVLPPLLTDEMIAQYTSALLAGTITSGWTFGAGAALQIPFAMQMAYRFNGIGVTQNVLYENQKLIANQFNSAIGKIQDSLSSTASALGKLQDVVNQNAQALNTLVKQLSSNFGAISSVLNDILSRLDPPEAEVQIDRLITGRLQSLQTYVTQQLIRAAEIRASANLAATKMSECVLGQSKRVDFCGKGYHLMSFPQSAPHGVVFLHVTYVFAQEKNFTTAPAICHDGKAHFPREGVFVSNGTHWFVTQRNFYEPQIITTDNTFVSGNCDVVIGIVNNTVYDPLQPELDSFKEELDKYFKNHTSPDVDLGDISGINASVVNIQKEIDRLNEVAKNLNESLIDLQELGKYEQYIKWPWYIWLGFIAGLIAIVMVTIMLCCMTSCCSCLKGCCSCGSCCKFDEDDSEPVLKGVKLHYT

SEQ ID NO: 509 - protein, 1273 aa, Artificial Sequence
  SARS-CoV-2/USA/WA-UW31/2020__EPI_ISL_414618 spike protein (1-1273)(K986P_V987P_P1069F)
MFVFLVLLPLVSSQCVNLTTRTQLPPAYTNSFTRGVYYPDKVFRSSVLHSTQDLFLPFFSNVTWFHAIHVSGTNGTKRFDNPVLPFNDGVYFASTEKSNIIRGWIFGTTLDSKTQSLLIVNNATNVVIKVCEFQFCNDPFLGVYYHKNNKSWMESEFRVYSSANNCTFEYVSQPFLMDLEGKQGNFKNLREFVFKNIDGYFKIYSKHTPINLVRDLPQGFSALEPLVDLPIGINITRFQTLLALHRSYLTPGDSSSGWTAGAAAYYVGYLQPRTFLLKYNENGTITDAVDCALDPLSETKCTLKSFTVEKGIYQTSNFRVQPTESIVRFPNITNLCPFGEVFNATRFASVYAWNRKRISNCVADYSVLYNSASFSTFKCYGVSPTKLNDLCFTNVYADSFVIRGDEVRQIAPGQTGKIADYNYKLPDDFTGCVIAWNSNNLDSKVGGNYNYLYRLFRKSNLKPFERDISTEIYQAGSTPCNGAEGFNCYFPLQSYGFQPTNGVGYQPYRVVVLSFELLHAPATVCGPKKSTNLVKNKCVNFNFNGLTGTGVLTESNKKFLPFQQFGRDIADTTDAVRDPQTLEILDITPCSFGGVSVITPGTNTSNQVAVLYQDVNCTEVPVAIHADQLTPTWRVYSTGSNVFQTRAGCLIGAEHVNNSYECDIPIGAGICASYQTQTNSPRRARSVASQSIIAYTMSLGAENSVAYSNNSIAIPTNFTISVTTEILPVSMTKTSVDCTMYICGDSTECSNLLLQYGSFCTQLNRALTGIAVEQDKNTQEVFAQVKQIYKTPPIKDFGGFNFSQILPDPSKPSKRSFIEDLLFNKVTLADAGFIKQYGDCLGDIAARDLICAQKFNGLTVLPPLLTDEMIAQYTSALLAGTITSGWTFGAGAALQIPFAMQMAYRFNGIGVTQNVLYENQKLIANQFNSAIGKIQDSLSSTASALGKLQDVVNQNAQALNTLVKQLSSNFGAISSVLNDILSRLDPPEAEVQIDRLITGRLQSLQTYVTQQLIRAAEIRASANLAATKMSECVLGQSKRVDFCGKGYHLMSFPQSAPHGVVFLHVTYVFAQEKNFTTAPAICHDGKAHFPREGVFVSNGTHWFVTQRNFYEPQIITTDNTFVSGNCDVVIGIVNNTVYDPLQPELDSFKEELDKYFKNHTSPDVDLGDISGINASVVNIQKEIDRLNEVAKNLNESLIDLQELGKYEQYIKWPWYIWLGFIAGLIAIVMVTIMLCCMTSCCSCLKGCCSCGSCCKFDEDDSEPVLKGVKLHYT

SEQ ID NO: 510 - protein, 1273 aa, Artificial Sequence
  SARS-CoV-2/South Korea/SNU01/2020__EPI_ISL_411929 spike protein (1-1273)(K986P_V987P_P1069F)
MFVFLVLLPLVSSQCVNLTTRTQLPPAYTNSFTRGVYYPDKVFRSSVLHSTQDLFLPFFSNVTWFHAIHVSGTNGTKRFDNPVLPFNDGVYFASTEKSNIIRGWIFGTTLDSKTQSLLIVNNATNVVIKVCEFQFCNDPFLGVYYHKNNKSWMESEFRVYSSANNCTFEYVSQPFLMDLEGKQGNFKNLREFVFKNIDGYFKIYSKHTPINLVRDLPQGFWALEPLVDLPIGINITRFQTLLALHRSYLTPGDSSSGWTAGAAAYYVGYLQPRTFLLKYNENGTITDAVDCALDPLSETKCTLKSFTVEKGIYQTSNFRVQPTESIVRFPNITNLCPFGEVFNATRFASVYAWNRKRISNCVADYSVLYNSASFSTFKCYGVSPTKLNDLCFTNVYADSFVIRGDEVRQIAPGQTGKIADYNYKLPDDFTGCVIAWNSNNLDSKVGGNYNYLYRLFRKSNLKPFERDISTEIYQAGSTPCNGVEGFNCYFPLQSYGFQPTNGVGYQPYRVVVLSFELLHAPATVCGPKKSTNLVKNKCVNFNFNGLTGTGVLTESNKKFLPFQQFGRDIADTTDAVRDPQTLEILDITPCSFGGVSVITPGTNTSNQVAVLYQDVNCTEVPVAIHADQLTPTWRVYSTGSNVFQTRAGCLIGAEHVNNSYECDIPIGAGICASYQTQTNSPRRARSVASQSIIAYTMSLGAENSVAYSNNSIAIPTNFTISVTTEILPVSMTKTSVDCTMYICGDSTECSNLLLQYGSFCTQLNRALTGIAVEQDKNTQEVFAQVKQIYKTPPIKDFGGFNFSQILPDPSKPSKRSFIEDLLFNKVTLADAGFIKQYGDCLGDIAARDLICAQKFNGLTVLPPLLTDEMIAQYTSALLAGTITSGWTFGAGAALQIPFAMQMAYRFNGIGVTQNVLYENQKLIANQFNSAIGKIQDSLSSTASALGKLQDVVNQNAQALNTLVKQLSSNFGAISSVLNDILSRLDPPEAEVQIDRLITGRLQSLQTYVTQQLIRAAEIRASANLAATKMSECVLGQSKRVDFCGKGYHLMSFPQSAPHGVVFLHVTYVFAQEKNFTTAPAICHDGKAHFPREGVFVSNGTHWFVTQRNFYEPQIITTDNTFVSGNCDVVIGIVNNTVYDPLQPELDSFKEELDKYFKNHTSPDVDLGDISGINASVVNIQKEIDRLNEVAKNLNESLIDLQELGKYEQYIKWPWYIWLGFIAGLIAIVMVTIMLCCMTSCCSCLKGCCSCGSCCKFDEDDSEPVLKGVKLHYT

SEQ ID NO: 511 - protein, 1273 aa, Artificial Sequence
  SARS-CoV-2/China/WF0004/2020__EPI_ISL_413694 spike protein (1-1273)(K986P_V987P_P1069F)
MFVFLVLLPLVSSQCVNLTTRTQLPPAYTNSFTRGVYYPDKVFRSSVLHSTQDLFLPFFSNVTWFHAIHVSGTNGTKRFDNPVLPFNDGVYFASTEKSNIIRGWIFGTTLDSKTQSLLIVNNATNVVIKVCEFQFCNDPFLGVYYHKNNKSWTESEFRVYSSANNCTFEYVSQPFLMDLEGKQGNFKNLREFVFKNIDGYFKIYSKHTPINLVRDLPQGFSALEPLVDLPIGINITRFQTLLALHRSYLTPGDSSSGWTAGAAAYYVGYLQPRTFLLKYNENGTITDAVDCALDPLSETKCTLKSFTVEKGIYQTSNFRVQPTESIVRFPNITNLCPFGEVFNATRFASVYAWNRKRISNCVADYSVLYNSASFSTFKCYGVSPTKLNDLCFTNVYADSFVIRGDEVRQIAPGQTGKIADYNYKLPDDFTGCVIAWNSNNLDSKVGGNYNYLYRLFRKSNLKPFERDISTEIYQAGSTPCNGVEGFNCYFPLQSYGFQPTNGVGYQPYRVVVLSFELLHAPATVCGPKKSTNLVKNKCVNFNFNGLTGTGVLTESNKKFLPFQQFGRDIADTTDAVRDPQTLEILDITPCSFGGVSVITPGTNTSNQVAVLYQDVNCTEVPVAIHADQLTPTWRVYSTGSNVFQTRAGCLIGAEHVNNSYECDIPIGAGICASYQTQTNSPRRARSVASQSIIAYTMSLGAENSVAYSNNSIAIPTNFTISVTTEILPVSMTKTSVDCTMYICGDSTECSNLLLQYGSFCTQLNRALTGIAVEQDKNTQEVFAQVKQIYKTPPIKDFGGFNFSQILPDPSKPSKRSFIEDLLFNKVTLADAGFIKQYGDCLGDIAARDLICAQKFNGLTVLPPLLTDEMIAQYTSALLAGTITSGWTFGAGAALQIPFAMQMAYRFNGIGVTQNVLYENQKLIANQFNSAIGKIQDSLSSTASALGKLQDVVNQNAQALNTLVKQLSSNFGAISSVLNDILSRLDPPEAEVQIDRLITGRLQSLQTYVTQQLIRAAEIRASANLAATKMSECVLGQSKRFDFCGKGYHLMSFPQSAPHGVVFLHVTYVFAQEKNFTTAPAICHDGKAHFPREGVFVSNGTHWFVTQRNFYEPQIITTDNTFVSGNCDVVIGIVNNTVYDPLQPELDSFKEELDKYFKNHTSPDVDLGDISGINASVVNIQKEIDRLNEVAKNLNESLIDLQELGKYEQYIKWPWYIWLGFIAGLIAIVMVTIMLCCMTSCCSCLKGCCSCGSCCKFDEDDSEPVLKGVKLHYT

SEQ ID NO: 512 - protein, 1273 aa, Artificial Sequence
  SARS-CoV-2/China/WF0028/2020__EPI_ISL_413791 spike protein (1-1273)(K986P_V987P_P1069F)
MFVFLVLLPLVSSQCVNLTTRTQLPPAYTNSFTRGVYYPDKVFRSSVLHSTQDLFLPFFSNVTWFHAIHVSGTNGTKRFDNPVLPFNDGVYFASTEKSNIIRGWIFGTTLDSKTQSLLIVNNATNVVIKVCEFQFCNDPFLGVYYHKNNKSWMESEFRVYSSANNCTFEYVSQPFLMDLEGKQGNFKNLREFVFKNIDGYFKIYSKHTPINLVRDLPQGFSALEPLVDLPIGINITRFQTLLALHRSYLTPGDSSSGWTAGAAAYYVGYLQPRTFLLKYNENGTITDAVDCALDPLSETKCTLKSFTVEKGIYQTSNFRVQPTESIVRFPNITNLCPFGEVFNATRFASVYAWNRKRISNCVADYSVLYNSASFSTFKCYGVSPTKLNDLCFTNVYADSFVIRGDEVRQIAPGQTGKIADYNYKLPDDFTGCVIAWNSNNLDSKVGGNYNYLYRLFRKSNLKPFERDISTEIYQAGSTPCNGVEGFNCYFPLQSYGFQPTNGVGYQPYRVVVLSFELLHAPATVCGPKKSTNLVKNKCVNFNFNGLTGTGVLTESNKKFLPFQQFGRDIADTTDAVRDPQTLEILDITPCSFGGVSVITPGTNTSNQVAVLYQDVNCTEVPVAIHADQLTPTWRVYSTGSNVFQTRAGCLIGAEHVNNSYECDIPIGAGICASYQTQTNSPRRARSVASQSIIAYTMSLGAENSVAYSNNSIAIPTNFTISVTTEILPVSMTKTSVDCTMYICGDSTECSNLLLQYGSFCTQLNRALTGIAVEQDKNTQEVFAQVKQIYKTPPIKDFGGFNFSQILPDPSKPSKRSFIEDLLFNKVTLADAGFIKQYGDCLGDIAARDLICAQKFNGLTVLPPLLTDEMIAQYTSALLAGTITSGWTFGAGAALQIPFAMQMAYRFNGIGVTQNVLYENQKLIANQFNSAIGKIQDSLSSTASALGKLQDVVNQNAQALNTLVKQLSSNFGAISSVLNDILSRLDPPEAEVQIDRLITGRLQSLQTYVTQQLIRAAEIRASANLAATKMSECVLGQSKRVDFCGKGYHLMSFPQSAPHGVVFLHVTYVFAQEKNFTTAPAICHDGKAHFPREGVFVSNGTHWFVTQRNFYEPQIITTDNTFVSGNCDVVIGIVNNTVYDPLQPELESFKEELDKYFKNHTSPDVDLGDISGINASVVNIQKEIDRLNEVAKNLNESLIDLQELGKYEQYIKWPWYIWLGFIAGLIAIVMVTIMLCCMTSCCSCLKGCCSCGSCCKFDEDDSEPVLKGVKLHYT

SEQ ID NO: 513 - protein, 1273 aa, Artificial Sequence
  SARS-CoV-2/2019-nCoV/USA-CruiseA-18/2020__MT159716.1 spike protein (1-1273)(K986P_V987P_P1069F)
MFVFLVLLPLVSSQCVNLTTRTQLPPAYTNSFTRGVYYPDKVFRSSVLHSTQDLFLPFFSNVTWFHAIHVSGTNGTKRFDNPVLPFNDGVYFASTEKSNIIRGWIFGTTLDSKTQSLLIVNNATNVVIKVCEFQFCNDPFLGVYYHKNNKSWMESELRVYSSANNCTFEYVSQPFLMDLEGKQGNFKNLREFVFKNIDGYFKIYSKHTPINLVRDLPQGFSALEPLVDLPIGINITRFQTLLALHRSYLTPGDSSSGWTAGAAAYYVGYLQPRTFLLKYNENGTITDAVDCALDPLSETKCTLKSFTVEKGIYQTSNFRVQPTESIVRFPNITNLCPFGEVFNATRFASVYAWNRKRISNCVADYSVLYNSASFSTFKCYGVSPTKLNDLCFTNVYADSFVIRGDEVRQIAPGQTGKIADYNYKLPDDFTGCVIAWNSNNLDSKVGGNYNYLYRLFRKSNLKPFERDISTEIYQAGSTPCNGVEGFNCYFPLQSYGFQPTNGVGYQPYRVVVLSFELLHAPATVCGPKKSTNLVKNKCVNFNFNGLTGTGVLTESNKKFLPFQQFGRDIADTTDAVRDPQTLEILDITPCSFGGVSVITPGTNTSNQVAVLYQDVNCTEVPVAIHADQLTPTWRVYSTGSNVFQTRAGCLIGAEHVNNSYECDIPIGAGICASYQTQTNSPRRARSVASQSIIAYTMSLGAENSVAYSNNSIAIPTNFTISVTTEILPVSMTKTSVDCTMYICGDSTECSNLLLQYGSFCTQLNRALTGIAVEQDKNTQEVFAQVKQIYKTPPIKDFGGFNFSQILPDPSKPSKRSFIEDLLFNKVTLADAGFIKQYGDCLGDIAARDLICAQKFNGLTVLPPLLTDEMIAQYTSALLAGTITSGWTFGAGAALQIPFAMQMAYRFNGIGVTQNVLYENQKLIANQFNSAIGKIQDSLSSTASALGKLQDVVNQNAQALNTLVKQLSSNFGAISSVLNDILSRLDPPEAEVQIDRLITGRLQSLQTYVTQQLIRAAEIRASANLAATKMSECVLGQSKRVDFCGKGYHLMSFPQSAPHGVVFLHVTYVFAQEKNFTTAPAICHDGKAHFPREGVFVSNGTHWFVTQRNFYEPQIITTDNTFVSGNCDVVIGIVNNTVYDPLQPELDSFKEELDKYFKNHTSPDVDLGDISGINASVVNIQKEIDRLNEVAKNLNESLIDLQELGKYEQYIKWPWYIWLGFIAGLIAIVMVTIMLCCMTSCCSCLKGCCSCGSCCKFDEDDSEPVLKGVKLHYT

SEQ ID NO: 514 - protein, 1273 aa, Artificial Sequence
  SARS-CoV-2/SARS-CoV-2/Yunnan-01/human/2020/CHN__MT049951.1 spike protein (1-1273)(K986P_V987P_P1069F)
MFVFLVLLPLVSSQCVNLTTRTQLPPANTNSFTRGVYYPDKVFRSSVLHSTQDLFLPFFSNVTWFHAIHVSGTNGTKRFDNPVLPFNDGVYFASTEKSNIIRGWIFGTTLDSKTQSLLIVNNATNVVIKVCEFQFCNDPFLGVYYHKNNKSWMESEFRVYSSANNCTFEYVSQPFLMDLEGKQGNFKNLREFVFKNIDGYFKIYSKHTPINLVRDLPQGFSALEPLVDLPIGINITRFQTLLALHRSYLTPGDSSSGWTAGAAAYYVGYLQPRTFLLKYNENGTITDAVDCALDPLSETKCTLKSFTVEKGIYQTSNFRVQPTESIVRFPNITNLCPFGEVFNATRFASVYAWNRKRISNCVADYSVLYNSASFSTFKCYGVSPTKLNDLCFTNVYADSFVIRGDEVRQIAPGQTGKIADYNYKLPDDFTGCVIAWNSNNLDSKVGGNYNYLYRLFRKSNLKPFERDISTEIYQAGSTPCNGVEGFNCYFPLQSYGFQPTNGVGYQPYRVVVLSFELLHAPATVCGPKKSTNLVKNKCVNFNFNGLTGTGVLTESNKKFLPFQQFGRDIADTTDAVRDPQTLEILDITPCSFGGVSVITPGTNTSNQVAVLYQDVNCTEVPVAIHADQLTPTWRVYSTGSNVFQTRAGCLIGAEHVNNSYECDIPIGAGICASYQTQTNSPRRARSVASQSIIAYTMSLGAENSVAYSNNSIAIPTNFTISVTTEILPVSMTKTSVDCTMYICGDSTECSNLLLQYGSFCTQLNRALTGIAVEQDKNTQEVFAQVKQIYKTPPIKDFGGFNFSQILPDPSKPSKRSFIEDLLFNKVTLADAGFIKQYGDCLGDIAARDLICAQKFNGLTVLPPLLTDEMIAQYTSALLAGTITSGWTFGAGAALQIPFAMQMAYRFNGIGVTQNVLYENQKLIANQFNSAIGKIQDSLSSTASALGKLQDVVNQNAQALNTLVKQLSSNFGAISSVLNDILSRLDPPEAEVQIDRLITGRLQSLQTYVTQQLIRAAEIRASANLAATKMSECVLGQSKRVDFCGKGYHLMSFPQSAPHGVVFLHVTYVFAQEKNFTTAPAICHDGKAHFPREGVFVSNGTHWFVTQRNFYEPQIITTDNTFVSGNCDVVIGIVNNTVYDPLQPELDSFKEELDKYFKNHTSPDVDLGDISGINASVVNIQKEIDRLNEVAKNLNESLIDLQELGKYEQYIKWPWYIWLGFIAGLIAIVMVTIMLCCMTSCCSCLKGCCSCGSCCKFDEDDSEPVLKGVKLHYT

SEQ ID NO: 515 - protein, 1273 aa, Artificial Sequence
  SARS-CoV-2/USA/WA-UW292/2020__EPI_ISL_418077 spike protein (1-1273)(K986P_V987P_P1069F)
MFVFLVLLPLVSSQCVNLTTRTQLPPAYTNSFTRGVYYPDKVFRSSVLHSTQDLFLPFFSNVTWFHAIHVSGTNGTKRFDNPVLPFNDGVYFASTEKSNIIRGWIFGTTLDSKTQSLLIVNNATNVVIKVCEFQFCNDPFLGVYYHKNNKSWMESEFRVYSSANNCTFEYVSQPFLMDLEGKQGNFKNLREFVFKNIDGYFKIYSKHTPINLVRDLPQGFSALEPLVDLPIGINITRFQTLLALHRSYLTPGDSSSGWTAGAAAYYVGYLQPRTFLLKYNENGTITDAVDCALDPLSETKCTLKSFTVEKGIYQTSNFRVQPTESIVRFPNITNLCPFGEVFNATRFASVYAWNRKRISNCVADYSVLYNSASFSTFKCYGVSPTKLNDLCFTNVYADSFVIRGDEVRQIAPGQTGKIADYNYKLPDDFTGCVIAWNSNNLDSKVGGNYNYLYRLFRKSNLKPFERDISTEIYQASSTPCNGVEGFNCYFPLQSYGFQPTNGVGYQPYRVVVLSFELLHAPATVCGPKKSTNLVKNKCVNFNFNGLTGTGVLTESNKKFLPFQQFGRDIADTTDAVRDPQTLEILDITPCSFGGVSVITPGTNTSNQVAVLYQDVNCTEVPVAIHADQLTPTWRVYSTGSNVFQTRAGCLIGAEHVNNSYECDIPIGAGICASYQTQTNSPRRARSVASQSIIAYTMSLGAENSVAYSNNSIAIPTNFTISVTTEILPVSMTKTSVDCTMYICGDSTECSNLLLQYGSFCTQLNRALTGIAVEQDKNTQEVFAQVKQIYKTPPIKDFGGFNFSQILPDPSKPSKRSFIEDLLFNKVTLADAGFIKQYGDCLGDIAARDLICAQKFNGLTVLPPLLTDEMIAQYTSALLAGTITSGWTFGAGAALQIPFAMQMAYRFNGIGVTQNVLYENQKLIANQFNSAIGKIQDSLSSTASALGKLQDVVNQNAQALNTLVKQLSSNFGAISSVLNDILSRLDPPEAEVQIDRLITGRLQSLQTYVTQQLIRAAEIRASANLAATKMSECVLGQSKRVDFCGKGYHLMSFPQSAPHGVVFLHVTYVFAQEKNFTTAPAICHDGKAHFPREGVFVSNGTHWFVTQRNFYEPQIITTDNTFVSGNCDVVIGIVNNTVYDPLQPELDSFKEELDKYFKNHTSPDVDLGDISGINASVVNIQKEIDRLNEVAKNLNESLIDLQELGKYEQYIKWPWYIWLGFIAGLIAIVMVTIMLCCMTSCCSCLKGCCSCGSCCKFDEDDSEPVLKGVKLHYT

SEQ ID NO: 516 - protein, 1273 aa, Artificial Sequence
  SARS-CoV-2/Iceland/192/2020__EPI_ISL_417819 spike protein (1-1273)(K986P_V987P_P1069F)
MFVFFVLLPLVSSQCVNLTTRTQLPPAYTNSFTRGVYYPDKVFRSSVLHSTQDLFLPFFSNVTWFHAIHVSGTNGTKRFDNPVLPFNDGVYFASTEKSNIIRGWIFGTTLDSKTQSLLIVNNATNVVIKVCEFQFCNDPFLGVYYHKNNKSWMESEFRVYSSANNCTFEYVSQPFLMDLEGKQGNFKNLREFVFKNIDGYFKIYSKHTPINLVRDLPQGFSALEPLVDLPIGINITRFQTLLALHRSYLTPGDSSSGWTAGAAAYYVGYLQPRTFLLKYNENGTITDAVDCALDPLSETKCTLKSFTVEKGIYQTSNFRVQPTESIVRFPNITNLCPFGEVFNATRFASVYAWNRKRISNCVADYSVLYNSASFSTFKCYGVSPTKLNDLCFTNVYADSFVIRGDEVRQIAPGQTGKIADYNYKLPDDFTGCVIAWNSNNLDSKVGGNYNYLYRLFRKSNLKPFERDISTEIYQAGSTPCNGVEGFNCYFPLQSYGFQPTNGVGYQPYRVVVLSFELLHAPATVCGPKKSTNLVKNKCVNFNFNGLTGTGVLTESNKKFLPFQQFGRDIADTTDAVRDPQTLEILDITPCSFGGVSVITPGTNTSNQVAVLYQGVNCTEVPVAIHADQLTPTWRVYSTGSNVFQTRAGCLIGAEHVNNSYECDIPIGAGICASYQTQTNSPRRARSVASQSIIAYTMSLGAENSVAYSNNSIAIPTNFTISVTTEILPVSMTKTSVDCTMYICGDSTECSNLLLQYGSFCTQLNRALTGIAVEQDKNTQEVFAQVKQIYKTPPIKDFGGFNFSQILPDPSKPSKRSFIEDLLFNKVTLADAGFIKQYGDCLGDIAARDLICAQKFNGLTVLPPLLTDEMIAQYTSALLAGTITSGWTFGAGAALQIPFAMQMAYRFNGIGVTQNVLYENQKLIANQFNSAIGKIQDSLSSTASALGKLQDVVNQNAQALNTLVKQLSSNFGAISSVLNDILSRLDPPEAEVQIDRLITGRLQSLQTYVTQQLIRAAEIRASANLAATKMSECVLGQSKRVDFCGKGYHLMSFPQSAPHGVVFLHVTYVFAQEKNFTTAPAICHDGKAHFPREGVFVSNGTHWFVTQRNFYEPQIITTDNTFVSGNCDVVIGIVNNTVYDPLQPELDSFKEELDKYFKNHTSPDVDLGDISGINASVVNIQKEIDRLNEVAKNLNESLIDLQELGKYEQYIKWPWYIWLGFIAGLIAIVMVTIMLCCMTSCCSCLKGCCSCGSCCKFDEDDSEPVLKGVKLHYT

SEQ ID NO: 517 - protein, 1273 aa, Artificial Sequence
  SARS-CoV-2/Belgium/ULG-6939/2020__EPI_ISL_417020 spike protein (1-1273)(K986P_V987P_P1069F)
MFVFLVLLPLVSSQCVNLTTRTQLPPAYTNSFTRGVYYPDKVFRSSVLHSTQDLFLPFFSNVTWFHAIHVSGTNGTKRFDNPVLPFNDGVYFASTEKSNIIRGWIFGTTLDSKTQSLLIVNNATNVVIKVCEFQFCNDPFLGVYYHKNNKSWMESEFRVYSSANNCTFEYVSQPFLMDLEGKQGNFKNLREFVFKNIDGYFKIYSKHTPINLVRDLPQGFSALEPLVDLPIGINITRFQTLLALHRSYLTPGDSSSGWTAGAAAYYVGYLQPRTFLLKYNENGTITDAVDCALDPLSETKCTLKSFTVEKGIYQTSNFRVQPTESIVRFPNITNLCPFGEVFNATRFASVYAWNRKRISNCVADYSVLYNSASFSTFKCYGVSPTKLNDLCFTNVYADSFVIRGDEVRQIAPGQTGKIADYNYKLPDDFTGCVIAWNSNNLDSKVGGNYNYLYRLFRKSNLKPFERDISTEIYQAGSTPCNGVEGFNCYFPLQSYGFQPTNGVGYQPYRVVVLSFELLHAPATVCGPKKSTNLVKNKCVNFNFNGLTGTGVLTESNKKFLPFQQFGRDIADTTDAVRDPQTLEILDITPCSFGGVSVITPGTNTSNQVAVLYQGVNCTEVPVAIHADQLTPTWRVYSTGSNVFQTRAGCLIGAEHVNNSYECDIPIGAGICASYQTQTNSPRRARSVASQSIIAYTMSLGAENSVVYSNNSIAIPTNFTISVTTEILPVSMTKTSVDCTMYICGDSTECSNLLLQYGSFCTQLNRALTGIAVEQDKNTQEVFAQVKQIYKTPPIKDFGGFNFSQILPDPSKPSKRSFIEDLLFNKVTLADAGFIKQYGDCLGDIAARDLICAQKFNGLTVLPPLLTDEMIAQYTSALLAGTITSGWTFGAGAALQIPFAMQMAYRFNGIGVTQNVLYENQKLIANQFNSAIGKIQDSLSSTASALGKLQDVVNQNAQALNTLVKQLSSNFGAISSVLNDILSRLDPPEAEVQIDRLITGRLQSLQTYVTQQLIRAAEIRASANLAATKMSECVLGQSKRVDFCGKGYHLMSFPQSAPHGVVFLHVTYVFAQEKNFTTAPAICHDGKAHFPREGVFVSNGTHWFVTQRNFYEPQIITTDNTFVSGNCDVVIGIVNNTVYDPLQPELDSFKEELDKYFKNHTSPDVDLGDISGINASVVNIQKEIDRLNEVAKNLNESLIDLQELGKYEQYIKWPWYIWLGFIAGLIAIVMVTIMLCCMTSCCSCLKGCCSCGSCCKFDEDDSEPVLKGVKLHYT

SEQ ID NO: 518 - protein, 1273 aa, Artificial Sequence
  SARS-CoV-2/France/HF2496/2020__EPI_ISL_418231 spike protein (1-1273)(K986P_V987P_P1069F)
MFVFLVLLPLVSSQCVNLTTRTQLPPAYTNSFTRGVYYPDKVFRSSVLHSTQDLFLPFFSNVTWFHAIHVSGTNGTKRFDNPVLPFNDGVYFASTEKSNIIRGWIFGTTLDSKTQSLLIVNNATNVVIKVCEFQFCNDPFLGVYYHKNNKSWMESEFRVYSSANNCTFEYVSQPFLMDLEGKQGNFKNLREFVFKNIDGYFKIYSKHTPINLVRDLPQGFSALEPLVDLPIGINITRFQTLLALHRSYLTPGDSSSGWTAGAAAYYVGYLQPRTFLLKYNENGTITDAVDCALDPLSETKCTLKSFTVEKGIYQTSNFRVQPTESIVRFPNITNLCPFGEVFNATRFASVYAWNRKRISNCVADYSVLYNSASFSTFKCYGVSPTKLNDLCFTNVYADSFVIRGDEVRQIAPGQTGKIADYNYKLPDDFTGCVIAWNSNNLDSKVGGNYNYLYRLFRKSNLKPFERDISTEIYQAGSTPCNGVEGFNCYFPLQSYGFQPTNGVGYQPYRVVVLSFELLHAPATVCGPKKSTNLVKNKCVNFNFNGLTGTGVLTESNKKFLPFQQFGRDIADTTDAVRDPQTLEILDITPCSFGGVSVITPGTNTSNQVAVLYQGVNCTEVPVAIHADQLTPTWRVYSTGSNVFQTRAGCLIGAEHVNNSYECDIPIGAGICASYQTQTNSPRRARSVASQSIIAYTMSLGAENSVAYSNNSIAIPTNFTISVTTEILPVSMTKTSVDCTMYICGDSTECSNLLLQYGSFCTQLNRALTGIAVEQDKNTQEVFAQVKQIYKTPPIKDFGGFNFSQILPDPSKPSKRSFIEDLLFNKVTLADAGFIKQYGDCLGDIVARDLICAQKFNGLTVLPPLLTDEMIAQYTSALLAGTITSGWTFGAGAALQIPFAMQMAYRFNGIGVTQNVLYENQKLIANQFNSAIGKIQDSLSSTASALGKLQDVVNQNAQALNTLVKQLSSNFGAISSVLNDILSRLDPPEAEVQIDRLITGRLQSLQTYVTQQLIRAAEIRASANLAATKMSECVLGQSKRVDFCGKGYHLMSFPQSAPHGVVFLHVTYVFAQEKNFTTAPAICHDGKAHFPREGVFVSNGTHWFVTQRNFYEPQIITTDNTFVSGNCDVVIGIVNNTVYDPLQPELDSFKEELDKYFKNHTSPDVDLGDISGINASVVNIQKEIDRLNEVAKNLNESLIDLQELGKYEQYIKWPWYIWLGFIAGLIAIVMVTIMLCCMTSCCSCLKGCCSCGSCCKFDEDDSEPVLKGVKLHYT

SEQ ID NO: 519 - protein, 1273 aa, Artificial Sequence
  SARS-CoV-2/USA/WA-UW291/2020__EPI_ISL_418076 spike protein (1-1273)(K986P_V987P_P1069F)
MFVFLVLLPLVSSQCVNLTTRTQLPPAYTNSFTRGVYYPDKVFRSSVLHSTQDLFLPFFSNVTWFHAIHVSGTNGTKRFDNPVLPFNDGVYFASTEKSNIIRGWIFGTTLDSKTQSLLIVNNATNVVIKVCEFQFCNDPFLGVYYHKNNKSWMESEFRVYSSANNCTFEYVSQPFLMDLEGKQGNFKNLREFVFKNIDGYFKIYSKHTPINLVRDLPQGFSALEPLVDLPIGINITRFQTLLALHRSYLTPGDSSSGWTAGAAAYYVGYLQPRTFLLKYNENGTITDAVDCALDPLSETKCTLKSFTVEKGIYQTSNFRVQPTESIVRFPNITNLCPFGEVFNATRFASVYAWNRKRISNCVADYSVLYNSASFSTFKCYGVSPTKLNDLCFTNVYADSFVIRGDEVRQIAPGQTGKIADYNYKLPDDFTGCVIAWNSNNLDSKVGGNYNYLYRLFRKSNLKPFERDISTEIYQAGSTPCNGVEGFNCYFPLQSYGFQPTNGVGYQPYRVVVLSFELLHAPATVCGPKKSTNLVKNKCVNFNFNGLTGTGVLTESNKKFLPFQQFGRDIADTTDAVRDPQTLEILDITPCSFGGVSVITPGTNTSNQVAVLYQGVNCTEVPVAIHADQLTPTWRVYSTGSNVFQTRAGCLIGAEHVNNSYECDIPIGAGICASYQTQTNSPRRARSVASQSIIAYTMSLGAENSVAYSNNSIAIPTNFTISVTTEILPVSMTKTSVDCTMYICGDSTECSNLLLQYGSFCTQLNRALTGIAVEQDKNTQEVFAQVKQIYKTPPIKDFGGFNFSQILPDPSKPSKRSFIEDLLFNKVTLADAGFIKQYGDCLGDIAARDLICAQKFNGLTVLPPLLTDEMIAQYTSALLAGTITSGWTFGAGAALQIPFAMQMAYRFNGIGVTQNVLYENQKLIANQFNSAIGKIQYSLSSTASALGKLQDVVNQNAQALNTLVKQLSSNFGAISSVLNDILSRLDPPEAEVQIDRLITGRLQSLQTYVTQQLIRAAEIRASANLAATKMSECVLGQSKRVDFCGKGYHLMSFPQSAPHGVVFLHVTYVFAQEKNFTTAPAICHDGKAHFPREGVFVSNGTHWFVTQRNFYEPQIITTDNTFVSGNCDVVIGIVNNTVYDPLQPELDSFKEELDKYFKNHTSPDVDLGDISGINASVVNIQKEIDRLNEVAKNLNESLIDLQELGKYEQYIKWPWYIWLGFIAGLIAIVMVTIMLCCMTSCCSCLKGCCSCGSCCKFDEDDSEPVLKGVKLHYT

SEQ ID NO: 520 - protein, 1273 aa, Artificial Sequence
  SARS-CoV-2/Portugal/PT0034/2020__EPI_ISL_418019 spike protein (1-1273)(K986P_V987P_P1069F)
MFVFLVLLPLVSSQCVNLTTRTQLPPAYTNSFTRGVYYPDKVFRSSVLHSTQDLFLPFFSNVTWFHAIHVSGTNGTKRFDNPVLPFNDGVYFASTEKSNIIRGWIFGTTLDSKTQSLLIVNNATNVVIKVCEFQFCNDPFLGVYYHKNNKSWMESEFRVYSSANNCTFEYVSQPFLMDLEGKQGNFKNLREFVFKNIDGYFKIYSKHTPINLVRDLPQGFSALEPLVDLPIGINITRFQTLLALHRSYLTPGDSSSGWTAGAAAYYVGYLQPRTFLLKYNENGTITDAVDCALDPLSETKCTLKSFTVEKGIYQTSNFRVQPTESIVRFPNITNLCPFGEVFNATRFASVYAWNRKRISNCVADYSVLYNSASFSTFKCYGVSPTKLNDLCFTNVYADSFVIRGDEVRQIAPGQTGKIADYNYKLPDDFTGCVIAWNSNNLDSKVGGNYNYLYRLFRKSNLKPFERDISTEIYQAGSTPCNGVEGFNCYFPLQSYGFQPTNGVGYQPYRVVVLSFELLHAPATVCGPKKSTNLVKNKCVNFNFNGLTGTGVLTESNKKFLPFQQFGRDIADTTDAVRDPQTLEILDITPCSFGGVSVITPGTNTSNQVAVLYQGVNCTEVPVAIHADQLTPTWRVYSTGSNVFQTRAGCLIGAEHVNNSYECDIPIGAGICASYQTQTNSPRRARSVASQSIIAYTMSLGAENSVAYSNNSIAIPTNFTISVTTEILPVSMTKTSVDCTMYICGDSTECSNLLLQYGSFCTQLNRALTGIAVEQDKNTQEVFAQVKQIYKTPPIKDFGGFNFSQILPDPSKPSKRSFIEDLLFNKVTLADAGFIKQYGDCLGDIAARDLICAQKFNGLTVLPPLLTDEMIAQYTSALLAGTITSGWTFGAGAALQIPFAMQMAYRFNGIGVTQNVLYENQKLIANQFNSAIGKIQDSLSSTASALGKLQDVVNQNAQALNTLVKQLSSNFGAISSVLNDILSRLDPPEAEVQIDRLITGRLQSLQTYVTQQLIRAAEIRASANLAATKMSECVLGQSKRVDFCGKGYHLMSFPQSAPHGVVFLHVTYVFAQEKNFTTAPAICHDGKAHFPREGVFVSNGTHWFVTQRNFYEPQIITTDNTFVSGNCDVVIGIVNNTVYDPLQPELDSFKEELDKYFKNHTSPDVDLGDISGINASVVNIQKEIDRLNEVAKNLNESLIDLQELGKYEQYIKWPWYIWLGFIAGLIAIVMVTIMLCCITSCCSCLKGCCSCGSCCKFDEDDSEPVLKGVKLHYT

SEQ ID NO: 521 - protein, 1273 aa, Artificial Sequence
  SARS-CoV-2/Iceland/202/2020__EPI_ISL_417750 spike protein (1-1273)(K986P_V987P_P1069F)
MFVFLVLLPLVSSQCVNLTTRTQLPPAYTNSFTRGVYYPDKVFRSSVLHSTQDLFLPFFSNVTWFHAIHVSGTNGTKRFDNPVLPFNDGVYFASTEKSNIIRGWIFGTTLDSKTQSLLIVNNATNVVIKVCEFQFCNDPFLGVYYHKNNKSWMESEFRVYSSANNCTFEYVSQPFLMDLEGKQGNFKNLREFVFKNIDGYFKIYSKHTPINLVRDLPQGFSALEPLVDLPIGINITRFQTLLALHRSYLTPGDSSSGWTAGAAAYYVGYLQPRTFLLKYNENGTITDAVDCALDPLSETKCTLKSFTVEKGIYQTSNFRVQPTESIVRFPNITNLCPFGEVFNATRFASVYAWNRKRISNCVADYSVLYNSASFSTFKCYGVSPTKLNDLCFTNVYADSFVIRGDEVRQIAPGQTGKIADYNYKLPDDFTGCVIAWNSNNLDSKVGGNYNYLYRLFRKSNLKPFERDISTEIYQAGSTPCNGVEGFNCYFPLQSYGFQPTNGVGYQPYRVVVLSFELLHAPATVCGPKKSTNLVKNKCVNFNFNGLTGTGVLTESNKKFLPFQQFGRDIADTTDAVRDPQTLEILDITPCSFGGVSVITPGTNTSNQVAVLYQDVNCTEVPVAIHADQLTPTWRVYSTGSNVFQTRAGCLIGAEHVNNSYECDIPIGAGICASYQTQTNSPRRARSVASQSIIAYTMSLGAENSVAYSNNSIAIPTNFTISVTTEILPVSMTKTSVDCTMYICGDSTECSNLLLQYGSFCTQLNRALTGIAVEQDKNTQEVFAQVKQIYKTPPIKDFGGFNFSQILPDPSKPSKRSFIEDLLFNKVTLADAGFIKQYGDCLGDIAARDLICAQKFNGLTVLPPLLTDEMIAQYTSALLAGTITSGWTFGAGAALQIPFAMQMAYRFNGIGVTQNVLYENQKLIANQFNSAIGKIQDSLSSTASALGKLQDVVNQNAQALNTLVKQLSSNFGAISSVLNDILSRLDPPEAEVQIDRLITGRLQSLQTYVTQQLIRAAEIRASANLAATKMSECVLGQSKRVDFCGKGYHLMSFPQSAPHGVVFLHVTYVFAQEKNFTTAPAICHDGKAHFPREGVFVSNGTHWFVTQRNFYEPQIITTDNTFVSGNCDVVIGIVNNTVYDPLQPELDSFKEELDKYFKNHTSPDVDLGDIPGINASVVNIQKEIDRLNEVAKNLNESLIDLQELGKYEQYIKWPWYIWLGFIAGLIAIVMVTIMLCCMTSCCSCLKGCCSCGSCCKFDEDDSEPVLKGVKLHYT

SEQ ID NO: 522 - protein, 1273 aa, Artificial Sequence
  SARS-CoV-2/USA/WA-UW261/2020__EPI_ISL_418046 spike protein (1-1273)(K986P_V987P_P1069F)
MFVFLVLLPLVSSQCVNLTTRTQLPPAYTNSFTRGVYYPDKVFRSSVLHSTQDLFLPFFSNVTWFHAIHVSGTNGTKRFDNPVLPFNDGVYFASTEKSNIIRGWIFGTTLDSKTQSLLIVNNATNVVIKVCEFQFCNDPFLGVYYHKNNKSWMESEFRVYSSANNCTFEYVSQPFLMDLEGKQGNFKNLREFVFKNIDGYFKIYSKHTPINLVRDLPQGFSALEPLVDLPIGINITRFQTLLALHRSYLTPGDSSSGWTAGAAAYYVGYLQPRTFLLKYNENGTITDAVDCALDPLSETKCTLKSFTVEKGIYQTSNFRVQPTESIVRFPNITNLCPFGEVFNATRFTSVYAWNRKRISNCVADYSVLYNSASFSTFKCYGVSPTKLNDLCFTNVYADSFVIRGDEVRQIAPGQTGKIADYNYKLPDDFTGCVIAWNSNNLDSKVGGNYNYLYRLFRKSNLKPFERDISTEIYQAGSTPCNGVEGFNCYFPLQSYGFQPTNGVGYQPYRVVVLSFELLHAPATVCGPKKSTNLVKNKCVNFNFNGLTGTGVLTESNKKFLPFQQFGRDIADTTDAVRDPQTLEILDITPCSFGGVSVITPGTNTSNQVAVLYQDVNCTEVPVAIHADQLTPTWRVYSTGSNVFQTRAGCLIGAEHVNNSYECDIPIGAGICASYQTQTNSPRRARSVASQSIIAYTMSLGAENSVAYSNNSIAIPTNFTISVTTEILPVSMTKTSVDCTMYICGDSTECSNLLLQYGSFCTQLNRALTGIAVEQDKNTQEVFAQVKQIYKTPPIKDFGGFNFSQILPDPSKPSKRSFIEDLLFNKVTLADAGFIKQYGDCLGDIAARDLICAQKFNGLTVLPPLLTDEMIAQYTSALLAGTITSGWTFGAGAALQIPFAMQMAYRFNGIGVTQNVLYENQKLIANQFNSAIGKIQDSLSSTASALGKLQDVVNQNAQALNTLVKQLSSNFGAISSVLNDILSRLDPPEAEVQIDRLITGRLQSLQTYVTQQLIRAAEIRASANLAATKMSECVLGQSKRVDFCGKGYHLMSFPQSAPHGVVFLHVTYVFAQEKNFTTAPAICHDGKAHFPREGVFVSNGTHWFVTQRNFYEPQIITTDNTFVSGNCDVVIGIVNNTVYDPLQPELDSFKEELDKYFKNHTSPDVDLGDISGINASVVNIQKEIDRLNEVAKNLNESLIDLQELGKYEQYIKWPWYIWLGFIAGLIAIVMVTIMLCCMTSCCSCLKGCCSCGSCCKFDEDDSEPVLKGVKLHYT

SEQ ID NO: 523 - protein, 1273 aa, Artificial Sequence
  SARS-CoV-2/Portugal/PT0035/2020__EPI_ISL_418020 spike protein (1-1273)(K986P_V987P_P1069F)
MFVFLVLLPLVSSQCVNLTTRTQLPPAYTNSFTRGVYYPDKVFRSSVLHSTQDLFLPFFSNVTWFHAIHVSGTNGTKRFDNPVLPFNDGVYFASTEKSNIIRGWIFGTTLDSKTQSLLIVNNATNVVIKVCEFQFCNDPFLGVYYHKNNKSWMESEFRVYSSANNCTFEYVSQPFLMDLEGKQGNFKNLREFVFKNIDGYFKIYSKHTPINLVRDLPQGFSALEPLVDLPIGINITRFQTLLALHRSYLTPGDSSSGWTAGAAAYYVGYLQPRTFLLKYNENGTITDAVDCALDPLSETKCTLKSFTVEKGIYQTSNFRVQPTESIVRFPNITNLCPFGEVFNATRFASVYAWNRKRISNCVADYSVLYNSASFSTFKCYGVSPTKLNDLCFTNVYADSFVIRGDEVRQIAPGQTGKIADYNYKLPDDFTGCVIAWNSNNLDSKVGGNYNYLYRLFRKSNLKPFERDISTEIYQAGSTPCNGVEGFNCYFPLQSYGFQPTNGVGYQPYRVVVLSFELLHAPATVCGPKKSTNLVKNKCVNFNFNGLTGTGVLTESNKKFLPFQQFGRDIADTTDAVRDPQTLEILDITPCSFGGVSVITPGTNTSNQVAVLYQDVNCTEVPVAIHADQLTPTWRVYSTGSNVFQTRAGCLIGAEHVNNSYECDIPIGAGICASYQTQTNSPRRARSVASQSIIAYTMSLGAENSVAYSNNSIAIPTNFTISVTTEILPVSMTKTSVDCTMYICGDSTECSNLLLQYGSFCTQLNRALTGIAVEQDKNTQEVFAQVKQIYKTPPIKDFGGFNFSQILPDPSKPSKRSFIEDLLFNKVTLADAGFIKQYGDCLGDISARDLICAQKFNGLTVLPPLLTDEMIAQYTSALLAGTITSGWTFGAGAALQIPFAMQMAYRFNGIGVTQNVLYENQKLIANQFNSAIGKIQDSLSSTASALGKLQDVVNQNAQALNTLVKQLSSNFGAISSVLNDILSRLDPPEAEVQIDRLITGRLQSLQTYVTQQLIRAAEIRASANLAATKMSECVLGQSKRVDFCGKGYHLMSFPQSAPHGVVFLHVTYVFAQEKNFTTAPAICHDGKAHFPREGVFVSNGTHWFVTQRNFYEPQIITTDNTFVSGNCDVVIGIVNNTVYDPLQPELDSFKEELDKYFKNHTSPDVDLGDISGINASVVNIQKEIDRLNEVAKNLNESLIDLQELGKYEQYIKWPWYIWLGFIAGLIAIVMVTIMLCCMTSCCSCLKGCCSCGSCCKFDEDDSEPVLKGVKLHYT

SEQ ID NO: 524 - protein, 1273 aa, Artificial Sequence
  SARS-CoV-2/USA/NY-NYUMC7/2020__EPI_ISL_418192 spike protein (1-1273)(K986P_V987P_P1069F)
MFVFLVLLPLVSSQCVNLTTRTQLPPAYTNSFTRGVYYPDKVFRSSVLHSTQDLFLPFFSNVTWFHAIHVSGTNGTKRFDNPVLPFNDGVYFASTEKSNIIRGWIFGTTLDSKTQSLLIVNNATNVVIKVCEFQFCNDPFLGVYHHKNNKSWMESEFRVYSSANNCTFEYVSQPFLMDLEGKQGNFKNLREFVFKNIDGYFKIYSKHTPINLVRDLPQGFSALEPLVDLPIGINITRFQTLLALHRSYLTPGDSSSGWTAGAAAYYVGYLQPRTFLLKYNENGTITDAVDCALDPLSETKCTLKSFTVEKGIYQTSNFRVQPTESIVRFPNITNLCPFGEVFNATRFASVYAWNRKRISNCVADYSVLYNSASFSTFKCYGVSPTKLNDLCFTNVYADSFVIRGDEVRQIAPGQTGKIADYNYKLPDDFTGCVIAWNSNNLDSKVGGNYNYLYRLFRKSNLKPFERDISTEIYQAGSTPCNGVEGFNCYFPLQSYGFQPTNGVGYQPYRVVVLSFELLHAPATVCGPKKSTNLVKNKCVNFNFNGLTGTGVLTESNKKFLPFQQFGRDIADTTDAVRDPQTLEILDITPCSFGGVSVITPGTNTSNQVAVLYQGVNCTEVPVAIHADQLTPTWRVYSTGSNVFQTRAGCLIGAEHVNNSYECDIPIGAGICASYQTQTNSPRRARSVASQSIIAYTMSLGAENSVAYSNNSIAIPTNFTISVTTEILPVSMTKTSVDCTMYICGDSTECSNLLLQYGSFCTQLNRALTGIAVEQDKNTQEVFAQVKQIYKTPPIKDFGGFNFSQILPDPSKPSKRSFIEDLLFNKVTLADAGFIKQYGDCLGDIAARDLICAQKFNGLTVLPPLLTDEMIAQYTSALLAGTITSGWTFGAGAALQIPFAMQMAYRFNGIGVTQNVLYENQKLIANQFNSAIGKIQDSLSSTASALGKLQDVVNQNAQALNTLVKQLSSNFGAISSVLNDILSRLDPPEAEVQIDRLITGRLQSLQTYVTQQLIRAAEIRASANLAATKMSECVLGQSKRVDFCGKGYHLMSFPQSAPHGVVFLHVTYVFAQEKNFTTAPAICHDGKAHFPREGVFVSNGTHWFVTQRNFYEPQIITTDNTFVSGNCDVVIGIVNNTVYDPLQPELDSFKEELDKYFKNHTSPDVDLGDISGINASVVNIQKEIDRLNEVAKNLNESLIDLQELGKYEQYIKWPWYIWLGFIAGLIAIVMVTIMLCCMTSCCSCLKGCCSCGSCCKFDEDDSEPVLKGVKLHYT

SEQ ID NO: 525 - protein, 1273 aa, Artificial Sequence
  SARS-CoV-2/Iceland/189/2020__EPI_ISL_417709 spike protein (1-1273)(K986P_V987P_P1069F)
MFVFLVLLPLVSSQCVNLTTRTQLPPAYTNSFTRGVYYPDKVFRSSVLHSTQDLFLPFFSNVTWFHAIHVSGTNGTKRFDNPVLPFNDGVYFASTEKSNIIRGWIFGTTLDSKTQSLLIVNNATNVVIKVCEFQFCNDPFLGVYYHKNNKSWMESEFRVYSSANNCTFEYVSQPFLMDLEGKQGNFKNLREFVFKNIDGYFKIYSKHTPINLVRDLPQGFSALEPLVDLPIGINITRFQTLLALHRSYLTPGDSSSGWTAGAAAYYVGYLQPRTFLLKYNENGTITDAVDCALDPLSETKCTLKSFTVEKGIYQTSNFRVQPTESIVRFPNITNLCPFGEVFNATRFASVYAWNRKRISNCVADYSVLYNSASFSTFKCYGVSPTKLNDLCFTNVYADSFVIRGDEVRQIAPGQTGKIADYNYKLPDDFTGCVIAWNSNNLDSKVGGNYNYLYRLFRKSNLKPFERDISTEIYQAGSTPCNGVEGFNCYFPLQSYGFQPTNGVGYQPYRVVVLSFELLHAPATVCGPKKSTNLVKNKCVNFNFNGLTGTGVLTESNKKFLPFQQFGRDIADTTDAVRDPQTLEILDITPCSFGGVSVITPGTNTSNQVAVLYQGVNCTEVPVAIHADQLTPTWRVYSTGSNVFQTRAGCLIGAEHVNNSYECDIPIGAGICASYQTQTNSPRRARSVASQSIIAYTMSLGAENSVAYSNNSIAIPTNFTISVTTEILPVSMTKTSVDCTMYICGDSTECSNLLLQYGSFCTQLNRALTGIAVEQDKNTQEVFAQVKQIYKTPPIKDFGGFNFSQILPDPSKPSKRSFIEDLLFNKVTLADAGFTKQYGDCLGDIAARDLICAQKFNGLTVLPPLLTDEMIAQYTSALLAGTITSGWTFGAGAALQIPFAMQMAYRFNGIGVTQNVLYENQKLIANQFNSAIGKIQDSLSSTASALGKLQDVVNQNAQALNTLVKQLSSNFGAISSVLNDILSRLDPPEAEVQIDRLITGRLQSLQTYVTQQLIRAAEIRASANLAATKMSECVLGQSKRVDFCGKGYHLMSFPQSAPHGVVFLHVTYVFAQEKNFTTAPAICHDGKAHFPREGVFVSNGTHWFVTQRNFYEPQIITTDNTFVSGNCDVVIGIVNNTVYDPLQPELDSFKEELDKYFKNHTSPDVDLGDISGINASVVNIQKEIDRLNEVAKNLNESLIDLQELGKYEQYIKWPWYIWLGFIAGLIAIVMVTIMLCCMTSCCSCLKGCCSCGSCCKFDEDDSEPVLKGVKLHYT

SEQ ID NO: 526 - protein, 1273 aa, Artificial Sequence
  SARS-CoV-2/Australia/NSW56/2020__EPI_ISL_417408 spike protein (1-1273)(K986P_V987P_P1069F)
MFVFLVLLPLVSSQCVNLTTRTQLPPAYTNSFTRGVYYPDKVFRSSVLHSTQDLFLPFFSNVTWFHAIHVSGTNGTKRFDNPVLPFNDGVYFASTEKSNIIRGWIFGTTLDSKTQSLLIVNNATNVVIKVCEFQFCNDPFLGVYYHKNNKSWMESEFRVYSSANNCTFEYVSQPFLMDLEGKQGNFKNLREFVFKNIDGYFKIYSKHTPINLVRDLPQGFSALEPLVDLPIGINITRFQTLLALHRSYLTPGDSSSGWTAGAAAYYVGYLQPRTFLLKYNENGTITDAVDCALDPLSETKCTLKSFTVEKGIYQTSNFRVQPTESIVRFPNITNLCPFGEVFNATRFASVYAWNRKRISNCVADYSVLYNSASFSTFKCYGVSPTKLNDLCFTNVYADSFVIRGDEVRQIAPGQTGKIADYNYKLPDDFTGCVIAWNSNNLDSKVGGNYNYLYRLFRKSNLKPFERDISTEIYQAGSTPCNGVEGFNCYFPLQSYGFQPTNGVGYQPYRVVVLSFELLHAPATVCGPKKSTNLVKNKCVNFNFNGLTGTGVLTESNKKFLPFQQFGRDIADTTDAVRDPQTLEILDITPCSFGGVSVITPGTNTSNQVAVLYQDVNCTEVPVAIHADQLTPTWRVYSTGSNVFQTRAGCLIGAEHVNNSYECDIPIGAGICASYQTQTNSPRRARSVASQSIIAYTMSLGAENSVAYSNNSIAIPTNFTISVTTEILPVSMTKTSVDCTMYICGDSTECSNLLLQYGSFCTQLNRALTGIAVEQDKNTQEVFAQVKQIYKTPPIKDFGGFNFSQILPDSSKPSKRSFIEDLLFNKVTLADAGFIKQYGDCLGDIAARDLICAQKFNGLTVLPPLLTDEMIAQYTSALLAGTITSGWTFGAGAALQIPFAMQMAYRFNGIGVTQNVLYENQKLIANQFNSAIGKIQDSLSSTASALGKLQDVVNQNAQALNTLVKQLSSNFGAISSVLNDILSRLDPPEAEVQIDRLITGRLQSLQTYVTQQLIRAAEIRASANLAATKMSECVLGQSKRVDFCGKGYHLMSFPQSAPHGVVFLHVTYVFAQEKNFTTAPAICHDGKAHFPREGVFVSNGTHWFVTQRNFYEPQIITTDNTFVSGNCDVVIGIVNNTVYDPLQPELDSFKEELDKYFKNHTSPDVDLGDISGINASVVNIQKEIDRLNEVAKNLNESLIDLQELGKYEQYIKWPWYIWLGFIAGLIAIVMVTIMLCCMTSCCSCLKGCCSCGSCCKFDEDDSEPVLKGVKLHYT

SEQ ID NO: 527 - protein, 1273 aa, Artificial Sequence
  SARS-CoV-2/Iceland/280/2020__EPI_ISL_417608 spike protein (1-1273)(K986P_V987P_P1069F)
MFVFLVLLPLVSSQCVNLTTRTQLPPAYTNSFTRGVYYPDKVFRSSVLHSTQDLFLPFFSNVTWFHAIHVSGTNGTKRFDNPVLPFNDGVYFASTEKSNIIRGWIFGTTLDSKTQSLLIVNNATNVVIKVCEFQFCNDPFLGVYYHKNNKSWMESEFRVYSSANNCTFEYVSQPFLMDLEGKQGNFKNLREFVFKNIDGYFKIYSKHTPINLVRDLPQGFSALEPLVDLPIGINITRFQTLLALHRSYLTPGDSSSGWTAGAAAYYVGYLQPRTFLLKYNENGTITDAVDCALDPLSETKCTLKSFTVEKGIYQTSNFRVQPTESIVRFPNITNLCPFGEVFNATRFASVYAWNRKRISNCVADYSVLYNSASFSTFKCYGVSPTKLNDLCFTNVYADSFVIRGDEVRQIAPGQTGKIADYNYKLPDDFTGCVIAWNSNNLDSKVGGNYNYLYRLFRKSNLKPFERDISTEIYQAGSTPCNGVEGFNCYFPLQSYGFQPTNGVGYQPYRVVVLSFELLHAPATVCGPKKSTNLVKNKCVNFNFNGLTGTGVLTESNKKFLPFQQFGRDIADTTDAVRDPQTLEILDITPCSFGGVSVITPGTNTSNQVAVLYQGVNCTEVPVAIHADQLTPTWRVYSTGSNVFQTRAGCLIGAEHVNNSYECDIPIGAGICASYHTQTNSPRRARSVASQSIIAYTMSLGAENSVAYSNNSIAIPTNFTISVTTEILPVSMTKTSVDCTMYICGDSTECSNLLLQYGSFCTQLNRALTGIAVEQDKNTQEVFAQVKQIYKTPPIKDFGGFNFSQILPDPSKPSKRSFIEDLLFNKVTLADAGFIKQYGDCLGDIAARDLICAQKFNGLTVLPPLLTDEMIAQYTSALLAGTITSGWTFGAGAALQIPFAMQMAYRFNGIGVTQNVLYENQKLIANQFNSAIGKIQDSLSSTASALGKLQDVVNQNAQALNTLVKQLSSNFGAISSVLNDILSRLDPPEAEVQIDRLITGRLQSLQTYVTQQLIRAAEIRASANLAATKMSECVLGQSKRVDFCGKGYHLMSFPQSAPHGVVFLHVTYVFAQEKNFTTAPAICHDGKAHFPREGVFVSNGTHWFVTQRNFYEPQIITTDNTFVSGNCDVVIGIVNNTVYDPLQPELDSFKEELDKYFKNHTSPDVDLGDISGINASVVNIQKEIDRLNEVAKNLNESLIDLQELGKYEQYIKWPWYIWLGFIAGLIAIVMVTIMLCCMTSCCSCLKGCCSCGSCCKFDEDDSEPVLKGVKLHYT

SEQ ID NO: 528 - protein, 1273 aa, Artificial Sequence
  SARS-CoV-2/Iceland/247/2020__EPI_ISL_417575 spike protein (1-1273)(K986P_V987P_P1069F)
MFVFLVLLPLVSSQCVNLTTRTQLPPAYTNSFTRGVYYPDKVFRSSVLHSTQDLFLPFFSNVTWFHAIHVSGTNGTKRFDNPVLPFNDGVYFASTEKSNIIRGWIFGTTLDSKTQSLLIVNNATNVVIKVCEFQFCNDPFLGVYYHKNNKSWMESEFRVYSSANNCTFEYVSQPFLMDLEGKQGNFKNLREFVFKNIDGYFKIYSKHTPINLVRDLPQGFSALEPLVDLPIGINITRFQTLLALHRSYLTPGDSSSGWTAGAAAYYVGYLQPRTFLLKYNENGTITDAVDCALDPLSETKCTLKSFTVEKGIYQTSNFRVQPTESIVRFPNITNLCPFGEVFNATRFASVYAWNRKRISNCVADYSVLYNSASFSTFKCYGVSPTKLNDLCFTNVYADSFVIRGDEVRQIAPGQTGKIADYNYKLPDDFTGCVIAWNSNNLDSKVGGNYNYLYRLFRKSNLKPFERDISTEIYQAGSTPCNGVEGFNCYFPLQSYGFQPTNGVGYQPYRVVVLSFELLHAPATVCGPKKSTNLVKNKCVNFNFNGLTGTGVLTESNKKFLPFQQFGRDIADTTDAVRDPQTLEILDITPCSFGGVSVITPGTNTSNQVAVLYQGVNCTEVPVAIHADQLTPTWRVYSTGSNVFQTRAGCLIGAEHVNNSYECDIPIGAGICASYQTQTNSPRRARSVASQSIIAYTMSLGAENSVAYSNNSIAIPTNFTISVTTEILPVSMTKTSVDCTMYICGDSTECSNLLLQYGSFCTQLNRALTGIAVEQDKNTQEVFAQVKQIYKTPPIKDFGGFNFSQILPDPSKPSKRSFIEDLLFNKVTLADAGFIKQYGDCLGDIAARDLICAQKFNGLTVLPPLLTDEMIAQYTSALLAGTITSGWTFGAGAALQIPFAMQMAYRFNGIGVTQNVLYENQKLIANQFNSAIGKIQDSLSSTASALGKLQDVVNQNAQALNTLVKQLSSNFGAISSVLNDILSRLDPPEAEVQIDRLITGRLQSLQTYVTQQLIRAAEIRASANLAATKMSECVLGQSKRVDFCGKGYHLMSFPQSAPHGVVFLHVTYVFAQEKNFTTAPAICHDGKAHFPREGVFVSNGTHWFVTQRNFYEPQIITTDNTFVSGNCDVVIGIVNNTVYDPLQPELDSFKEELDKYFKNHTSPDVDLGDISGINASVVNIQKEIDRLNEVAKNLNESLIDLQELGKYEQYIKWPWYIWLGFIAGLIAIVIVTIMLCCMTSCCSCLKGCCSCGSCCKFDEDDSEPVLKGVKLHYT

SEQ ID NO: 529 - protein, 1273 aa, Artificial Sequence
  SARS-CoV-2/Iceland/238/2020__EPI_ISL_417566 spike protein (1-1273)(K986P_V987P_P1069F)
MFVFLVLLPLVSSQCVNLTTRTQLPPAYTNSFTRGVYYPDKVFRSSVLHSTQDLFLPFFSNVTWFHAIHVSGTNGTKRFDNPVLPFNDGVYFASTEKSNIIRGWIFGTTLDSKTQSLLIVNNATNVVIKVCEFQFCNDPFLGVYYHKNNKSWMESEFRVYSSANNCTFEYVSQPFLMDLEGKQGNFKNLREFVFKNIDGYFKIYSKHTPINLVRDLPQGFSALEPLVDLPIGINITRFQTLLALHRSYLTPGDSSSGWTAGAAAYYVGYLQPRTFLLKYNENGTITDAVDCALDPLSETKCTLKSFTVEKGIYQTSNFRVQPTESIVRFPNITNLCPFGEVFNATRFASVYAWNRKRISNCVADYSVLYNSASFSTFKCYGVSPTKLNDLCFTNVYADSFVIRGDEVRQIAPGQTGKIADYNYKLPDDFTGCVIAWNSNNLDSKVGGNYNYLYRLFRKSNLKPFERDISTEIYQAGSTPCNGVEGFNCYFPLQSYGFQPTNGVGYQPYRVVVLSFELLHAPATVCGPKKSTNLVKNKCVNFNFNGLTGTGVLTESNKKFLPFQQFGRDIADTTDAVRDPQTLEILDITPCSFGGVSVITPGTNTSNQVAVLYQGVNCTEVPVAIHADQLTPTWRVYSTGSNVFQTRAGCLIGAEHVNNSYECDIPIGAGICASYQTQTNSPRRARSVASQSIIAYTMSLGAENSVAYSNNSIAIPTNFTISVTTEILPVSMTKTSVDCTMYICGDSTECSNLLLQYGSFCTQLNRALTGIAVEQDKNTQEVFAQVKQIYKTPPIKDFGGFNFSQILPDPSKPSKRSFIEDLLFNKVTLADVGFIKQYGDCLGDIAARDLICAQKFNGLTVLPPLLTDEMIAQYTSALLAGTITSGWTFGAGAALQIPFAMQMAYRFNGIGVTQNVLYENQKLIANQFNSAIGKIQDSLSSTASALGKLQDVVNQNAQALNTLVKQLSSNFGAISSVLNDILSRLDPPEAEVQIDRLITGRLQSLQTYVTQQLIRAAEIRASANLAATKMSECVLGQSKRVDFCGKGYHLMSFPQSAPHGVVFLHVTYVFAQEKNFTTAPAICHDGKAHFPREGVFVSNGTHWFVTQRNFYEPQIITTDNTFVSGNCDVVIGIVNNTVYDPLQPELDSFKEELDKYFKNHTSPDVDLGDISGINASVVNIQKEIDRLNEVAKNLNESLIDLQELGKYEQYIKWPWYIWLGFIAGLIAIVMVTIMLCCMTSCCSCLKGCCSCGSCCKFDEDDSEPVLKGVKLHYT

SEQ ID NO: 530 - protein, 1273 aa, Artificial Sequence
  SARS-CoV-2/Greece/16/2020__EPI_ISL_418265 spike protein (1-1273)(K986P_V987P_P1069F)
MFVFLVLLPLVSSQCVNLTTRTQLPPAYTNSFTRGVYYPDKVFRSSVLHSTQDLFLPFFSNVTWFHAIHVSGTNGTKRFDNPVLPFNDGVYFASTEKSNIIRGWIFGTTLDSKTQSLLIVNNATNVVIKVCEFQFCNDPFLGVYYHKNNKSWMESEFRVYSSANNCTFEYVSQPFLMDLEGKQGNFKNLREFVFKNVDGYFKIYSKHTPINLVRDLPQGFSALEPLVDLPIGINITRFQTLLALHRSYLTPGDSSSGWTAGAAAYYVGYLQPRTFLLKYNENGTITDAVDCALDPLSETKCTLKSFTVEKGIYQTSNFRVQPTESIVRFPNITNLCPFGEVFNATRFASVYAWNRKRISNCVADYSVLYNSASFSTFKCYGVSPTKLNDLCFTNVYADSFVIRGDEVRQIAPGQTGKIADYNYKLPDDFTGCVIAWNSNNLDSKVGGNYNYLYRLFRKSNLKPFERDISTEIYQAGSTPCNGVEGFNCYFPLQSYGFQPTNGVGYQPYRVVVLSFELLHAPATVCGPKKSTNLVKNKCVNFNFNGLTGTGVLTESNKKFLPFQQFGRDIADTTDAVRDPQTLEILDITPCSFGGVSVITPGTNTSNQVAVLYQDVNCTEVPVAIHADQLTPTWRVYSTGSNVFQTRAGCLIGAEHVNNSYECDIPIGAGICASYQTQTNSPRRARSVASQSIIAYTMSLGAENSVAYSNNSIAIPTNFTISVTTEILPVSMTKTSVDCTMYICGDSTECSNLLLQYGSFCTQLNRALTGIAVEQDKNTQEVFAQVKQIYKTPPIKDFGGFNFSQILPDPSKPSKRSFIEDLLFNKVTLADAGFIKQYGDCLGDIAARDLICAQKFNGLTVLPPLLTDEMIAQYTSALLAGTITSGWTFGAGAALQIPFAMQMAYRFNGIGVTQNVLYENQKLIANQFNSAIGKIQDSLSSTASALGKLQDVVNQNAQALNTLVKQLSSNFGAISSVLNDILSRLDPPEAEVQIDRLITGRLQSLQTYVTQQLIRAAEIRASANLAATKMSECVLGQSKRVDFCGKGYHLMSFPQSAPHGVVFLHVTYVFAQEKNFTTAPAICHDGKAHFPREGVFVSNGTHWFVTQRNFYEPQIITTDNTFVSGNCDVVIGIVNNTVYDPLQPELDSFKEELDKYFKNHTSPDVDLGDISGINASVVNIQKEIDRLNEVAKNLNESLIDLQELGKYEQYIKWPWYIWLGFIAGLIAIVMVTIMLCCMTSCCSCLKGCCSCGSCCKFDEDDSEPVLKGVKLHYT

SEQ ID NO: 531 - protein, 1273 aa, Artificial Sequence
  SARS-CoV-2/Iceland/319/2020__EPI_ISL_417648 spike protein (1-1273)(K986P_V987P_P1069F)
MFVFLVLLPLVSSQCVNLTTRTQLPPAYTNSFTRGVYYPDKVFRSSVLHSTQDLFLPFFSNVTWFHAIHVSGTNGTKRFDNPVLPFNDGVYFASTEKSNIIRGWIFGTTLDSKTQSLLIVNNATNVVIKVCEFQFCNDPFLGVYYHKNNKSWMESEFRVYSSANNCTFEYVSQPFLIDLEGKQGNFKNLREFVFKNIDGYFKIYSKHTPINLVRDLPQGFSALEPLVDLPIGINITRFQTLLALHRSYLTPGDSSSGWTAGAAAYYVGYLQPRTFLLKYNENGTITDAVDCALDPLSETKCTLKSFTVEKGIYQTSNFRVQPTESIVRFPNITNLCPFGEVFNATRFASVYAWNRKRISNCVADYSVLYNSASFSTFKCYGVSPTKLNDLCFTNVYADSFVIRGDEVRQIAPGQTGKIADYNYKLPDDFTGCVIAWNSNNLDSKVGGNYNYLYRLFRKSNLKPFERDISTEIYQAGSTPCNGVEGFNCYFPLQSYGFQPTNGVGYQPYRVVVLSFELLHAPATVCGPKKSTNLVKNKCVNFNFNGLTGTGVLTESNKKFLPFQQFGRDIADTTDAVRDPQTLEILDITPCSFGGVSVITPGTNTSNQVAVLYQGVNCTEVPVAIHADQLTPTWRVYSTGSNVFQTRAGCLIGAEHVNNSYECDIPIGAGICASYQTQTNSPRRARSVASQSIIAYTMSLGAENSVAYSNNSIAIPTNFTISVTTEILPVSMTKTSVDCTMYICGDSTECSNLLLQYGSFCTQLNRALTGIAVEQDKNTQEVFAQVKQIYKTPPIKDFGGFNFSQILPDPSKPSKRSFIEDLLFNKVTLADAGFIKQYGDCLGDIAARDLICAQKFNGLTVLPPLLTDEMIAQYTSALLAGTITSGWTFGAGAALQIPFAMQMAYRFNGIGVTQNVLYENQKLIANQFNSAIGKIQDSLSSTASALGKLQDVVNQNAQALNTLVKQLSSNFGAISSVLNDILSRLDPPEAEVQIDRLITGRLQSLQTYVTQQLIRAAEIRASANLAATKMSECVLGQSKRVDFCGKGYHLMSFPQSAPHGVVFLHVTYVFAQEKNFTTAPAICHDGKAHFPREGVFVSNGTHWFVTQRNFYEPQIITTDNTFVSGNCDVVIGIVNNTVYDPLQPELDSFKEELDKYFKNHTSPDVDLGDISGINASVVNIQKEIDRLNEVAKNLNESLIDLQELGKYEQYIKWPWYIWLGFIAGLIAIVMVTIMLCCMTSCCSCLKGCCSCGSCCKFDEDDSEPVLKGVKLHYT

SEQ ID NO: 532 - protein, 1273 aa, Artificial Sequence
  SARS-CoV-2/Congo/94/2020__EPI_ISL_417947 spike protein (1-1273)(K986P_V987P_P1069F)
MFVFLVLLPLVSSQCVNLTTRTQLPPAYTNSFTRGVYYPDKVFRSSVLHSTQDLFLPFFSNVTWFHAIHVSGTNGTKRFDNPVLPFNDGVYFASTEKSNIIRGWIFGTTLDSKTQSLLIVNNATNVVIKVCEFQFCNDPFLGVYYHKNNKSWMESEFRVYSSANNCTFEYVSQPFLMDLEGKQGNFKNLREFVFKNIDGYFKIYSKHTPINLVRDLPQGFSALEPLVDLPIGINITRFQTLLALHRSYLTPGDSSSGWTAGAAAYYVGYLQPRTFLLKYNENGTITDAVDCALDPLSETKCTLKSFTVEKGIYQTSNFRVQPTESIVRFPNITNLCPFGEVFNATRFASVYAWNRKRISNCVADYSVLYNSASFSTFKCYGVSPTKLNDLCFTNVYADSFVIRGDEVRQIAPGQTGKIADYNYKLPDDFTGCVIAWNSNNLDSKVGGNYNYLYRLFRKSNLKPFERDISTEIYQAGSTPCNGVEGFNCYFPLQSYGFQPTNGVGYQPYRVVVLSFELLHAPATVCGPKKSTNLVKNKCVNFNFNGLTGTGVLTESNKKFLPFQQFGRDIADTTDAVRDPQTLEILDITPCSFGGVSVITPGTNTSNQVAVLYQGVNCTEVPVAIHADQLTPTWRVYSTGSNVFQTRAGCLIGAEHVNNSYECDIPIGAGICASYQTQTNSPRRARSVASQSIIAYTMSLGAENSVAYSNNSIAIPTNFTISVTTEILPVSMTKTSVDCTMYICGDSTECSNLLLQYGSFCTQLNRALTGIAVEQDKNTQEVFAQVKQIYKTPPIKDFGGFNFSQILPDPSKPSKRSFIEDILFNKVTLADAGFIKQYGDCLGDIAARDLICAQKFNGLTVLPPLLTDEMIAQYTSALLAGTITSGWTFGAGAALQIPFAMQMAYRFNGIGVTQNVLYENQKLIANQFNSAIGKIQDSLSSTASALGKLQDVVNQNAQALNTLVKQLSSNFGAISSVLNDILSRLDPPEAEVQIDRLITGRLQSLQTYVTQQLIRAAEIRASANLAATKMSECVLGQSKRVDFCGKGYHLMSFPQSAPHGVVFLHVTYVFAQEKNFTTAPAICHDGKAHFPREGVFVSNGTHWFVTQRNFYEPQIITTDNTFVSGNCDVVIGIVNNTVYDPLQPELDSFKEELDKYFKNHTSPDVDLGDISGINASVVNIQKEIDRLNEVAKNLNESLIDLQELGKYEQYIKWPWYIWLGFIAGLIAIVMVTIMLCCMTSCCSCLKGCCSCGSCCKFDEDDSEPVLKGVKLHYT

SEQ ID NO: 533 - protein, 1273 aa, Artificial Sequence
  SARS-CoV-2/Congo/158/2020__EPI_ISL_417950 spike protein (1-1273)(K986P_V987P_P1069F)
MFVFLVLLPLVSSQCVNLTTRTQLPPAYTNSFTRGVYYPDKVFRSSVLHSTQDLFLPFFSNVTWFHAIHVSGTNGTKRFDNPVLPFNDGVYFASTEKSNIIRGWIFGTTLDSKTQSLLIVNNATNVVIKVCEFQFCNDPFLGVYYHKNNKSWMESEFRVYSSANNCTFEYVSQPFLMDLEGKQGNFKNLREFVFKNIDGYFKIYSKHTPINLVRDLPQGFSALEPLVDLPIGINITRFQTLLALHRSYLTPGDSSSGWTAGAAAYYVGYLQPRTFLLKYNENGTITDAVDCALDPLSETKCTLKSFTVEKGIYQTSNFRVQPTESIVRFPNITNLCPFGEVFNATRFASVYAWNRKRISNCVADYSVLYNSASFSTFKCYGVSPTKLNDLCFTNVYADSFVIRGDEVRQIAPGQTGKIADYNYKLPDDFTGCVIAWNSNNLDSKVGGNYNYLYRLFRKSNLKPFERDISTEIYQAGSTPCNGVEGFNCYFPLQSYGFQPTNGVGYQPYRVVVLSFELLHAPATVCGPKKSTNLVKNKCVNFNFNGLTGTGVLTESNKKFLPFQQFGRDIADTTDAVRDPQTLEILDITPCSFGGVSVITPGTNTSNQVAVLYQDVNCTEVPVAIHADQLTPTWRVYSTGSNVFQTRAGCLIGAEHVNNSYECDIPIGAGICASYQTQTNSPRRARSVASQSIIAYTMSLGAENSVAYSNNSIAIPTNFTISVTTEILPVSMTKTSVDCTMYICGDSTECSNLLLQYGSFCTQLNRALTGIAVEQDKNTQEVFAQVKQIYKTPPIKDFGGFNFSQILPDPSKPSKRSFIEDLLFNKVTLADAGFIKQYGDCLGDIAARDLICAQKFNGLTVLPPLLTDEMIAQYTSALLAGTITSGWTFGAGAALQIPFAMQMAYRFNGIGVTQNVLYENQKLIANQFNSAIGKIQDSLSSTASALGKLQDVVNQNAQALNTLVKQLSSNFGAISSVLNDILSRLDPPEAEVQIDRLITGRLQSLQTYVTQQLIRAAEIRASANLAATKMSECVLGQSKRVDFCGKGYHLMSFPQSAPHGVVFLHVTYVFAQEKNFTTAPAICHDGKAHFPREGVFVSNGTHWFVTQRNFYEPQIITTDNTFLSGNCDVVIGIVNNTVYDPLQPELDSFKEELDKYFKNHTSPDVDLGDISGINASVVNIQKEIDRLNEVAKNLNESLIDLQELGKYEQYIKWPWYIWLGFIAGLIAIVMVTIMLCCMTSCCSCLKGCCSCGSCCKFDEDDSEPVLKGVKLHYT

SEQ ID NO: 534 - protein, 1273 aa, Artificial Sequence
  SARS-CoV-2/USA/UT-00034/2020__EPI_ISL_417977 spike protein (1-1273)(K986P_V987P_P1069F)
MFVFLVLLPLVSSQCVNLTTRTQLPPAYTNSFTRGVYYPDKVFRSSVLHSTQDLFLPFFSNVTWFHAIHVSGTNGTKRFDNPVLPFNDGVYFASTEKSNIIRGWIFGTTLDSKTQSLLIVNNATNVVIKVCEFQFCNDPFLGVYYYKNNKSWMESEFRVYSSANNCTFEYVSQPFLMDLEGKQGNFKNLREFVFKNIDGYFKIYSKHTPINLVRDLPQGFSALEPLVDLPIGINITRFQTLLALHRSYLTPGDSSSGWTAGAAAYYVGYLQPRTFLLKYNENGTITDAVDCALDPLSETKCTLKSFTVEKGIYQTSNFRVQPTESIVRFPNITNLCPFGEVFNATRFASVYAWNRKRISNCVADYSVLYNSASFSTFKCYGVSPTKLNDLCFTNVYADSFVIRGDEVRQIAPGQTGKIADYNYKLPDDFTGCVIAWNSNNLDSKVGGNYNYLYRLFRKSNLKPFERDISTEIYQAGSTPCNGVEGFNCYFPLQSYGFQPTNGVGYQPYRVVVLSFELLHAPATVCGPKKSTNLVKNKCVNFNFNGLTGTGVLTESNKKFLPFQQFGRDIADTTDAVRDPQTLEILDITPCSFGGVSVITPGTNTSNQVAVLYQGVNCTEVPVAIHADQLTPTWRVYSTGSNVFQTRAGCLIGAEHVNNSYECDIPIGAGICASYQTQTNSPRRARSVASQSIIAYTMSLGAENSVAYSNNSIAIPTNFTISVTTEILPVSMTKTSVDCTMYICGDSTECSNLLLQYGSFCTQLNRALTGIAVEQDKNTQEVFAQVKQIYKTPPIKDFGGFNFSQILPDPSKPSKRSFIEDLLFNKVTLADAGFIKQYGDCLGDIAARDLICAQKFNGLTVLPPLLTDEMIAQYTSALLAGTITSGWTFGAGAALQIPFAMQMAYRFNGIGVTQNVLYENQKLIANQFNSAIGKIQDSLSSTASALGKLQDVVNQNAQALNTLVKQLSSNFGAISSVLNDILSRLDPPEAEVQIDRLITGRLQSLQTYVTQQLIRAAEIRASANLAATKMSECVLGQSKRVDFCGKGYHLMSFPQSAPHGVVFLHVTYVFAQEKNFTTAPAICHDGKAHFPREGVFVSNGTHWFVTQRNFYEPQIITTDNTFVSGNCDVVIGIVNNTVYDPLQPELDSFKEELDKYFKNHTSPDVDLGDISGINASVVNIQKEIDRLNEVAKNLNESLIDLQELGKYEQYIKWPWYIWLGFIAGLIAIVMVTIMLCCMTSCCSCLKGCCSCGSCCKFDEDDSEPVLKGVKLHYT

SEQ ID NO: 535 - protein, 1273 aa, Artificial Sequence
  SARS-CoV-2/USA/UT-00033/2020__EPI_ISL_417976 spike protein (1-1273)(K986P_V987P_P1069F)
MFVFLVLLPLVSSQCVNLTTRTQLPPAYTNSFTRGVYYPDKVFRSSVLHSTQDLFLPFFSNVTWFHAIHVSGTNGTKRFDNPVLPFNDGVYFASTEKSNIIRGWIFGTTLDSKTQSLLIVNNATNVVIKVCEFQFCNDPFLGVYYHKNNKSWMESEFRVYSSANNCTFEYVSQPFLMDLEGKQGNFKNLREFVFKNIDGYFKIYSKHTPINLVRDLPQGFSALEPLVDLPIGINITRFQTLLALHRSYLTPGDSSSGLTAGAAAYYVGYLQPRTFLLKYNENGTITDAVDCALDPLSETKCTLKSFTVEKGIYQTSNFRVQPTESIVRFPNITNLCPFGEVFNATRFASVYAWNRKRISNCVADYSVLYNSASFSTFKCYGVSPTKLNDLCFTNVYADSFVIRGDEVRQIAPGQTGKIADYNYKLPDDFTGCVIAWNSNNLDSKVGGNYNYLYRLFRKSNLKPFERDISTEIYQAGSTPCNGVEGFNCYFPLQSYGFQPTNGVGYQPYRVVVLSFELLHAPATVCGPKKSTNLVKNKCVNFNFNGLTGTGVLTESNKKFLPFQQFGRDIADTTDAVRDPQTLEILDITPCSFGGVSVITPGTNTSNQVAVLYQGVNCTEVPVAIHADQLTPTWRVYSTGSNVFQTRAGCLIGAEHVNNSYECDIPIGAGICASYQTQTNSPRRARSVASQSIIAYTMSLGAENSVAYSNNSIAIPTNFTISVTTEILPVSMTKTSVDCTMYICGDSTECSNLLLQYGSFCTQLNRALTGIAVEQDKNTQEVFAQVKQIYKTPPIKDFGGFNFSQILPDPSKPSKRSFIEDLLFNKVTLADAGFIKQYGDCLGDIAARDLICAQKFNGLTVLPPLLTDEMIAQYTSALLAGTITSGWTFGAGAALQIPFAMQMAYRFNGIGVTQNVLYENQKLIANQFNSAIGKIQDSLSSTASALGKLQDVVNQNAQALNTLVKQLSSNFGAISSVLNDILSRLDPPEAEVQIDRLITGRLQSLQTYVTQQLIRAAEIRASANLAATKMSECVLGQSKRVDFCGKGYHLMSFPQSAPHGVVFLHVTYVFAQEKNFTTAPAICHDGKAHFPREGVFVSNGTHWFVTQRNFYEPQIITTDNTFVSGNCDVVIGIVNNTVYDPLQPELDSFKEELDKYFKNHTSPDVDLGDISGINASVVNIQKEIDRLNEVAKNLNESLIDLQELGKYEQYIKWPWYIWLGFIAGLIAIVMVTIMLCCMTSCCSCLKGCCSCGSCCKFDEDDSEPVLKGVKLHYT

SEQ ID NO: 536 - protein, 1273 aa, Artificial Sequence
  SARS-CoV-2/USA/WI-13/2020__EPI_ISL_417516 spike protein (1-1273)(K986P_V987P_P1069F)
MFVFLVLLPLVSSQCVNLTTRTQLPPAYTNSFTRGVYYPDKVFRSSVLHSTQDLFLPFFSNVTWFHAIHVSGTNGTKRFDNPVLPFNDGVYFASTEKSNIIRGWIFGTTLDSKTQSLLIVNNATNVVIKVCEFQFCNDPFLGVYYHKNNKSWMESEFRVYSSANNCTFEYVSQPFLMDLEGKQGNFKNLREFVFKNIDGYFKIYSKHTPINLVRDLPQGFSALEPLVDLPIGINITRFQTLLALHRSYLTPGDSSSGWTAGAAAYYVGYLQPRTFLLKYNENGTITDAVDCALDPLSETKCTLKSFTVEKGIYQTSNFRVLPTESIVRFPNITNLCPFGEVFNATRFASVYAWNRKRISNCVADYSVLYNSASFSTFKCYGVSPTKLNDLCFTNVYADSFVIRGDEVRQIAPGQTGKIADYNYKLPDDFTGCVIAWNSNNLDSKVGGNYNYLYRLFRKSNLKPFERDISTEIYQAGSTPCNGVEGFNCYFPLQSYGFQPTNGVGYQPYRVVVLSFELLHAPATVCGPKKSTNLVKNKCVNFNFNGLTGTGVLTESNKKFLPFQQFGRDIADTTDAVRDPQTLEILDITPCSFGGVSVITPGTNTSNQVAVLYQGVNCTEVPVAIHADQLTPTWRVYSTGSNVFQTRAGCLIGAEHVNNSYECDIPIGAGICASYQTQTNSPRRARSVASQSIIAYTMSLGAENSVAYSNNSIAIPTNFTISVTTEILPVSMTKTSVDCTMYICGDSTECSNLLLQYGSFCTQLNRALTGIAVEQDKNTQEVFAQVKQIYKTPPIKDFGGFNFSQILPDPSKPSKRSFIEDLLFNKVTLADAGFIKQYGDCLGDIAARDLICAQKFNGLTVLPPLLTDEMIAQYTSALLAGTITSGWTFGAGAALQIPFAMQMAYRFNGIGVTQNVLYENQKLIANQFNSAIGKIQDSLSSTASALGKLQDVVNQNAQALNTLVKQLSSNFGAISSVLNDILSRLDPPEAEVQIDRLITGRLQSLQTYVTQQLIRAAEIRASANLAATKMSECVLGQSKRVDFCGKGYHLMSFPQSAPHGVVFLHVTYVFAQEKNFTTAPAICHDGKAHFPREGVFVSNGTHWFVTQRNFYEPQIITTDNTFVSGNCDVVIGIVNNTVYDPLQPELDSFKEELDKYFKNHTSPDVDLGDISGINASVVNIQKEIDRLNEVAKNLNESLIDLQELGKYEQYIKWPWYIWLGFIAGLIAIVMVTIMLCCMTSCCSCLKGCCSCGSCCKFDEDDSEPVLKGVKLHYT

SEQ ID NO: 537 - protein, 1272 aa, Artificial Sequence
  SARS-CoV-2/India/1-27/2020__EPI_ISL_413522 spike protein (1-1272)(K985P_V986P_P1068F)
MFVFLVLLPLVSSQCVNLTTRTQLPPAYTNSFTRGVYYPDKVFRSSVLHSTQDLFLPFFSNVTWFHAIHVSGTNGTKRFDNPVLPFNDGVYFASTEKSNIIRGWIFGTTLDSKTQSLLIVNNATNVVIKVCEFQFCNDPFLGVYHKNNKSWMESEFRVYSSANNCTFEYVSQPFLMDLEGKQGNFKNLREFVFKNIDGYFKIYSKHTPINLVRDLPQGFSALEPLVDLPIGINITRFQTLLALHRSYLTPGDSSSGWTAGAAAYYVGYLQPRTFLLKYNENGTITDAVDCALDPLSETKCTLKSFTVEKGIYQTSNFRVQPTESIVRFPNITNLCPFGEVFNATRFASVYAWNRKRISNCVADYSVLYNSASFSTFKCYGVSPTKLNDLCFTNVYADSFVIRGDEVIQIAPGQTGKIADYNYKLPDDFTGCVIAWNSNNLDSKVGGNYNYLYRLFRKSNLKPFERDISTEIYQAGSTPCNGVEGFNCYFPLQSYGFQPTNGVGYQPYRVVVLSFELLHAPATVCGPKKSTNLVKNKCVNFNFNGLTGTGVLTESNKKFLPFQQFGRDIADTTDAVRDPQTLEILDITPCSFGGVSVITPGTNTSNQVAVLYQDVNCTEVPVAIHADQLTPTWRVYSTGSNVFQTRAGCLIGAEHVNNSYECDIPIGAGICASYQTQTNSPRRARSVASQSIIAYTMSLGAENSVAYSNNSIAIPTNFTISVTTEILPVSMTKTSVDCTMYICGDSTECSNLLLQYGSFCTQLNRALTGIAVEQDKNTQEVFAQVKQIYKTPPIKDFGGFNFSQILPDPSKPSKRSFIEDLLFNKVTLADAGFIKQYGDCLGDIAARDLICAQKFNGLTVLPPLLTDEMIAQYTSALLAGTITSGWTFGAGAALQIPFAMQMAYRFNGIGVTQNVLYENQKLIANQFNSAIGKIQDSLSSTASALGKLQDVVNQNAQALNTLVKQLSSNFGAISSVLNDILSRLDPPEAEVQIDRLITGRLQSLQTYVTQQLIRAAEIRASANLAATKMSECVLGQSKRVDFCGKGYHLMSFPQSAPHGVVFLHVTYVFAQEKNFTTAPAICHDGKAHFPREGVFVSNGTHWFVTQRNFYEPQIITTDNTFVSGNCDVVIGIVNNTVYDPLQPELDSFKEELDKYFKNHTSPDVDLGDISGINASVVNIQKEIDRLNEVAKNLNESLIDLQELGKYEQYIKWPWYIWLGFIAGLIAIVMVTIMLCCMTSCCSCLKGCCSCGSCCKFDEDDSEPVLKGVKLHYT

SEQ ID NO: 538 - protein, 1267 aa, Artificial Sequence
  SARS-CoV-2/pangolin/Guangxi/P4L/2017__EPI_ISL_410538 spike protein (1-1267)(K980P_V981P_P1063F)
MFVFLFVLPLVSSQCVNLTTRTGIPPGYTNSSTRGVYYPDKVFRSSILHLTQDLFLPFFSNVTWFNTINYQGGFKKFDNPVLPFNDGVYFASTEKSNIIRGWIFGTTLDARTQSLLIVNNATNVVIKVCEFQFCTDPFLGVYYHNNNKTWVENEFRVYSSANNCTFEYISQPFLMDLEGKQGNFKNLREFVFKNVDGYFKIYSKHTPIDLVRDLPRGFAALEPLVDLPIGINITRFQTLLALHRSYLTPGNLESGWTTGAAAYYVGYLQQRTFLLSYNQNGTITDAVDCSLDPLSETKCTLKSLTVEKGIYQTSNFRVQPTISIVRFPNITNLCPFGEVFNASKFASVYAWNRKRISNCVADYSVLYNSTSFSTFKCYGVSPTKLNDLCFTNVYADSFVVKGDEVRQIAPGQTGVIADYNYKLPDDFTGCVIAWNSVKQDALTGGNYGYLYRLFRKSKLKPFERDISTEIYQAGSTPCNGQVGLNCYYPLERYGFHPTTGVNYQPFRVVVLSFELLNGPATVCGPKLSTTLVKDKCVNFNFNGLTGTGVLTTSKKQFLPFQQFGRDISDTTDAVRDPQTLEILDITPCSFGGVSVITPGTNTSNQVAVLYQDVNCTEVPMAIHAEQLTPAWRVYSAGANVFQTRAGCLVGAEHVNNSYECDIPVGAGICASYHSMSSLRSVNQRSIIAYTMSLGAENSVAYSNNSIAIPTNFTISVTTEILPVSMTKTSVDCTMYICGDSIECSNLLLQYGSFCTQLNRALTGIAVEQDKNTQEVFAQVKQIYKTPPIKDFGGFNFSQILPDPSKPSKRSFIEDLLFNKVTLADAGFIKQYGDCLGDIAARDLICAQKFNGLTVLPPLLTDEMIAQYTSALLAGTITSGWTFGAGAALQIPFAMQMAYRFNGIGVTQNVLYENQKLIANQFNSAIGKIQDSLSSTASALGKLQDVVNQNAQALNTLVKQLSSNFGAISSVLNDILSRLDPPEAEVQIDRLITGRLQSLQTYVTQQLIRAAEIRASANLAATKMSECVLGQSKRVDFCGKGYHLMSFPQSAPHGVVFLHVTYVFAQEKNFTTAPAICHEGKAHFPREGVFVSNGTHWFITQRNFYEPQIITTDNTFVSGSCDVVIGIVNNTVYDPLQPELDSFKEELDKYFKNHTSPDVDLGDISGINASVVNIQKEIDRLNEVAKNLNESPIDLQELGKYEQYIKWPWYIWLGFIAGLIAIIMVTIMLCCMTSCCSCLKGCCSCGSCCKFDEDDSEPVLKGVKLHYT

SEQ ID NO: 539 - protein, 1267 aa, Artificial Sequence
  SARS-CoV-2/pangolin/Guangxi/P5L/2017__EPI_ISL_410540 spike protein (1-1267)(K980P_V981P_P1063F)
MFVFLFVLPLVSSQCVNLTTRTGIPPGYTNSSTRGVYYPDKVFRSSILHLTQDLFLPFFSNVTWFNTINYQGGFKKFDNPVLPFNDGVYFASTEKSNIIRGWIFGTTLDARTQSLLIVNNATNVVIKVCEFQFCTDPFLGVYYHNNNKTWVENEFRVYSSANNCTFEYISQPFLMDLEGKQGNFKNLREFVFKNVDGYFKIYSKHTPIDLVRDLPRGFAALEPLVDLPIGINITRFQTLLALHRSYLTPGKLESGWTTGAAAYYVGYLQQRTFLLSYNQNGTITDAVDCSLDPLSETKCTLKSLTVEKGIYQTSNFRVQPTISIVRFPNITNLCPFGEVFNASKFASVYAWNRKRISNCVADYSVLYNSTSFSTFKCYGVSPTKLNDLCFTNVYADSFVVKGDEVRQIAPGQTGVIADYNYKLPDDFTGCVIAWNSVKQDALTGGNYGYLYRLFRKSKLKPFERDISTEIYQAGSTPCNGQVGLNCYYPLERYGFHPTTGVNYQPFRVVVLSFELLNGPATVCGPKLSTTLVKDKCVNFNFNGLTGTGVLTTSKKQFLPFQQFGRDISDTTDAVRDPQTLEILDITPCSFGGVSVITPGTNTSNQVAVLYQDVNCTEVPMAIHAEQLTPAWRVYSAGANVFQTRAGCLVGAEHVNNSYECDIPVGAGICASYHSMSSFRSVNQRSIIAYTMSLGAENSVAYSNNSIAIPTNFTISVTTEILPVSMTKTSVDCTMYICGDSIECSNLLLQYGSFCTQLNRALTGIAVEQDKNTQEVFAQVKQIYKTPPIKDFGGFNFSQILPDPSKPSKRSFIEDLLFNKVTLADAGFIKQYGDCLGDIAARDLICAQKFNGLTVLPPLLTDEMIAQYTSALLAGTITSGWTFGAGAALQIPFAMQMAYRFNGIGVTQNVLYENQKLIANQFNSAIGKIQDSLSSTASALGKLQDVVNQNAQALNTLVKQLSSNFGAISSVLNDILSRLDPPEAEVQIDRLITGRLQSLQTYVTQQLIRAAEIRASANLAATKMSECVLGQSKRVDFCGKGYHLMSFPQSAPHGVVFLHVTYVFAQEKNFTTAPAICHEGKAHFPREGVFVSNGTHWFITQRNFYEPQIITTDNTFVSGSCDVVIGIVNNTVYDPLQPELDSFKEELDKYFKNHTSPDVDLGDISGINASVVNIQKEIDRLNEVAKNLNESLIDLQELGKYEQYIKWPWYIWLGFIAGLIAIIMVTIMLCCMTSCCSCLKGCCSCGSCCKFDEDDSEPVLKGVKLHYT

SEQ ID NO: 540 - protein, 1267 aa, Artificial Sequence
  SARS-CoV-2/pangolin/Guangxi/P5E/2017__EPI_ISL_410541 spike protein (1-1267)(K980P_V981P_P1063F)
MFVFLFVLPLVSSQCVNLTTRTGIPPGYTNSSTRGVYYPDKVFRSSILHLTQDLFLPFFSNVTWFNTITYQGGSKKFDNPVLPFNDGVYFASTEKSNIIRGWIFGTTLDARTQSLLIVNNATNVVIKVCEFQFCTDPFLGVYYHNNNKTWVENEFRVYSSANNCTFEYISQPFLMDLEGKQGNFKNLREFVFKNVDGYFKIYSKHTPIDLVRDLPRGFAALEPLVDLPIGINITRFQTLLALHRSYLTPGKLESGWTTGAAAYYVGYLQQRTFLLSYNQNGTITDAVDCSLDPLSETKCTLKSLTVEKGIYQTSNFRVQPTISIVRFPNITNLCPFGEVFNASKFASVYAWNRKRISNCVADYSVLYNSTSFSTFKCYGVSPTKLNDLCFTNVYADSFVVKGDEVRQIAPGQTGVIADYNYKLPDDFTGCVIAWNSVKQDALTGDNYGYLYRLFRKSKLKPFERDISTEIYQAGSTPCNGQVGLNCYYPLERYGFHPTTGVNYQPFRVVVLSFELLNGPATVCGPKLSTTLVKDKCVNFNFNGLTGTGVLTTSKKQFLPFQQFGRDISDTTDAVRDPQTLEILDITPCSFGGVSVITPGTNTSNQVAVLYQDVNCTEVPMAIHAEQLTPAWRVYSAGANVFQTRAGCLVGAEHVNNSYECDIPVGAGICASYHSMSSFRSVNQRSIIAYTMSLGAENSVAYSNNSIAIPTNFTISVTTEILPVSMTKTSVDCTMYICGDSIECSNLLLQYGSFCTQLNRALTGIAVEQDKNTQEVFAQVKQIYKTPPIKDFGGFNFSQILPDPSKPSKRSFIEDLLFNKVTLADAGFIKQYGDCLGDIAARDLICAQKFNGLTVLPPLLTDEMIAQYTSALLAGTITSGWTFGAGAALQIPFAMQMAYRFNGIGVTQNVLYENQKLIANQFNSAIGKIQDSLSSTASALGKLQDVVNQNAQALNTLVKQLSSNFGAISSVLNDILSRLDPPEAEVQIDRLITGRLQSLQTYVTQQLIRAAEIRASANLAATKMSECVLGQSKRVDFCGKGYHLMSFPQSAPHGVVFLHVTYVFAQEKNFTTAPAICHEGKAHFPREGVFVSNGTHWFITQRNFYEPQIITTDNTFVSGSCDVVIGIVNNTVYDPLQPELDSFKEELDKYFKNHTSPDVDLGDISGINASVVNIQKEIDRLNEVAKNLNESLIDLQELGKYEQYIKWPWYIWLGFIAGLIAIIMVTIMLCCMTSCCSCLKGCCSCGSCCKFDEDDSEPVLKGVKLHYT

SEQ ID NO: 541 - protein, 1265 aa, Artificial Sequence
  SARS-CoV-2/pangolin/Guangxi/P1E/2017__EPI_ISL_410539 spike protein (1-1265)(K978P_V979P_P1061F)
MFVFLFVLPLVSSQCVNLTTRTGIQPGYTNSSTRGVYYPDKVFRSSILHLTQDLFLPFFSNVTWFNTINYQGGFKKFDNPVLPFNDGVYFASTEKSNIIRGWIFGTTLDARTQSLLIVNNATNVVIKVCEFQFCTDPFLGVYYHNNNKTWVENEFRVYSSANNCTFEYISQPFLMDLEGKQGNFKNLREFVFKNVDGYFKIYSKHTPIDLVRDLPRGFAALEPLVDLPIGINITRFQTLLALHRSYLTPGKLESGWTTGAAAYYVGYLQQRTFLLSYNQNGTITDAVDCSLDPLSETKCTLKSLTVEKGIYQTSNFRVQPTISIVRFPNITNLCPFGEVFNASKFASVYAWNRKRISNCVADYSVLYNSTSFSTFKCYGVSPTKLNDLCFTNVYADSFVVKGDEVRQIAPGQTGVIADYNYKLPDDFTGCVIAWNSVKQDALTGGNYLYRLFRKSKLKPFERDISTEIYQAGSTPCNGQVGLNCYYPLERYGFHPTTGVNYQPFRVVVLSFELLNGPATVCGPKLSTTLVKDKCVNFNFNGLTGTGVLTTSKKQFLPFQQFGRDISDTTDAVRDPQTLEILDITPCSFGGVSVITPGTNTSNQVAVLYQDVNCTEVPMAIHAEQLTPAWRVYSAGANVFQTRAGCLVGAEHVNNSYECDIPVGAGICASYHSMSSLRSVNQRSIIAYTMSLGAENSVAYSNNSIAIPTNFTISVTTEILPVSMTKTSVDCTMYICGDSIECSNLLLQYGSFCTQLNRALTGIAVEQDKNTQEVFAQVKQIYKTPPIKDFGGFNFSQILPDPSKPSKRSFIEDLLFNKVTLADAGFIKQYGDCLGDIAARDLICAQKFNGLTVLPPLLTDEMIAQYTSALLAGTITSGWTFGAGAALQIPFAMQMAYRFNGIGVTQNVLYENQKLIANQFNSAIGKIQDSLSSTASALGKLQDVVNQNAQALNTLVKQLSSNFGAISSVLNDILSRLDPPEAEVQIDRLITGRLQSLQTYVTQQLIRAAEIRASANLAATKMSECVLGQSKRVDFCGKGYHLMSFPQSAPHGVVFLHVTYVFAQEKNFTTAPAICHEGKAHFPREGVFVSNGTHWFITQRNFYEPQIITTDNTFVSGSCDVVIGIVNNTVYDPLQPELDSFKEELDKYFKNHTSPDVDLGDISGINASVVNIQKEIDRLNEVAKNLNESLIDLQELGKYEQYIKWPWYIWLGFIAGLIAIIMVTIMLCCMTSCCSCLKGCCSCGSCCKFDEDDSEPVLKGVKLHYT

SEQ ID NO: 542 - protein, 1273 aa, Artificial Sequence
  SARS-CoV-2/Wuhan/WIV05/2019__EPI_ISL_402128 spike protein (1-1273)(K986P_V987P_ H1048Q_H1064N_ H1083N_H1101N)
MFVFLVLLPLVSSQCVNLTTRTQLPPAYTNSFTRGVYYPDKVFRSSVLHSTQDLFLPFFSNVTWFHAIHVSGTNGTKRFDNPVLPFNDGVYFASTEKSNIIRGWIFGTTLDSKTQSLLIVNNATNVVIKVCEFQFCNDPFLGVYYHKNNKSWMESEFRVYSSANNCTFEYVSQPFLMDLEGKQGNFKNLREFVFKNIDGYFKIYSKHTPINLVRDLPQGFSALEPLVDLPIGINITRFQTLLALHRSYLTPGDSSSGWTAGAAAYYVGYLQPRTFLLKYNENGTITDAVDCALDPLSETKCTLKSFTVEKGIYQTSNFRVQPTESIVRFPNITNLCPFGEVFNATRFASVYAWNRKRISNCVADYSVLYNSASFSTFKCYGVSPTKLNDLCFTNVYADSFVIRGDEVRQIAPGQTGKIADYNYKLPDDFTGCVIAWNSNNLDSKVGGNYNYLYRLFRKSNLKPFERDISTEIYQAGSTPCNGVEGFNCYFPLQSYGFQPTNGVGYQPYRVVVLSFELLHAPATVCGPKKSTNLVKNKCVNFNFNGLTGTGVLTESNKKFLPFQQFGRDIADTTDAVRDPQTLEILDITPCSFGGVSVITPGTNTSNQVAVLYQDVNCTEVPVAIHADQLTPTWRVYSTGSNVFQTRAGCLIGAEHVNNSYECDIPIGAGICASYQTQTNSPRRARSVASQSIIAYTMSLGAENSVAYSNNSIAIPTNFTISVTTEILPVSMTKTSVDCTMYICGDSTECSNLLLQYGSFCTQLNRALTGIAVEQDKNTQEVFAQVKQIYKTPPIKDFGGFNFSQILPDPSKPSKRSFIEDLLFNKVTLADAGFIKQYGDCLGDIAARDLICAQKFNGLTVLPPLLTDEMIAQYTSALLAGTITSGWTFGAGAALQIPFAMQMAYRFNGIGVTQNVLYENQKLIANQFNSAIGKIQDSLSSTASALGKLQDVVNQNAQALNTLVKQLSSNFGAISSVLNDILSRLDPPEAEVQIDRLITGRLQSLQTYVTQQLIRAAEIRASANLAATKMSECVLGQSKRVDFCGKGYQLMSFPQSAPHGVVFLNVTYVPAQEKNFTTAPAICNDGKAHFPREGVFVSNGTNWFVTQRNFYEPQIITTDNTFVSGNCDVVIGIVNNTVYDPLQPELDSFKEELDKYFKNHTSPDVDLGDISGINASVVNIQKEIDRLNEVAKNLNESLIDLQELGKYEQYIKWPWYIWLGFIAGLIAIVMVTIMLCCMTSCCSCLKGCCSCGSCCKFDEDDSEPVLKGVKLHYT

SEQ ID NO: 543 - protein, 1269 aa, Artificial Sequence
  SARS-CoV-2/bat/Yunnan/RaTG13/2013__EPI_ISL_402131 spike protein (1-1269)(K982P_V983P_ H1044Q_H1060N_ H1079N_H1097N)
MFVFLVLLPLVSSQCVNLTTRTQLPPAYTNSSTRGVYYPDKVFRSSVLHLTQDLFLPFFSNVTWFHAIHVSGTNGIKRFDNPVLPFNDGVYFASTEKSNIIRGWIFGTTLDSKTQSLLIVNNATNVVIKVCEFQFCNDPFLGVYYHKNNKSWMESEFRVYSSANNCTFEYVSQPFLMDLEGKQGNFKNLREFVFKNIDGYFKIYSKHTPINLVRDLPPGFSALEPLVDLPIGINITRFQTLLALHRSYLTPGDSSSGWTAGAAAYYVGYLQPRTFLLKYNENGTITDAVDCALDPLSETKCTLKSFTVEKGIYQTSNFRVQPTDSIVRFPNITNLCPFGEVFNATTFASVYAWNRKRISNCVADYSVLYNSTSFSTFKCYGVSPTKLNDLCFTNVYADSFVITGDEVRQIAPGQTGKIADYNYKLPDDFTGCVIAWNSKHIDAKEGGNFNYLYRLFRKANLKPFERDISTEIYQAGSKPCNGQTGLNCYYPLYRYGFYPTDGVGHQPYRVVVLSFELLNAPATVCGPKKSTNLVKNKCVNFNFNGLTGTGVLTESNKKFLPFQQFGRDIADTTDAVRDPQTLEILDITPCSFGGVSVITPGTNASNQVAVLYQDVNCTEVPVAIHADQLTPTWRVYSTGSNVFQTRAGCLIGAEHVNNSYECDIPIGAGICASYQTQTNSRSVASQSIIAYTMSLGAENSVAYSNNSIAIPTNFTISVTTEILPVSMTKTSVDCTMYICGDSTECSNLLLQYGSFCTQLNRALTGIAVEQDKNTQEVFAQVKQIYKTPPIKDFGGFNFSQILPDPSKPSKRSFIEDLLFNKVTLADAGFIKQYGDCLGDIAARDLICAQKFNGLTVLPPLLTDEMIAQYTSALLAGTITSGWTFGAGAALQIPFAMQMAYRFNGIGVTQNVLYENQKLIANQFNSAIGKIQDSLSSTASALGKLQDVVNQNAQALNTLVKQLSSNFGAISSVLNDILSRLDPPEAEVQIDRLITGRLQSLQTYVTQQLIRAAEIRASANLAATKMSECVLGQSKRVDFCGKGYQLMSFPQSAPHGVVFLNVTYVPAQEKNFTTAPAICNDGKAHFPREGVFVSNGTNWFVTQRNFYEPQIITTDNTFVSGSCDVVIGIVNNTVYDPLQPELDSFKEELDKYFKNHTSPDVDLGDISGINASVVNIQKEIDRLNEVAKNLNESLIDLQELGKYEQYIKWPWYIWLGFIAGLIAIIMVTIMLCCMTSCCSCLKGCCSCGSCCKFDEDDSEPVLKGVKLHYT

SEQ ID NO: 544 - protein, 1273 aa, Artificial Sequence
  SARS-CoV-2/Wuhan/HBCDC-HB-01/2019__EPI_ISL_402132 spike protein (1-1273)(K986P_V987P_ H1048Q_H1064N_ H1083N_H1101N)
MFVFLVLLPLVSSQCVNLTTRTQLPPAYTNSITRGVYYPDKVFRSSVLHSTQDLFLPFFSNVTWFHAIHVSGTNGTKRFDNPVLPFNDGVYFASTEKSNIIRGWIFGTTLDSKTQSLLIVNNATNVVIKVCEFQFCNDPFLGVYYHKNNKSWMESEFRVYSSANNCTFEYVSQPFLMDLEGKQGNFKNLREFVFKNIDGYFKIYSKHTPINLVRDLPQGFSALEPLVDLPIGINITRFQTLLALHRSYLTPGDSSSGWTAGAAAYYVGYLQPRTFLLKYNENGTITDAVDCALDPLSETKCTLKSFTVEKGIYQTSNFRVQPTESIVRFPNITNLCPFGEVFNATRFASVYAWNRKRISNCVADYSVLYNSASFSTFKCYGVSPTKLNDLCFTNVYADSFVIRGDEVRQIAPGQTGKIADYNYKLPDDFTGCVIAWNSNNLDSKVGGNYNYLYRLFRKSNLKPFERDISTEIYQAGSTPCNGVEGFNCYFPLQSYGFQPTNGVGYQPYRVVVLSFELLHAPATVCGPKKSTNLVKNKCVNFNFNGLTGTGVLTESNKKFLPFQQFGRDIADTTDAVRDPQTLEILDITPCSFGGVSVITPGTNTSNQVAVLYQDVNCTEVPVAIHADQLTPTWRVYSTGSNVFQTRAGCLIGAEHVNNSYECDIPIGAGICASYQTQTNSPRRARSVASQSIIAYTMSLGAENSVAYSNNSIAIPTNFTISVTTEILPVSMTKTSVDCTMYICGDSTECSNLLLQYGSFCTQLNRALTGIAVEQDKNTQEVFAQVKQIYKTPPIKDFGGFNFSQILPDPSKPSKRSFIEDLLFNKVTLADAGFIKQYGDCLGDIAARDLICAQKFNGLTVLPPLLTDEMIAQYTSALLAGTITSGWTFGAGAALQIPFAMQMAYRFNGIGVTQNVLYENQKLIANQFNSAIGKIQDSLSSTASALGKLQDVVNQNAQALNTLVKQLSSNFGAISSVLNDILSRLDPPEAEVQIDRLITGRLQSLQTYVTQQLIRAAEIRASANLAATKMSECVLGQSKRVDFCGKGYQLMSFPQSAPHGVVFLNVTYVPAQEKNFTTAPAICNDGKAHFPREGVFVSNGTNWFVTQRNFYEPQIITTDNTFVSGNCDVVIGIVNNTVYDPLQPELDSFKEELDKYFKNHTSPDVDLGDISGINASVVNIQKEIDRLNEVAKNLNESLIDLQELGKYEQYIKWPWYIWLGFIAGLIAIVMVTIMLCCMTSCCSCLKGCCSCGSCCKFDEDDSEPVLKGVKLHYT

SEQ ID NO: 545 - protein, 1273 aa, Artificial Sequence
  SARS-CoV-2/Guangdong/20SF028/2020__EPI_ISL_403936 spike protein (1-1273)(K986P_V987P_ H1048Q_H1064N_ H1083N_H1101N)
MFVFLVLLPLVSSQCVNLTTRTQLPPAYTNSFTRGVYYPDKVFRSSVLYSTQDLFLPFFSNVTWFHAIHVSGTNGTKRFDNPVLPFNDGVYFASTEKSNIIRGWIFGTTLDSKTQSLLIVNNATNVVIKVCEFQFCNDPFLGVYYHKNNKSWMESEFRVYSSANNCTFEYVSQPFLMDLEGKQGNFKNLREFVFKNIDGYFKIYSKHTPINLVRDLPQGFSALEPLVDLPIGINITRFQTLLALHRSYLTPGDSSSGWTAGAAAYYVGYLQPRTFLLKYNENGTITDAVDCALDPLSETKCTLKSFTVEKGIYQTSNFRVQPTESIVRFPNITNLCPFGEVFNATRFASVYAWNRKRISNCVADYSVLYNSASFSTFKCYGVSPTKLNDLCFTNVYADSFVIRGDEVRQIAPGQTGKIADYNYKLPDDFTGCVIAWNSNNLDSKVGGNYNYLYRLFRKSNLKPFERDISTEIYQAGSTPCNGVEGFNCYFPLQSYGFQPTNGVGYQPYRVVVLSFELLHAPATVCGPKKSTNLVKNKCVNFNFNGLTGTGVLTESNKKFLPFQQFGRDIADTTDAVRDPQTLEILDITPCSFGGVSVITPGTNTSNQVAVLYQDVNCTEVPVAIHADQLTPTWRVYSTGSNVFQTRAGCLIGAEHVNNSYECDIPIGAGICASYQTQTNSPRRARSVASQSIIAYTMSLGAENSVAYSNNSIAIPTNFTISVTTEILPVSMTKTSVDCTMYICGDSTECSNLLLQYGSFCTQLNRALTGIAVEQDKNTQEVFAQVKQIYKTPPIKDFGGFNFSQILPDPSKPSKRSFIEDLLFNKVTLADAGFIKQYGDCLGDIAARDLICAQKFNGLTVLPPLLTDEMIAQYTSALLAGTITSGWTFGAGAALQIPFAMQMAYRFNGIGVTQNVLYENQKLIANQFNSAIGKIQDSLSSTASALGKLQDVVNQNAQALNTLVKQLSSNFGAISSVLNDILSRLDPPEAEVQIDRLITGRLQSLQTYVTQQLIRAAEIRASANLAATKMSECVLGQSKRVDFCGKGYQLMSFPQSAPHGVVFLNVTYVPAQEKNFTTAPAICNDGKAHFPREGVFVSNGTNWFVTQRNFYEPQIITTDNTFVSGNCDVVIGIVNNTVYDPLQPELDSFKEELDKYFKNHTSPDVDLGDISGINASVVNIQKEIDRLNEVAKNLNESLIDLQELGKYEQYIKWPWYIWLGFIAGLIAIVMVTIMLCCMTSCCSCLKGCCSCGSCCKFDEDDSEPVLKGVKLHYT

SEQ ID NO: 546 - protein, 1273 aa, Artificial Sequence
  SARS-CoV-2/Shenzhen/SZTH-001/2020__EPI_ISL_406592 spike protein (1-1273)(K986P_V987P_ H1048Q_H1064N_ H1083N_H1101N)
MFVFLVLLPLVSSQCVNLTTRTQLPPAYTNSFTRGVYYPDKVFRSSVLHSTQDLFLPFFSNVTWFHAIHVSGTNGTKRFDNPVLPFNDGVYFASTEKSNIIRGWIFGTTLDSKTQSLLIVNNATNVVIKVCEFQFCNDPFLGVYYHKNNKSWMESEFRVYSSANNCTFEYVSQPFLMDLEGKQGNFKNLREFVFKNIDGYFKIYSKHTPINLVRDLPQGFSALEPLVDLPIGINITRFQTLLALHRSYLTPGDSSSGWTAGAAAYYVGYLQPRTFLLKYNENGTITDAVDCALDPLSETKCTLKSFTVEKGIYQTSNFRVQPTESIVRFPNITNLCPFGEVFNATRFASVYAWNRKRISNCVADYSVLYNSASFSTFKCYGVSPTKLNDLCFTNVYADSFVIRGDEVRQIAPGQTGKIADYNYKLPDDFTGCVIAWNSNNLDSKVGGNYNYLYRLFRKSNLKPFERDISTEIYQAGSTPCNGVEGFNCYFPLQSYGFQPTNGVGYQPYRVVVLSFELLHAPATVCGPKKSTNLVKNKCVNFNFNGLTGTGVLTESNKKFLPFQQFGRDIADTTDAVRDPQTLEILDITPCSFGGVSVITPGTNTSNQVAVLYQDVNCTEVPVAIHADQLTPTWRVYSTGSNVFQTRAGCLIGAEHVNNSYECDIPIGAGICASYQTQTNSPRRARSVASQSIIAYTMSLGAENSVAYSNNSIAIPTNFTISVTTEILPVSMTKTSVDCTMYICGDSTECSNLLLQYGSFCTQLNRALTGIAVEQDKNTQEVFAQVKQIYKTPPIKDFGGFNFSQILPDPSKPSKRSFIEDLLFNKVTLADAGFIKQYGDCLGDIAARDLICAQKFNGLTVLPPLLTDEMIAQYTSALLAGTITSGWTFGAGAALQIPFAMQMAYRFNGIGVTQNVLYENQKLIANQFNSAIGKIQDSLSSTASALGKLQDVVNQNAQALNTLVKQLSSNFGAISSVLNDILSRLDPPEAEVQIDRLITGRLQSLQTYVTQQLIRAAEIRASANLAATKMSECVLGQSKRVDFCGKGYQLMSFPQSAPHGVVFLNVTYVPAQEKNFTTAPAICNDGKAHFPREGVFVSNGTNWFVTQRNFYEPQIITTDNTFVSGNCDVLIGIVNNTVYDPLQPELDSFKEELDKYFKNHTSPDVDLGDISGINASVVNIQKEIDRLNEVAKNLNESLIDLQELGKYEQYIKWPWYIWLGFIAGLIAIVMVTIMLCCMTSCCSCLKGCCSCGSCCKFDEDDSGPVLKGVKLHYT

SEQ ID NO: 547 - protein, 1273 aa, Artificial Sequence
  SARS-CoV-2/Shenzhen/SZTH-004/2020__EPI_ISL_406595 spike protein (1-1273)(K986P_V987P_ H1048Q_H1064N_ H1083N_H1101N)
MFVFLVLLPLVSSQCVNLTTRTQLPPAYTNSFTRGVYYPDKVFRSSVLHSTQDLFLPFFSNVTWFHAIHVSGTNGTKRFDNPVLPFNDGVYFASTEKSNIIRGWIFGTTLDSKTQSLLIVNNATNVVIKVCEFQFCNDPFLGVYYHKNNKSWMESEFRVYSSANNCTFEYVSQPFLMDLEGKQGNFKNLREFVFKNIDGYFKIYSKHTPINLVRDLPQGFSALEPLVDLPIGINITRFQTLLALHRSYLTPGDSSSGWTAGAAAYYVGYLQPRTFLLKYNENGTITDAVDCALDPLSETKCTLKSFTVEKGIYQTSNFRVQPTESIVRFPNITNLCPFGEVFNATRFASVYAWDRKRISNCVAYYSVLYNSASFSTFKCYGVSPTKLNDLCFTNVYADSFVIRGDEVRQIAPGQTGKIADYNYKLPDDFTGCVIAWNSNNLDSKVGGNYNYLYRLFRKSNLKPFERDISTEIYQAGSTPCNGVEGFNCYFPLQSYGFQPTNGVGYQPYRVVVLSFELLHAPATVCGPKKSTNLVKNKCVNFNFNGLTGTGVLTESNKKFLPFQQFGRDIADTTDAVRDPQTLEILDITPCSFGGVSVITPGTNTSNQVAVLYQDVNCTEVPVAIHADQLTPTWRVYSTGSNVFQTRAGCLIGAEHVNNSYECDIPIGAGICASYQTQTNSPRRARSVASQSIIAYTMSLGAENSVAYSNNSIAIPTNFTISVTTEILPVSMTKTSVDCTMYICGDSTECSNLLLQYGSFCTQLNRALTGIAVEQDKNTQEVFAQVKQIYKTPPIKDFGGFNFSQILPDPSKPSKRSFIEDLLFNKVTLADAGFIKQYGDCLGDIAARDLICAQKFNGLTVLPPLLTDEMIAQYTSALLAGTITSGWTFGAGAALQIPFAMQMAYRFNGIGVTQNVLYENQKLIANQFNSAIGKIQDSLSSTASALGKLQDVVNQNAQALNTLVKQLSSNFGAISSVLNDILSRLDPPEAEVQIDRLITGRLQSLQTYVTQQLIRAAEIRASANLAATKMSECVLGQSKRVDFCGKGYQLMSFPQSAPHGVVFLNVTYVPAQEKNFTTAPAICNDGKAHFPREGVFVSNGTNWFVTQRNFYEPQIITTDNTFVSGNCDVVIGIVNNTVYDPLQPELDSFKEELDKYFKNHTSPDVDLGDISGINASVVNIQKEIDRLNEVAKNLNESLIDLQELGKYEQYIKWPWYIWLGFIAGLIAIVMVTIMLCCMTSCCSCLKGCCSCGSCCKFDEDDSEPVLKGVKLHYT

SEQ ID NO: 548 - protein, 1273 aa, Artificial Sequence
  SARS-CoV-2/France/IDF0372/2020__EPI_ISL_406596 spike protein (1-1273)(K986P_V987P_ H1048Q_H1064N_ H1083N_H1101N)
MFVFLVLLPLVSSQCVNLTTRTQLPPAYTNSFTRGVYYPDKVFRSSVLHSTQDLFLPFFSNVTWFHAIHVSGTNGTKRFDNPVLPFNDGVYFASTEKSNIIRGWIFGTTLDSKTQSLLIVNNATNVVIKVCEFQFCNDPFLGVYYHKNNKSWMESEFRVYSSANNCTFEYVSQPFLMDLEGKQGNFKNLREFVFKNIDGYFKIYSKHTPINLVRDLPQGFSALEPLVDLPIGINITRFQTLLALHRSYLTPGDSSSGWTAGAAAYYVGYLQPRTFLLKYNENGTITDAVDCALDPLSETKCTLKSFTVEKGIYQTSNFRVQPTESIVRFPNITNLCPFGEVFNATRFASVYAWNRKRISNCVADYSFLYNSASFSTFKCYGVSPTKLNDLCFTNVYADSFVIRGDEVRQIAPGQTGKIADYNYKLPDDFTGCVIAWNSNNLDSKVGGNYNYLYRLFRKSNLKPFERDISTEIYQAGSTPCNGVEGFNCYFPLQSYGFQPTNGVGYQPYRVVVLSFELLHAPATVCGPKKSTNLVKNKCVNFNFNGLTGTGVLTESNKKFLPFQQFGRDIADTTDAVRDPQTLEILDITPCSFGGVSVITPGTNTSNQVAVLYQDVNCTEVPVAIHADQLTPTWRVYSTGSNVFQTRAGCLIGAEHVNNSYECDIPIGAGICASYQTQTNSPRRARSVASQSIIAYTMSLGAENSVAYSNNSIAIPTNFTISVTTEILPVSMTKTSVDCTMYICGDSTECSNLLLQYGSFCTQLNRALTGIAVEQDKNTQEVFAQVKQIYKTPPIKDFGGFNFSQILPDPSKPSKRSFIEDLLFNKVTLADAGFIKQYGDCLGDIAARDLICAQKFNGLTVLPPLLTDEMIAQYTSALLAGTITSGWTFGAGAALQIPFAMQMAYRFNGIGVTQNVLYENQKLIANQFNSAIGKIQDSLSSTASALGKLQDVVNQNAQALNTLVKQLSSNFGAISSVLNDILSRLDPPEAEVQIDRLITGRLQSLQTYVTQQLIRAAEIRASANLAATKMSECVLGQSKRVDFCGKGYQLMSFPQSAPHGVVFLNVTYVPAQEKNFTTAPAICNDGKAHFPREGVFVSNGTNWFVTQRNFYEPQIITTDNTFVSGNCDVVIGIVNNTVYDPLQPELDSFKEELDKYFKNHTSPDVDLGDISGINASVVNIQKEIDRLNEVAKNLNESLIDLQELGKYEQYIKWPWYIWLGFIAGLIAIVMVTIMLCCMTSCCSCLKGCCSCGSCCKFDEDDSEPVLKGVKLHYT

SEQ ID NO: 549 - protein, 1273 aa, Artificial Sequence
  SARS-CoV-2/Australia/VIC01/2020__EPI_ISL_406844 spike protein (1-1273)(K986P_V987P_ H1048Q_H1064N_ H1083N_H1101N)
MFVFLVLLPLVSSQCVNLTTRTQLPPAYTNSFTRGVYYPDKVFRSSVLHSTQDLFLPFFSNVTWFHAIHVSGTNGTKRFDNPVLPFNDGVYFASTEKSNIIRGWIFGTTLDSKTQSLLIVNNATNVVIKVCEFQFCNDPFLGVYYHKNNKSWMESEFRVYSSANNCTFEYVSQPFLMDLEGKQGNFKNLREFVFKNIDGYFKIYSKHTPINLVRDLPQGFSALEPLVDLPIGINITRFQTLLALHRRYLTPGDSSSGWTAGAAAYYVGYLQPRTFLLKYNENGTITDAVDCALDPLSETKCTLKSFTVEKGIYQTSNFRVQPTESIVRFPNITNLCPFGEVFNATRFASVYAWNRKRISNCVADYSVLYNSASFSTFKCYGVSPTKLNDLCFTNVYADSFVIRGDEVRQIAPGQTGKIADYNYKLPDDFTGCVIAWNSNNLDSKVGGNYNYLYRLFRKSNLKPFERDISTEIYQAGSTPCNGVEGFNCYFPLQSYGFQPTNGVGYQPYRVVVLSFELLHAPATVCGPKKSTNLVKNKCVNFNFNGLTGTGVLTESNKKFLPFQQFGRDIADTTDAVRDPQTLEILDITPCSFGGVSVITPGTNTSNQVAVLYQDVNCTEVPVAIHADQLTPTWRVYSTGSNVFQTRAGCLIGAEHVNNSYECDIPIGAGICASYQTQTNSPRRARSVASQSIIAYTMSLGAENSVAYSNNSIAIPTNFTISVTTEILPVSMTKTSVDCTMYICGDSTECSNLLLQYGSFCTQLNRALTGIAVEQDKNTQEVFAQVKQIYKTPPIKDFGGFNFSQILPDPSKPSKRSFIEDLLFNKVTLADAGFIKQYGDCLGDIAARDLICAQKFNGLTVLPPLLTDEMIAQYTSALLAGTITSGWTFGAGAALQIPFAMQMAYRFNGIGVTQNVLYENQKLIANQFNSAIGKIQDSLSSTASALGKLQDVVNQNAQALNTLVKQLSSNFGAISSVLNDILSRLDPPEAEVQIDRLITGRLQSLQTYVTQQLIRAAEIRASANLAATKMSECVLGQSKRVDFCGKGYQLMSFPQSAPHGVVFLNVTYVPAQEKNFTTAPAICNDGKAHFPREGVFVSNGTNWFVTQRNFYEPQIITTDNTFVSGNCDVVIGIVNNTVYDPLQPELDSFKEELDKYFKNHTSPDVDLGDISGINASVVNIQKEIDRLNEVAKNLNESLIDLQELGKYEQYIKWPWYIWLGFIAGLIAIVMVTIMLCCMTSCCSCLKGCCSCGSCCKFDEDDSEPVLKGVKLHYT

SEQ ID NO: 550 - protein, 1273 aa, Artificial Sequence
  SARS-CoV-2/Germany/BavPat1/2020__EPI_ISL_406862 spike protein (1-1273)(K986P_V987P_ H1048Q_H1064N_ H1083N_H1101N)
MFVFLVLLPLVSSQCVNLTTRTQLPPAYTNSFTRGVYYPDKVFRSSVLHSTQDLFLPFFSNVTWFHAIHVSGTNGTKRFDNPVLPFNDGVYFASTEKSNIIRGWIFGTTLDSKTQSLLIVNNATNVVIKVCEFQFCNDPFLGVYYHKNNKSWMESEFRVYSSANNCTFEYVSQPFLMDLEGKQGNFKNLREFVFKNIDGYFKIYSKHTPINLVRDLPQGFSALEPLVDLPIGINITRFQTLLALHRSYLTPGDSSSGWTAGAAAYYVGYLQPRTFLLKYNENGTITDAVDCALDPLSETKCTLKSFTVEKGIYQTSNFRVQPTESIVRFPNITNLCPFGEVFNATRFASVYAWNRKRISNCVADYSVLYNSASFSTFKCYGVSPTKLNDLCFTNVYADSFVIRGDEVRQIAPGQTGKIADYNYKLPDDFTGCVIAWNSNNLDSKVGGNYNYLYRLFRKSNLKPFERDISTEIYQAGSTPCNGVEGFNCYFPLQSYGFQPTNGVGYQPYRVVVLSFELLHAPATVCGPKKSTNLVKNKCVNFNFNGLTGTGVLTESNKKFLPFQQFGRDIADTTDAVRDPQTLEILDITPCSFGGVSVITPGTNTSNQVAVLYQGVNCTEVPVAIHADQLTPTWRVYSTGSNVFQTRAGCLIGAEHVNNSYECDIPIGAGICASYQTQTNSPRRARSVASQSIIAYTMSLGAENSVAYSNNSIAIPTNFTISVTTEILPVSMTKTSVDCTMYICGDSTECSNLLLQYGSFCTQLNRALTGIAVEQDKNTQEVFAQVKQIYKTPPIKDFGGFNFSQILPDPSKPSKRSFIEDLLFNKVTLADAGFIKQYGDCLGDIAARDLICAQKFNGLTVLPPLLTDEMIAQYTSALLAGTITSGWTFGAGAALQIPFAMQMAYRFNGIGVTQNVLYENQKLIANQFNSAIGKIQDSLSSTASALGKLQDVVNQNAQALNTLVKQLSSNFGAISSVLNDILSRLDPPEAEVQIDRLITGRLQSLQTYVTQQLIRAAEIRASANLAATKMSECVLGQSKRVDFCGKGYQLMSFPQSAPHGVVFLNVTYVPAQEKNFTTAPAICNDGKAHFPREGVFVSNGTNWFVTQRNFYEPQIITTDNTFVSGNCDVVIGIVNNTVYDPLQPELDSFKEELDKYFKNHTSPDVDLGDISGINASVVNIQKEIDRLNEVAKNLNESLIDLQELGKYEQYIKWPWYIWLGFIAGLIAIVMVTIMLCCMTSCCSCLKGCCSCGSCCKFDEDDSEPVLKGVKLHYT

SEQ ID NO: 551 - protein, 1273 aa, Artificial Sequence
  SARS-CoV-2/Wuhan/HBCDC-HB-02/2020__EPI_ISL_412978 spike protein (1-1273)(K986P_V987P_ H1048Q_H1064N_ H1083N_H1101N)
MFVFLVLLPLVSSQCVNLTTRTQLPPAYTNSFTRGVYYPDKVFRSSVLHSTQDLFLPFFSNVTWFHAIHVSGTNGTKRFDNPVLPFNDGVYFASTEKSNIIRGWIFGTTLDSKTQSLLIVNNATNVVIKVCEFQFCNDPFLGVYYHKNNKSWMESEFRVYSSANNCTFEYVSQPFLMDLEGKQGNFKNLREFVFKNIDGYFKIYSKHTPINLVRDLPQGFSALEPLVDLPIGINITRFQTLLALHRSYLTPGDSSSGWTAGAAAYYVGYLQPRTFLLKYNENGTITDAVDCALDPLSETKCTLKSFTVEKGIYQTSNFRVQPTESIVRFPNITNLCPFGEVFNATRFASVYAWNRKRISNCVADYSVLYNSASFSTFKCYGVSPTKLNDLCFTNVYADSFVIRGDEVRQIAPGQTGKIADYNYKLPDDFTGCVIAWNSNNLDSKVGGNYNYLYRLFRKSNLKPFERDISTEIYQAGSTPCNGVEGFNCYFPLQSYGFQPTNGVGYQPYRVVVLSFELLHAPATVCGPKKSTNLVKNKCVNFNFNGLTGTGVLTESNKKFLPFQQFGRDIADTTDAVRDPQTLEILDITPCSFGGVSVITPGTNTSNQVAVLYQDVNCTEVPVAIHADQLTPTWRVYSTGSNVFQTRAGCLIGAEHVNNSYECDIPIGAGICASYQTQTNSPRRARSVASQSIIAYTMSLGAENSVAYSNNSIAIPTNFTISVTTEILPVSMTKTSVDCTMYICGDSTECSNFLLQYGSFCTQLNRALTGIAVEQDKNTQEVFAQVKQIYKTPPIKDFGGFNFSQILPDPSKPSKRSFIEDLLFNKVTLADAGFIKQYGDCLGDIAARDLICAQKFNGLTVLPPLLTDEMIAQYTSALLAGTITSGWTFGAGAALQIPFAMQMAYRFNGIGVTQNVLYENQKLIANQFNSAIGKIQDSLSSTASALGKLQDVVNQNAQALNTLVKQLSSNFGAISSVLNDILSRLDPPEAEVQIDRLITGRLQSLQTYVTQQLIRAAEIRASANLAATKMSECVLGQSKRVDFCGKGYQLMSFPQSAPHGVVFLNVTYVPAQEKNFTTAPAICNDGKAHFPREGVFVSNGTNWFVTQRNFYEPQIITTDNTFVSGNCDVVIGIVNNTVYDPLQPELDSFKEELDKYFKNHTSPDVDLGDISGINASVVNIQKEIDRLNEVAKNLNESLIDLQELGKYEQYIKWPWYIWLGFIAGLIAIVMVTIMLCCMTSCCSCLKGCCSCGSCCKFDEDDSEPVLKGVKLHYT

SEQ ID NO: 552 - protein, 1273 aa, Artificial Sequence
  SARS-CoV-2/Australia/QLD02/2020__EPI_ISL_407896 spike protein (1-1273)(K986P_V987P_ H1048Q_H1064N_ H1083N_H1101N)
MFVFLVLLPLVSSQCVNLTTRTQLPPAYTNSFTRGVYYPDKVFRSSVLHSTQDLFLPFFSNVTWFHAIHVSGTNGTKRFDNPVLPFNDGVYFASTEKSNIIRGWIFGTTLDSKTQSLLIVNNATNVVIKVCEFQFCNDPFLGVYYHKNNKSWMESEFRVYSSANNCTFEYVSQPFLMDLEGKQGNFKNLREFVFKNIDGYFKIYSKHTPINLVRDLPQGFSALEPLVDLPIGINITRFQTLLALHRSYLTPGDSSSGWTAGAAAYYVGYLQPRTFLLKYNENGTITDAVDCALDPLSETKCTLKSFTVEKGIYQTSNFRVQPTESIVRFPNITNLCPFGEVFNATRFASVYAWNRKRISNCVADYSVLYNSASFSTFKCYGVSPTKLNDLCFTNVYADSFVIRGDEVRQIAPGQTGKIADYNYKLPDDFTGCVIAWNSNNLDSKVGGNYNYLYRLFRKSNLKPFERDISTEIYQAGSTPCNGVEGFNCYFPLQSYGFQPTNGVGYQPYRVVVLSFELLHAPATVCGPKKSTNLVKNKCVNFNFNGLTGTGVLTESNKKFLPFQQFGRDIADTTDAVRDPQTLEILDITPCSFGGVSVITPGTNTSNQVAVLYQDVNCTEVPVAIHADQLTPTWRVYSTGSNVFQTRAGCLIGAEHVNNSYECDIPIGAGICASYQTQTNSPRRARSVASQSIIAYTMSLGAENSVAYSNNSIAIPTNFTISVTTEILPVSMTKTSVDCTMYICGDSTECSNLLLQYGSFCTQLNRALTGIAVEQDKNTQEVFAQVKQIYKTPPIKDFGGFNFSQILPDPSKPSKRSFIEDLLFNKVTLADAGFIKQYGDCLGDIAARDLICAQKFNGLTVLPPLLTDEMIAQYTSALLAGTITSGWTFGAGAALQIPFAMQMAYRFNGIGVTQNVLYENQKLIANQFNSAIGKIQDSLSSTASALGKLQDVVNQNAQALNTLVKQLSSNFGAISSVLNDILSRLDPPEAEVQIDRLITGRLQSLQTYVTQQLIRAAEIRASANLAATKMSECVLGQSKRVDFCGKGYQLMSFPQSAPHGVVFLNVTYVPAQEKNFTTAPAICNDGKAHFPREGVFVSNGTNWFVTQRNFYEPQIITTDNTFVSGNCDVVIGIVNNTVYDPLQLELDSFKEELDKYFKNHTSPDVDLGDISGINASVVNIQKEIDRLNEVAKNLNESLIDLQELGKYEQYIKWPWYIWLGFIAGLIAIVMVTIMLCCMTSCCSCLKGCCSCGSCCKFDEDDSEPVLKGVKLHYT

SEQ ID NO: 553 - protein, 1273 aa, Artificial Sequence
  SARS-CoV-2/India/1-31/2020__EPI_ISL_413523 spike protein (1-1273)(K986P_V987P_ H1048Q_H1064N_ H1083N_H1101N)
MFVFLVLLPLVSSQCVNLTTRTQLPPAYTNSFTRGVYYPDKVFRSSVLHSTQDLFLPFFSNVTWFHAIHVSGTNGTKRFDNPVLPFNDGVYFASTEKSNIIRGWIFGTTLDSKTQSLLIVNNATNVVIKVCEFQFCNDPFLGVYYHKNNKSWMESEFRVYSSANNCTFEYVSQPFLMDLEGKQGNFKNLREFVFKNIDGYFKIYSKHTPINLVRDLPQGFSALEPLVDLPIGINITRFQTLLALHRSYLTPGDSSSGWTAGAAAYYVGYLQPRTFLLKYNENGTITDAVDCALDPLSETKCTLKSFTVEKGIYQTSNFRVQPTESIVRFPNITNLCPFGEVFNATRFASVYAWNRKRISNCVADYSVLYNSASFSTFKCYGVSPTKLNDLCFTNVYADSFVIRGDEVRQIAPGQTGKIADYNYKLPDDFTGCVIAWNSNNLDSKVGGNYNYLYRLFRKSNLKPFERDISTEIYQAGSTPCNGVEGFNCYFPLQSYGFQPTNGVGYQPYRVVVLSFELLHAPATVCGPKKSTNLVKNKCVNFNFNGLTGTGVLTESNKKFLPFQQFGRDIADTTDAVRDPQTLEILDITPCSFGGVSVITPGTNTSNQVAVLYQDVNCTEVPVAIHADQLTPTWRVYSTGSNVFQTRAGCLIGAEHVNNSYECDIPIGAGICASYQTQTNSPRRARSVASQSIIAYTMSLGAENSVAYSNNSIAIPTNFTISVTTEILPVSMTKTSVDCTMYICGDSTECSNLLLQYGSFCTQLNRALTGIAVEQDKNTQEVFAQVKQIYKTPPIKDFGGFNFSQILPDPSKPSKRSFIEDLLFNKVTLADAGFIKQYGDCLGDIAARDLICAQKFNGLTVLPPLLTDEMIAQYTSALLAGTITSGWTFGAGAALQIPFAMQMAYRFNGIGVTQNVLYENQKLIANQFNSVIGKIQDSLSSTASALGKLQDVVNQNAQALNTLVKQLSSNFGAISSVLNDILSRLDPPEAEVQIDRLITGRLQSLQTYVTQQLIRAAEIRASANLAATKMSECVLGQSKRVDFCGKGYQLMSFPQSAPHGVVFLNVTYVPAQEKNFTTAPAICNDGKAHFPREGVFVSNGTNWFVTQRNFYEPQIITTDNTFVSGNCDVVIGIVNNTVYDPLQPELDSFKEELDKYFKNHTSPDVDLGDISGINASVVNIQKEIDRLNEVAKNLNESLIDLQELGKYEQYIKWPWYIWLGFIAGLIAIVMVTIMLCCMTSCCSCLKGCCSCGSCCKFDEDDSEPVLKGVKLHYT

SEQ ID NO: 554 - protein, 1273 aa, Artificial Sequence
  SARS-CoV-2/Guangdong/GD2020087-P0008/2020__EPI_ISL_413863 spike protein (1-1273)(K986P_V987P_ H1048Q_H1064N_ H1083N_H1101N)
MFVFLVLLPLVSSQCVNLTTRTQLPPAYTNSFTRGVYYPDKVFRSSVLHSTQDLFLPFFSNVTWFHAIHVSGTNGTKRFDNPVLPFNDGVYFASTEKSNIIRGWIFGTTLDSKTQSLLIVNNATNVVIKVCEFQFCNDPFLGVYYHKNNKSWMESEFRVYSSANNCTFEYVSQPFLMDLEGKQGNFKNLREFVFKNIDGYFKIYSKHTPINLVRDLPQGFSALEPLVDLPIGINITRFQTLLALHRSYLTPGDSSSGWTAGAAAYYVGYLQPRTFLLKYNENGTITDAVDCALDPLSETKCTLKSFTVEKGIYQTSNFRVQPTESIVRFPNITNLCPFGEVFNATRFASVYAWNRKRISNCVADYSVLYNSASFSTFKCYGVSPTKLNDLCFTNVYADSFVIRGDEVREIAPGQTGKIADYNYKLPDDFTGCVIAWNSNNLDSKVGGNYNYLYRLFRKSNLKPFERDISTEIYQAGSTPCNGVEGFNCYFPLQSYGFQPTNGVGYQPYRVVVLSFELLHAPATVCGPKKSTNLVKNKCVNFNFNGLTGTGVLTESNKKFLPFQQFGRDIADTTDAVRDPQTLEILDITPCSFGGVSVITPGTNTSNQVAVLYQDVNCTEVPVAIHADQLTPTWRVYSTGSNVFQTRAGCLIGAEHVNNSYECDIPIGAGICASYQTQTNSPRRARSVASQSIIAYTMSLGAENSVAYSNNSIAIPTNFTISVTTEILPVSMTKTSVDCTMYICGDSTECSNLLLQYGSFCTQLNRALTGIAVEQDKNTQEVFAQVKQIYKTPPIKDFGGFNFSQILPDPSKPSKRSFIEDLLFNKVTLADAGFIKQYGDCLGDIAARDLICAQKFNGLTVLPPLLTDEMIAQYTSALLAGTITSGWTFGAGAALQIPFAMQMAYRFNGIGVTQNVLYENQKLIANQFNSAIGKIQDSLSSTASALGKLQDVVNQNAQALNTLVKQLSSNFGAISSVLNDILSRLDPPEAEVQIDRLITGRLQSLQTYVTQQLIRAAEIRASANLAATKMSECVLGQSKRVDFCGKGYQLMSFPQSAPHGVVFLNVTYVPAQEKNFTTAPAICNDGKAHFPREGVFVSNGTNWFVTQRNFYEPQIITTDNTFVSGNCDVVIGIVNNTVYDPLQPELDSFKEELDKYFKNHTSPDVDLGDISGINASVVNIQKEIDRLNEVAKNLNESLIDLQELGKYEQYIKWPWYIWLGFIAGLIAIVMVTIMLCCMTSCCSCLKGCCSCGSCCKFDEDDSEPVLKGVKLHYT

SEQ ID NO: 555 - protein, 1273 aa, Artificial Sequence
  SARS-CoV-2/Sweden/01/2020__EPI_ISL_411951 spike protein (1-1273)(K986P_V987P_ H1048Q_H1064N_ H1083N_H1101N)
MFVFLVLLPLVSSQCVNLTTRTQLPPAYTNSFTRGVYYPDKVFRSSVLHSTQDLFLPFFSNVTWFHAIHVSGTNGTKRFDNPVLPFNDGVYFASTEKSNIIRGWIFGTTLDSKTQSLLIVNNATNVVIKVCEFQFCNDPFLGVYYHKNNKSWMESEFRVYSSANNCTFEYVSQPFLMDLEGKQGNFKNLREFVFKNIDGYFKIYSKHTPINLVRDLPQGFSALEPLVDLPIGINITRFQTLLALHRSYLTPGDSSSGWTAGAAAYYVGYLQPRTFLLKYNENGTITDAVDCALDPLSETKCTLKSFTVEKGIYQTSNFRVQPTESIVRFPNITNLCPFGEVFNATRFASVYAWNRKRISNCVADYSVLYNSASFSTFKCYGVSPTKLNDLCFTNVYADSFVIRGDEVRQIAPGQTGKIADYNYKLPDDFTGCVIAWNSNNLDSKVGGNYNYLYRLFRKSNLKPFERDISTEIYQAGSTPCNGVEGFNCYFPLQSYGFQPTNGVGYQPYRVVVLSFELLHAPATVCGPKKSTNLVKNKCVNFNFNGLTGTGVLTESNKKFLPFQQFGRDIADTTDAVRDPQTLEILDITPCSFGGVSVITPGTNTSNQVAVLYQDVNCTEVPVAIHADQLTPTWRVYSTGSNVFQTRAGCLIGAEHVNNSYECDIPIGAGICASYQTQTNSPRRARSVASQSIIAYTMSLGAENSVAYSNNSIAIPTNFTISVTTEILPVSMTKTSVDCTMYICGDSTECSNLLLQYGSFCTQLNRALTGIAVEQDKNTQEVFAQVKQIYKTPPIKDCGGFNFSQILPDPSKPSKRSFIEDLLFNKVTLADAGFIKQYGDCLGDIAARDLICAQKFNGLTVLPPLLTDEMIAQYTSALLAGTITSGWTFGAGAALQIPFAMQMAYRFNGIGVTQNVLYENQKLIANQFNSAIGKIQDSLSSTASALGKLQDVVNQNAQALNTLVKQLSSNFGAISSVLNDILSRLDPPEAEVQIDRLITGRLQSLQTYVTQQLIRAAEIRASANLAATKMSECVLGQSKRVDFCGKGYQLMSFPQSAPHGVVFLNVTYVPAQEKNFTTAPAICNDGKAHFPREGVFVSNGTNWFVTQRNFYEPQIITTDNTFVSGNCDVVIGIVNNTVYDPLQPELDSFKEELDKYFKNHTSPDVDLGDISGINASVVNIQKEIDRLNEVAKNLNESLIDLQELGKYEQYIKWPWYIWLGFIAGLIAIVMVTIMLCCMTSCCSCLKGCCSCGSCCKFDEDDSEPVLKGVKLHYT

SEQ ID NO: 556 - protein, 1273 aa, Artificial Sequence
  SARS-CoV-2/Tianmen/HBCDC-HB-07/2020__EPI_ISL_412983 spike protein (1-1273)(K986P_V987P_ H1048Q_H1064N_ H1083N_H1101N)
MFVFLVLLPLVSSQCVNLTTRTQLPPAYTNSFTRGVYYPDKVFRSSVLHSTQDLFLPFFSNVTWFHAIHVSGTNGTKRFDNPVLPFNDGVYFASTEKSNIIRGWIFGTTLDSKTQSLLIVNNATNVVIKVCEFQFCNDPFLGVYYHKNNKSWMESEFRVYSSANNCTFEYVSQPFLMDLEGKQGNFKNLREFVFKNIDGYFKIYSKHTPINLVRDLPQGFSALEPLVDLPIGINITRFQTLLALHRSYLTPGDSSSGWTAGAAAYYVGYLQPRTFLLKYNENGTITDAVDCALDPLSETKCTLKSFTVEKGIYQTSNFRVQPTESIVRFPNITNLCPFGEVFNATRFASVYAWNRKRISNCVADYSVLYNSASFSTFKCYGVSPTKLNDLCFTNVYADSFVIRGDEVRQIAPGQTGKIADYNYKLPDDFTGCVIAWNSNNLDSKVGGNYNYLYRLFRKSNLKPFERDISTEIYQAGSTPCNGVEGFNCYFPLQSYGFQPTNGVGYQPYRVVVLSFELLHAPATVCGPKKSTNLVKNKCVNFNFNGLTGTGVLTESNKKFLPFQQFGRDIADTTDAVRDPQTLEILDITPCSFGGVSVITPGTNTSNQVAVLYQDLNCTEVPVAIHADQLTPTWRVYSTGSNVFQTRAGCLIGAEHVNNSYECDIPIGAGICASYQTQTNSPRRARSVASQSIIAYTMSLGAENSVAYSNNSIAIPTNFTISVTTEILPVSMTKTSVDCTMYICGDSTECSNLLLQYGSFCTQLNRALTGIAVEQDKNTQEVFAQVKQIYKTPPIKDFGGFNFSQILPDPSKPSKRSFIEDLLFNKVTLADAGFIKQYGDCLGDIAARDLICAQKFNGLTVLPPLLTDEMIAQYTSALLAGTITSGWTFGAGAALQIPFAMQMAYRFNGIGVTQNVLYENQKLIANQFNSAIGKIQDSLSSTASALGKLQDVVNQNAQALNTLVKQLSSNFGAISSVLNDILSRLDPPEAEVQIDRLITGRLQSLQTYVTQQLIRAAEIRASANLAATKMSECVLGQSKRVDFCGKGYQLMSFPQSAPHGVVFLNVTYVPAQEKNFTTAPAICNDGKAHFPREGVFVSNGTNWFVTQRNFYEPQIITTDNTFVSGNCDVVIGIVNNTVYDPLQPELDSFKEELDKYFKNHTSPDVDLGDISGINASVVNIQKEIDRLNEVAKNLNESLIDLQELGKYEQYIKWPWYIWLGFIAGLIAIVMVTIMLCCMTSCCSCLKGCCSCGSCCKFDEDDSEPVLKGVKLHYT

SEQ ID NO: 557 - protein, 1273 aa, Artificial Sequence
  SARS-CoV-2/Hong Kong/case42_VM20002493/2020__EPI_ISL_414527 spike protein (1-1273)(K986P_V987P_ H1048Q_H1064N_ H1083N_H1101N)
MFVFLVLLPLVSSQCVNLTTRTQLPPAYTNSFTRGVYYPDKVFRSSVLHSTQDLFLPFFSNVTWFHAIHVSGTNGTKRFDNPVLPFNDGVYFASTEKSNIIRGWIFGTTLDSKTQSLLIVNNATNVVIKVCEFQFCNDPFLGVYYHKNNKSWMESEFRVYSSANNCTFEYVSQPFLMDLEGKQGNFKNLREFVFKNIDGYFKIYSKHTPINLVRDLPQGFSALEPLVDLPIGINITRFQTLLALHRSYLTPGDSSSGWTAGAAAYYVGYLQPRTFLLKYNENGTITDAVDCALDPLSETKCTLKSFTVEKGIYQTSNFRVQPTESIVRFPNITNLCPFGEVFNATRFASVYAWNRKRISNCVADYSVLYNSASFSTFKCYGVSPTKLNDLCFTNVYADSFVIRGDEVRQIAPGQTGKIADYNYKLPDDFTGCVIAWNSNNLDSKVGGNYNYLYRLFRKSNLKPFERDISTEIYQAGSTPCNGVEGFNCYFPLQSYGFQPTNGVGYQPYRVVVLSFELLHAPATVCGPKKSTNLVKNKCVNFNFNGLTGTGVLTESNKKFLPFQQFGRDIADTTDAVRDPQTLEILDITPCSFGGVSVITPGTNTSNQVAVLYQDVNCTEVPVAIHADQLTPTWRVYSTGSNVFQTRAGCLIGAEHVNNSYECDIPIGAGICASYQTQTNSPRRARSVASQSIIAYTMSLGAENSVAYSNNSIAIPTNFAISVTTEILPVSMTKTSVDCTMYICGDSTECSNLLLQYGSFCTQLNRALTGIAVEQDKNTQEVFAQVKQIYKTPPIKDFGGFNFSQILPDPSKPSKRSFIEDLLFNKVTLADAGFIKQYGDCLGDIAARDLICAQKFNGLTVLPPLLTDEMIAQYTSALLAGTITSGWTFGAGAALQIPFAMQMAYRFNGIGVTQNVLYENQKLIANQFNSAIGKIQDSLSSTASALGKLQDVVNQNAQALNTLVKQLSSNFGAISSVLNDILSRLDPPEAEVQIDRLITGRLQSLQTYVTQQLIRAAEIRASANLAATKMSECVLGQSKRVDFCGKGYQLMSFPQSAPHGVVFLNVTYVPAQEKNFTTAPAICNDGKAHFPREGVFVSNGTNWFVTQRNFYEPQIITTDNTFVSGNCDVVIGIVNNTVYDPLQPELDSFKEELDKYFKNHTSPDVDLGDISGINASVVNIQKEIDRLNEVAKNLNESLIDLQELGKYEQYIKWPWYIWLGFIAGLIAIVMVTIMLCCMTSCCSCLKGCCSCGSCCKFDEDDSEPVLKGVKLHYT

SEQ ID NO: 558 - protein, 1273 aa, Artificial Sequence
  SARS-CoV-2/USA/CruiseA-23/2020__EPI_ISL_414482 spike protein (1-1273)(K986P_V987P_ H1048Q_H1064N_ H1083N_H1101N)
MFVFLVLLPLVSSQCVNLTTRTQLPPAYTNSFTRGVYYPDKVFRSSVLHSTQDLFLPFFSNVTWFHAIHVSGTNGTKRFDNPVLPFNDGVYFASTEKSNIIRGWIFGTTLDSKTQSLLIVNNATNVVIKVCEFQFCNDPFLGVYYHKNNKSWMESEFRVYSSANNCTFEYVSQPFLMDLEVKQGNFKNLREFVFKNIDGYFKIYSKHTPINLVRDLPQGFSALEPLVDLPIGINITRFQTLLALHRSYLTPGDSSSGWTAGAAAYYVGYLQPRTFLLKYNENGTITDAVDCALDPLSETKCTLKSFTVEKGIYQTSNFRVQPTESIVRFPNITNLCPFGEVFNATRFASVYAWNRKRISNCVADYSVLYNSASFSTFKCYGVSPTKLNDLCFTNVYADSFVIRGDEVRQIAPGQTGKIADYNYKLPDDFTGCVIAWNSNNLDSKVGGNYNYLYRLFRKSNLKPFERDISTEIYQAGSTPCNGVEGFNCYFPLQSYGFQPTNGVGYQPYRVVVLSFELLHAPATVCGPKKSTNLVKNKCVNFNFNGLTGTGVLTESNKKFLPFQQFGRDIADTTDAVRDPQTLEILDITPCSFGGVSVITPGTNTSNQVAVLYQDVNCTEVPVAIHADQLTPTWRVYSTGSNVFQTRAGCLIGAEHVNNSYECDIPIGAGICASYQTQTNSPRRARSVASQSIIAYTMSLGAENSVAYSNNSIAIPTNFTISVTTEILPVSMTKTSVDCTMYICGDSTECSNLLLQYGSFCTQLNRALTGIAVEQDKNTQEVFAQVKQIYKTPPIKDFGGFNFSQILPDPSKPSKRSFIEDLLFNKVTLADAGFIKQYGDCLGDIAARDLICAQKFNGLTVLPPLLTDEMIAQYTSALLAGTITSGWTFGAGAALQIPFAMQMAYRFNGIGVTQNVLYENQKLIANQFNSAIGKIQDSLSSTASALGKLQDVVNQNAQALNTLVKQLSSNFGAISSVLNDILSRLDPPEAEVQIDRLITGRLQSLQTYVTQQLIRAAEIRASANLAATKMSECVLGQSKRVDFCGKGYQLMSFPQSAPHGVVFLNVTYVPAQEKNFTTAPAICNDGKAHFPREGVFVSNGTNWFVTQRNFYEPQIITTDNTFVSGNCDVVIGIVNNTVYDPLQPELDSFKEELDKYFKNHTSPDVDLGDISGINASVVNIQKEIDRLNEVAKNLNESLIDLQELGKYEQYIKWPWYIWLGFIAGLIAIVMVTIMLCCMTSCCSCLKGCCSCGSCCKFDEDDSEPVLKGVKLHYT

SEQ ID NO: 559 - protein, 1273 aa, Artificial Sequence
  SARS-CoV-2/Hong Kong/case85_VM20002868/2020__EPI_ISL_414519 spike protein (1-1273)(K986P_V987P_ H1048Q_H1064N_ H1083N_H1101N)
MFVFLVLVPLVSSQCVNLTTRTQLPPAYTNSFTRGVYYPDKVFRSSVLHSTQDLFLPFFSNVTWFHAIHVSGTNGTKRFDNPVLPFNDGVYFASTEKSNIIRGWIFGTTLDSKTQSLLIVNNATNVVIKVCEFQFCNDPFLGVYYHKNNKSWMESEFRVYSSANNCTFEYVSQPFLMDLEGKQGNFKNLREFVFKNIDGYFKIYSKHTPINLVRDLPQGFSALEPLVDLPIGINITRFQTLLALHRSYLTPGDSSSGWTAGAAAYYVGYLQPRTFLLKYNENGTITDAVDCALDPLSETKCTLKSFTVEKGIYQTSNFRVQPTESIVRFPNITNLCPFGEVFNATRFASVYAWNRKRISNCVADYSVLYNSASFSTFKCYGVSPTKLNDLCFTNVYADSFVIRGDEVRQIAPGQTGKIADYNYKLPDDFTGCVIAWNSNNLDSKVGGNYNYLYRLFRKSNLKPFERDISTEIYQAGSTPCNGVEGFNCYFPLQSYGFQPTNGVGYQPYRVVVLSFELLHAPATVCGPKKSTNLVKNKCVNFNFNGLTGTGVLTESNKKFLPFQQFGRDIADTTDAVRDPQTLEILDITPCSFGGVSVITPGTNTSNQVAVLYQDVNCTEVPVAIHADQLTPTWRVYSTGSNVFQTRAGCLIGAEHVNNSYECDIPIGAGICASYQTQTNSPRRARSVASQSIIAYTMSLGAENSVAYSNNSIAIPTNFTISVTTEILPVSMTKTSVDCTMYICGDSTECSNLLLQYGSFCTQLNRALTGIAVEQDKNTQEVFAQVKQIYKTPPIKDFGGFNFSQILPDPSKPSKRSFIEDLLFNKVTLADAGFIKQYGDCLGDIAARDLICAQKFNGLTVLPPLLTDEMIAQYTSALLAGTITSGWTFGAGAALQIPFAMQMAYRFNGIGVTQNVLYENQKLIANQFNSAIGKIQDSLSSTASALGKLQDVVNQNAQALNTLVKQLSSNFGAISSVLNDILSRLDPPEAEVQIDRLITGRLQSLQTYVTQQLIRAAEIRASANLAATKMSECVLGQSKRVDFCGKGYQLMSFPQSAPHGVVFLNVTYVPAQEKNFTTAPAICNDGKAHFPREGVFVSNGTNWFVTQRNFYEPQIITTDNTFVSGNCDVVIGIVNNTVYDPLQPELDSFKEELDKYFKNHTSPDVDLGDISGINASVVNIQKEIDRLNEVAKNLNESLIDLQELGKYEQYIKWPWYIWLGFIAGLIAIVMVTIMLCCMTSCCSCLKGCCSCGSCCKFDEDDSEPVLKGVKLHYT

SEQ ID NO: 560 - protein, 1273 aa, Artificial Sequence
  SARS-CoV-2/England/200990660/2020__EPI_ISL_414523 spike protein (1-1273)(K986P_V987P_ H1048Q_H1064N_ H1083N_H1101N)
MFVFLVLLPLVSSQCVNLTTRTQLPPAYTNSFTRGVYYPDKVFRSSVLHSTQDLFLPFFSNVTWFHAIHVSGTNGTKRFDNPVLPFNDGVYFASTEKSNIIRGWIFGTTLDSKTQSLLIVNNATNVVIKVCEFQFCNDPFLGVYYHKNNKSWMESEFRVYSSANNCTFEYVSQPFLMDLEGKQGNFKNLREFVFKNIDGYFKIYSKHTPINLVRDLPQGFSALEPLVDLPIGINITRFQTLLALHRSYLTPGDSSSGWTAGAAAYYVGYLQPRTFLLKYNENGTITDAVDCALDPLSETKCTLKSFTVEKGIYQTSNFRVQPTESIVRFPNITNLCPFGEVFNATRFASVYAWNRKRISNCVADYSVLYNSASFSTFKCYGVSPTKLNDLCFTNVYADSFVIRGDEVRQIAPGQTGKIADYNYKLPDDFTGCVIAWNSNNLDSKVGGNYNYLYRLFRKSNLKPFERDISTEIYQAGSTPCNGVEGFNCYFPLQSYGFQPTNGVGYQPYRVVVLSFELLHAPATVCGPKKSTNLVKNKCVNFNFNGLTGTGVLTESNKKFLPFQQFGRDIADTTDAVRDPQTLEILDITPCSFGGVSVITPGTNTSNQVAVLYQGVNCTEVPVAIHADQLTPTWRVYSTGSNVFQTRAGCLIGAEHVNNSYECDIPIGAGICASYQTQTNSPRRARSVASQSIIAYTMSLGAENSVAYSNNSIAIPTNFTISVTTEILPVSMTKTSVDCTMYICGDSTECSNLLLQYGSFCTQLNRALTGIAVEQDKNTQEVFAQVKQIYKTPPIKDFGGFNFSQILPDPSKPSKRSFIEDLLFNKVTLADAGFIKQYGDCLGDIAARDLICAQKFNGLTVLPPLLTDEMIAQYTSALLAGTITSGWTFGAGAALQIPFAMQMAYRFNGIGVTQNVLYENQKLIANQFNSAIGKIQDSLSSTASALGKLQDVVNQNAQALNTLVKQLSSNFGAISSVLNDILSRLDPPEAEVQIDRLITGRLQSLQTYVTQQLIRAAEIRASANLAATKMSECVLGQSKRVDFCGKGYQLMSFPQSAPHGVVFLNVTYVPAQEKNFTTAPAICNDGKAHFPREGVFVSNGTNWFVTQRNFYEPQIITTDNTFVSGNCDVVIGIVNNTVYDPLQPELDSFKEELDKYFKNHTSPDVDLGDISGINASVVNIQKEIDRLNEVAKNLNESLIDLQELGKYEQYIKWPWYIWLGFIAGLIAIVMVTIMLCCMTSCCSCLKGCCSCGSCCKFDEDDSELVLKGVKLHYT

SEQ ID NO: 561 - protein, 1273 aa, Artificial Sequence
  SARS-CoV-2/Australia/NSW09/2020__EPI_ISL_413595 spike protein (1-1273)(K986P_V987P_ H1048Q_H1064N_ H1083N_H1101N)
MFVFLVLLPLVSSQCVNLTTRTQLPPAYTNSFTRGVYYPDKVFRSSVLHSTQDLFLPFFSNVTWFHAIHVSGTNGTKRFDNPVLPFNDGVYFASTEKSNIIRGWIFGTTLDSKTQSLLIVNNATNVVIKVCEFQFCNDPFLGVYYHKNNKSWMESEFRVYSSANNCTFEYVSQPFLMDLEGKQGNFKNLREFVFKNIDGYFKIYSKHTPINLVRDLPQGFSALEPLVDLPIGINITRFQTLLALHRSYLTPGDSSSGWTAGAAAYYVGYLQPRTFLLKYNENGTITDAVDCALDPLSETKCTLKSFTVEKGIYQTSNFRVQPTESIVRFPNITNLCPFGEVFNATRFASVYAWNRKRISNCVADYSVLYNSASFSTFKCYGVSPTKLNDLCFTNVYADSFVIRGDEVRQIAPGQTGKIADYNYKLPDDFTGCVIAWNSNNLDSKVGGNYNYLYRLFRKSNLKPFERDISTEIYQAGSTPCNGVEGFNCYFPLQSYGFQPTNGVGYQPYRVVVLSFELLHAPATVCGPKKSTNLVKNKCVNFNFNGLTGTGVLTESNKKFLPFQQFGRDIADTTDAVRDPQTLEILDITPCSFGGVSVITPGTNTSNQVAVLYQDVNCTEVPVAIHADQLTPTWRVYSTGSNVFQTRAGCLIGAEHVNNSYECDIPIGAGICASYQTQTNSPRRARSVASQSIIAYTMSLGAENSVAYSNNSIAIPTNFTISVTTEILPVSMTKTSVDCTMYICGDSTECSNLLLQYGSFCTQLNRALTGIAVEQDKNTQEVFAQVKQIYKTPPIKDFGGFNFSQILPDPSKPSKRSFIEDLLFNKVTLADAGFIKQYGDCLGDIAARDLICAQKFNGLTVLPPLLTDEMIAQYTSALLAGTITSGWTFGAGAALQIPFAMQMAYRFNGIGVTQNVLYENQKLIANQFNSAIGKIQDSLSFTASALGKLQDVVNQNAQALNTLVKQLSSNFGAISSVLNDILSRLDPPEAEVQIDRLITGRLQSLQTYVTQQLIRAAEIRASANLAATKMSECVLGQSKRVDFCGKGYQLMSFPQSAPHGVVFLNVTYVPAQEKNFTTAPAICNDGKAHFPREGVFVSNGTNWFVTQRNFYEPQIITTDNTFVSGNCDVVIGIVNNTVYDPLQPELDSFKEELDKYFKNHTSPDVDLGDISGINASVVNIQKEIDRLNEVAKNLNESLIDLQELGKYEQYIKWPWYIWLGFIAGLIAIVMVTIMLCCMTSCCSCLKGCCSCGSCCKFDEDDSEPVLKGVKLHYT

SEQ ID NO: 562 - protein, 1273 aa, Artificial Sequence
  SARS-CoV-2/Australia/NSW10/2020__EPI_ISL_413596 spike protein (1-1273)(K986P_V987P_ H1048Q_H1064N_ H1083N_H1101N)
MFVFLVLLPLVSSQCVNLTTRTQLPPAYTNSFTRGVYYPDKVFRSSVLHSTQDLFLPFFSNVTWFHAIHVSGTNGTKRFDNPVLPFNDGVYFASTEKSNIIRGWIFGTTLDSKTQSLLIVNNATNVVIKVCEFQFCNDPFLGVYYHKNNKSWMESEFRVYSSANNCTFEYVSQPFLMDLEGKQGNFKNLREFVFKNIDGYFKIYSKHTPINLVRDLPQGFSALEPLVDLPIGINITRFQTLLALHRSYLTPGDSSSGWTAGAAAYYVGYLQPRTFLLKYNENGTITDAVDCALDPLSETKCTLKSFTVEKGIYQTSNFRVQPTESIVRFPNITNLCPFGEVFNATRFASVYAWNRKRISNCVADYSVLYNSASFSTFKCYGVSPTKLNDLCFTNVYADSFVIRGDEVRQIAPGQTGKIADYNYKLPDDFTGCVIAWNSNNLDSKVGGNYNYLYRLFRKSNLKPFERDISTEIYQAGSTPCNGVEGFNCYFPLQSYGFQPTNGVGYQPYRVVVLSFELLHAPATVCGPKKSTNLVKNKCVNFNFNGLTGTGVLTESNKKFLPFQQFGRDIADTTDAVRDPQTLEILDITPCSFGGVSVITPGTNTSNQVAVLYQDVNCTEVPVAIHADQLTPTWRVYSTGSNVFQTRAGCLIGAEHVNNSYECDIPIGAGICASYQTQTNSPRRARSVASQSIIAYTMSLGAENSVAYSNNSIAIPTNFTISVTTEILPVSMTKTSVDCTMYICGDSTECSNLLLQYGSFCTQLNRALTGIAVEQDKNTQEVFAQVKQIYKTPPIKDFGGFNFSQILPDPSKPSKRSFIEDLLFNKVTLADAGFIKQYGDCLGDIAARDLICAQKFNGLTVLPPLLTDEMIAQYTSALLAGTITSGWTFGAGAALQIPFAMQMAYRFNGIGVTQNVLYENQKLIANQFNSAIGKIQDSLSSTASALGKLQDVVNQNAQALNTLVKQLSSNFGAISSVLNDILSRLDPPEAEVQIDRLITGRLQSLQTYVTQQLIRAAEIRASANLAATKMSECVLGQSKRVDFCGKGYQLMSFPQSAPHGVVFLNVTYVPAQEKNFTTAPAICNDGKAHFPREGVFVSNGTNWFVTQRNFYEPQIITTDNTFVSGNCDVVIGIVNNTVYDPLQPELDSFKEELDKYFKNHTSPDVDLGDISGINASVVNIQKEIDRLNEVAKNLNESLIDLQELGKYEQYIKWPWYIWLGFIAGLIAIVMVTIMLCCMTSCCSCLKGCCSCGSCFKFDEDDSEPVLKGVKLHYT

SEQ ID NO: 563 - protein, 1273 aa, Artificial Sequence
  SARS-CoV-2/Switzerland/1000477797/2020__EPI_ISL_413023 spike protein (1-1273)(K986P_V987P_ H1048Q_H1064N_ H1083N_H1101N)
MFVFLVLLPLVSSQCVNLTTRTQLPPAYTNSFTRGVYYPDKVFRSSVLHSTQDLFLPFFSNVTWFHAIHVSGTNGTKRFDNPVLPFNDGVYFASTEKSNIIRGWIFGTTLDSKTQSLLIVNNATNVVIKVCEFQFCNDPFLGVYYHKNNKSWMESEFRVYSSANNCTFEYVSQPFLMDLEGKQGNFKNLREFVFKNIDGYFNIYSKHTPINLVRDLPQGFSALEPLVDLPIGINITRFQTLLALHRSYLTPGDSSSGWTAGAAAYYVGYLQPRTFLLKYNENGTITDAVDCALDPLSETKCTLKSFTVEKGIYQTSNFRVQPTESIVRFPNITNLCPFGEVFNATRFASVYAWNRKRISNCVADYSVLYNSASFSTFKCYGVSPTKLNDLCFTNVYADSFVIRGDEVRQIAPGQTGKIADYNYKLPDDFTGCVIAWNSNNLDSKVGGNYNYLYRLFRKSNLKPFERDISTEIYQAGSTPCNGVEGFNCYFPLQSYGFQPTNGVGYQPYRVVVLSFELLHAPATVCGPKKSTNLVKNKCVNFNFNGLTGTGVLTESNKKFLPFQQFGRDIADTTDAVRDPQTLEILDITPCSFGGVSVITPGTNTSNQVAVLYQGVNCTEVPVAIHADQLTPTWRVYSTGSNVFQTRAGCLIGAEHVNNSYECDIPIGAGICASYQTQTNSPRRARSVASQSIIAYTMSLGAENSVAYSNNSIAIPTNFTISVTTEILPVSMTKTSVDCTMYICGDSTECSNLLLQYGSFCTQLNRALTGIAVEQDKNTQEVFAQVKQIYKTPPIKDFGGFNFSQILPDPSKPSKRSFIEDLLFNKVTLADAGFIKQYGDCLGDIAARDLICAQKFNGLTVLPPLLTDEMIAQYTSALLAGTITSGWTFGAGAALQIPFAMQMAYRFNGIGVTQNVLYENQKLIANQFNSAIGKIQDSLSSTASALGKLQDVVNQNAQALNTLVKQLSSNFGAISSVLNDILSRLDPPEAEVQIDRLITGRLQSLQTYVTQQLIRAAEIRASANLAATKMSECVLGQSKRVDFCGKGYQLMSFPQSAPHGVVFLNVTYVPAQEKNFTTAPAICNDGKAHFPREGVFVSNGTNWFVTQRNFYEPQIITTDNTFVSGNCDVVIGIVNNTVYDPLQPELDSFKEELDKYFKNHTSPDVDLGDISGINASVVNIQKEIDRLNEVAKNLNESLIDLQELGKYEQYIKWPWYIWLGFIAGLIAIVMVTIMLCCMTSCCSCLKGCCSCGSCCKFDEDDSEPVLKGVKLHYT

SEQ ID NO: 564 - protein, 1273 aa, Artificial Sequence
  SARS-CoV-2/Belgium/BA-02291/2020__EPI_ISL_415159 spike protein (1-1273)(K986P_V987P_ H1048Q_H1064N_ H1083N_H1101N)
MFVFLVLLPLVSSQCVNLTTRTQLPPAYTNSFTRGVYYPDKVFRSSVLHSTQDLFLPFFSNVTWFHAIHVSGTNGTKRFDNPVLPFNDGVYFASTEKSNIIRGWIFGTTLDSKTQSLLIVNNATNVVIKVCEFQFCNDPFLGVYYHKNNKSWMESEFRVYSSANNCTFEYVSQPFLMDLEGKQGNFKNLREFVFKNIDGYFKIYSKHTPINLVRDLPQGFSALEPLVDLPIGINITRFQTLLALHRSYLTPGDSSSGWTAGAAAYYVGYLQPRTFLLKYNENGTITDAVDCALDPLSETKCTLKSFTVEKGIYQTSNFRVQPTESIVRFPNITNLCPFGEVFNATRFASVYAWNRKRISNCVADYSVLYNSASFSTFKCYGVSPTKLNDLCFTNVYADSFVIRGDEVRQIAPGQTGKIADYNYKLPDDFTGCVIAWNSNNLDSKVGGNYNYLYRLFRRSNLKPFERDISTEIYQAGSTPCNGVEGFNCYFPLQSYGFQPTNGVGYQPYRVVVLSFELLPAPATVCGPKKSTNLVKNKCVNFNFNGLTGTGVLTESNKKFLPFQQFGRDIADTTDAVRDPQTLEILDITPCSFGGVSVITPGTNTSNQVAVLYQGVNCTEVPVAIHADQLTPTWRVYSTGSNVFQTRAGCLIGAEHVNNSYECDIPIGAGICASYQTQTNSPRRARSVASQSIIAYTMSLGAENSVAYSNNSIAIPTNFTISVTTEILPVSMTKTSVDCTMYICGDSTECSNLLLQYGSFCTQLNRALTGIAVEQDKNTQEVFAQVKQIYKTPPIKDFGGFNFSQILPDPSKPSKRSFIEDLLFNKVTLADAGFIKQYGDCLGDIAARDLICAQKFNGLTVLPPLLTDEMIAQYTSALLAGTITSGWTFGAGAALQIPFAMQMAYRFNGIGVTQNVLYENQKLIANQFNSAIGKIQDSLSSAAPALGKLQDVVNQNAQALNTLVKQLSSNFGAISSVLNDILSRLDPPEAEVQIDRLITGRLQSLQTYVTQQLIRAAEIRASANLAATKMSECVLGQSKRVDFCGKGYQLMSFPQSAPHGVVFLNVTYVPAQEKNFTTAPAICNDGKAHFPREGVFVSNGTNWFVTQRNFYEPQIITTDNTFVSGNCDVVIGIVNNTVYDPLQPELDSFKEELDKYFKNHTSPDVDLGDISGINASVVNIQKEIDRLNEVAKNLNESLIDLQELGKYEQYIKWPWYIWLGFIAGLIAIVMVTIMLCCMTSCCSCLKGCCSCGSCCKFDEDDSEPVLKGVKLHYT

SEQ ID NO: 565 - protein, 1273 aa, Artificial Sequence
  SARS-CoV-2/USA/WA8-UW5/2020__EPI_ISL_413486 spike protein (1-1273)(K986P_V987P_ H1048Q_H1064N_ H1083N_H1101N)
MFVFLVLLPLVSSQCVNLTTRTQLPPAYTNSFTRGVYYPDKVFRSSVLHSTQDLFLPFFSNVTWFHAIHVSGTNGTKRFDNPVLPFNDGVYFASTEKSNIIRGWIFGTTLDSKTQSLLIVNNATNVVIKVCEFQFCNDPFLGVYYHKNNKSWMESEFRVYSSANNCTFEYVSQPFLMDLEGKQGNFKNLREFVFKNIDGYFKIYSKHTPINLVRDLPQGFSALEPLVDLPIGINITRFQTLLALHRSYLTPGDSSSGWTAGAAAYYVGYLQPRTFLLKYNENGTITDAVDCALDPLSETKCTLKSFTVEKGIYQTSNFRVQPTESIVRFPNITNLCPFGEVFNATRFASVYAWNRKRISNCVADYSVLYNSASFSTFKCYGVSPTKLNDLCFTNVYADSFVIRGDEVRQIAPGQTGKIADYNYKLPDDFTGCVIAWNSNNLDSKVGGNYNYLYRLFRKSNLKPFERDISTEIYQAGSTPCNGVEGFNCYFPLQSYGFQPTNGVGYQPYRVVVLSFELLHAPATVCGPKKSTNLVKNKCVNFNFNGLTGTGVLTESNKKFLPFQQFGRDIADTTDAVRDPQTLEILDITPCSFGGVSVITPGTNTSNQVAVLYQDVNCTEVPVAIHADQLTPTWRVYSTGSNVFQTRAGCLIGAEYVNNSYECDIPIGAGICASYQTQTNSPRRARSVASQSIIAYTMSLGAENSVAYSNNSIAIPTNFTISVTTEILPVSMTKTSVDCTMYICGDSTECSNLLLQYGSFCTQLNRALTGIAVEQDKNTQEVFAQVKQIYKTPPIKDFGGFNFSQILPDPSKPSKRSFIEDLLFNKVTLADAGFIKQYGDCLGDIAARDLICAQKFNGLTVLPPLLTDEMIAQYTSALLAGTITSGWTFGAGAALQIPFAMQMAYRFNGIGVTQNVLYENQKLIANQFNSAIGKIQDSLSSTASALGKLQDVVNQNAQALNTLVKQLSSNFGAISSVLNDILSRLDPPEAEVQIDRLITGRLQSLQTYVTQQLIRAAEIRASANLAATKMSECVLGQSKRVDFCGKGYQLMSFPQSAPHGVVFLNVTYVPAQEKNFTTAPAICNDGKAHFPREGVFVSNGTNWFVTQRNFYEPQIITTDNTFVSGNCDVVIGIVNNTVYDPLQPELDSFKEELDKYFKNHTSPDVDLGDISGINASVVNIQKEIDRLNEVAKNLNESLIDLQELGKYEQYIKWPWYIWLGFIAGLIAIVMVTIMLCCMTSCCSCLKGCCSCGSCCKFDEDDSEPVLKGVKLHYT

SEQ ID NO: 566 - protein, 1273 aa, Artificial Sequence
  SARS-CoV-2/England/20102000506/2020__EPI_ISL_415147 spike protein (1-1273)(K986P_V987P_ H1048Q_H1064N_ H1083N_H1101N)
MFVFLVLLPLVSSQCVNLTTRTQLPPAYTNSFTRGVYYPDKVFRSSVLHSTQDLFLPFFSNVTWFHAIHVSGTNGTKRFDNPVLPFNDGVYFASTEKSNIIRGWIFGTTLDSKTQSLLIVNNATNVVIKVCEFQFCNDPFLGVYYHKNNKSWMESEFRVYSSANNCTFEYVSQPFLMDLEGKQGNFKNLREFVFKNIDGYFKIYSKHTPINLVRDLPQGFSALEPLVDLPIGINITRFQTLLALHRSYLTPGDSSSGWTAGAAAYYVGYLQPRTFLLKYNENGTITDAVDCALDPLSETKCTLKSFTVEKGIYQTSNFRVQPTESIVRFPNITNLCPFGEVFNATRFASVYAWNRKRISNCVADYSVLYNSASFSTFKCYGVSPTKLNDLCFTNVYADSFVIRGDEVRQIAPGQTGKIADYNYKLPDDFTGCVIAWNSNNLDSKVGGNYNYLYRLFRKSNLKPFERDISTEIYQAGSTPCNGVEGFNCYFPLQSYGFQPTNGVGYQPYRVVVLSFELLHAPATVCGPKKSTNLVKNKCVNFNFNGLTGTGVLTESNKKFLPFQQFGRDIADTTDAVRDPQTLEILDITPCSFGGVSVITPGTNTSNQVAVLYQGVNCTEVPVAIHADQLTPTWRVYSTGSNVFQTRAGCLIGAEHVNNSYECDIPIGAGICASYQTQTNSPRRARSVASQSIIAYTMSLGAENSVAYSNNSIAIPTNFTISVTTEILPVSMTKTSVDCTMYICGDSTECSNLLLQYGSFCTQLNRALTGIAVEQDKNTQEVFAQVKQIYKTPPIKDFGGFNFSQILPDPSKPSKRSFIEDLLFNKVTLADAGFIKQYGYCLGDIAARDLICAQKFNGLTVLPPLLTDEMIAQYTSALLAGTITSGWTFGAGAALQIPFAMQMAYRFNGIGVTQNVLYENQKLIANQFNSAIGKIQDSLSSTASALGKLQDVVNQNAQALNTLVKQLSSNFGAISSVLNDILSRLDPPEAEVQIDRLITGRLQSLQTYVTQQLIRAAEIRASANLAATKMSECVLGQSKRVDFCGKGYQLMSFPQSAPHGVVFLNVTYVPAQEKNFTTAPAICNDGKAHFPREGVFVSNGTNWFVTQRNFYEPQIITTDNTFVSGNCDVVIGIVNNTVYDPLQPELDSFKEELDKYFKNHTSPDVDLGDISGINASVVNIQKEIDRLNEVAKNLNESLIDLQELGKYEQYIKWPWYIWLGFIAGLIAIVMVTIMLCCMTSCCSCLKGCCSCGSCCKFDEDDSEPVLKGVKLHYT

SEQ ID NO: 567 - protein, 1273 aa, Artificial Sequence
  SARS-CoV-2/Belgium/VAG-03013/2020__EPI_ISL_415155 spike protein (1-1273)(K986P_V987P_ H1048Q_H1064N_ H1083N_H1101N)
MFVFLVLLPLVSSQCVNLTTRTQLPPAYTNSFTRGVYYPDKVFRSSVLHSTQDLFLPFFSNVTWFHAIHVSGTNGTKRFDNPVLPFNDGVYFASTEKSNIIRGWIFGTTLDSKTQSLLIVNNATNVVIKVCEFQFCNDPFLGVYYHKNNKSWMESEFRVYSSANNCTFEYVSQPFLMDLEGKQGNFKNLREFVFKNIDGYFKIYSKHTPINLVRDLPQGFSALEPLVDLPIGINITRFQTLLALHRSYLTPGDSSSGWTAGAAAYYVGYLQPRTFLLKYNENGTITDAVDCALDPLSETKCTLKSFTVEKGIYQTSNFRVQPTESIVRFPNITNLCPFGEVFNATRFASVYAWNRKRISNCVADYSVLYNSASFSTFKCYGVSPTKLNDLCFTNVYADSFVIRGDEVRQIAPGQTGKIADYNYKLPDDFTGCVIAWNSNNLDSKVGGNYNYLYRLFRKSNLKPFERDISTEIYQAGSTPCNGVEGFNCYFPLQSYGFQPTNGVGYQPYRVVVLSFELLHAPATVCGPKKSTNLVKNKCVNFNFNGLTGTGVLTESNKKFLPFQQFGRDIADTTDAVRDPQTLEILDITPCSFGGVSVITPGTNTSNQVAVLYQGVNCTEVPVAIHADQLTPTWRVYSTGSNVFQTRAGCLIGAEHVNNSYECDIPIGAGICASYQTQTNSPRRARSVASQSIIAYTMSLGAENSVAYSNNSIAIPTNFTISVTTEILPVSMTKTSVDCTMYICGDSTECSNLLLQYGSFCTQLNRALTGIAVEQDKNTQEVFAQVKQIYKTPPIKDFGGFNFSQILPDPSKPSKRSFIEDLLFNKVTLADAGFIKQYGDCLGDIAARDLICAQKFNGLTVLPPLLTDEMIAQYTSALLAGTITSGWTFGAGAALQIPFAMQMAYRFNGIGVTQNVLYENQKLIANQFNSAIGKIQDSLSSTATALGKLQDVVNQNAQALNTLVKQLSSNFGAISSVLNDILSRLDPPEAEVQIDRLITGRLQSLQTYVTQQLIRAAEIRASANLAATKMSECVLGQSKRVDFCGKGYQLMSFPQSAPHGVVFLNVTYVPAQEKNFTTAPAICNDGKAHFPREGVFVSNGTNWFVTQRNFYEPQIITTDNTFVSGNCDVVIGIVNNTVYDPLQPELDSFKEELDKYFKNHTSPDVDLGDISGINASVVNIQKEIDRLNEVAKNLNESLIDLQELGKYEQYIKWPWYIWLGFIAGLIAIVMVTIMLCCMTSCCSCLKGCCSCGSCCKFDEDDSEPVLKGVKLHYT

SEQ ID NO: 568 - protein, 1273 aa, Artificial Sequence
  SARS-CoV-2/Belgium/BC-03016/2020__EPI_ISL_415157 spike protein (1-1273)(K986P_V987P_ H1048Q_H1064N_ H1083N_H1101N)
MFVFLVLLPLVSSQCVNLTTRTQLPPAYTNSFTRGVYYPDKVFRSSVLHSTQDLFLPFFSNVTWFHAIHVSGTNGTKRFDNPVLPFNDGVYFASTEKSNIIRGWIFGTTLDSKTQSLLIVNNATNVVIKVCEFQFCNDPFLGVYYHKNNKSWMESEFRVYSSANNCTFEYVSQPFLMDLEGKQGNFKNLREFVFKNIDGYFKIYSKHTPINLVRDLPQGFSALEPLVDLPIGINITRFQTLLALHRSYLTPGDSSSGWTAGAAAYYVGYLQPRTFLLKYNENGTITDAVDCALDPLSETKCTLKSFTVEKGIYQTSNFRVQPTESIVRFPNITNLCPFGEVFNATRFASVYAWNRKRISNCVADYSVLYNSASFSTFKCYGVSPTKLNDLCFTNVYADSFVIRGDEVRQIAPGQTGKIADYNYKLPDDFTGCVIAWNSNNLDSKVGGNYNYLYRLFRKSNLKPFERDISTEIYQAGSTPCNGVEGFNCYFPLQSYGFQPTNGVGYQPYRVVVLSFELLHAPATVCGPKKSTNLVKNKCVNFNFNGLTGTGVLTESNKKFLPFQQFGRDIADTTDAVRDPQTLEILDITPCSFGGVSVITPGTNTSNQVAVLYQGVNCTEVPVAIHADQLTPTWRVYSTGSNVFQTRAGCLIGAEHVNNSYECDIPIGAGICASYQTQTNSPRRARSVASQSIIAYTMSLGAENSVAYSNNSIAIPTNFTISVTTEILPVSMTKTSVDCTMYICGDSTECSNLLLQYGSFCTQLNRALTGIAVEQDKNTQEVFAQVKQIYKTPPIKDFGGFNFSQILPDPSKPSKRSFIEDLLFNKVTLADAGFIKQYGDCLGDIAARDLICAQKFNGLTVLPPLLTDEMIAQYTSALLAGTITSGWTFGAGAALQIPFAMQMAYRFNGIGVTQNVLYENQKLIANQFNSAIGKIQDSLSSTAPALGKLQDVVNQNAQALNTLVKQLSSNFGAISSVLNDILSRLDPPEAEVQIDRLITGRLQSLQTYVTQQLIRAAEIRASANLAATKMSECVLGQSKRVDFCGKGYQLMSFPQSAPHGVVFLNVTYVPAQEKNFTTAPAICNDGKAHFPREGVFVSNGTNWFVTQRNFYEPQIITTDNTFVSGNCDVVIGIVNNTVYDPLQPELDSFKEELDKYFKNHTSPDVDLGDISGINASVVNIQKEIDRLNEVAKNLNESLIDLQELGKYEQYIKWPWYIWLGFIAGLIAIVMVTIMLCCMTSCCSCLKGCCSCGSCCKFDEDDSEPVLKGVKLHYT

SEQ ID NO: 569 - protein, 1273 aa, Artificial Sequence
  SARS-CoV-2/Germany/BavPat3/2020__EPI_ISL_414521 spike protein (1-1273)(K986P_V987P_ H1048Q_H1064N_ H1083N_H1101N)
MFVFLVLLPLVSSQCVNLTTRTQLPPAYTNSFTRGVYYPDKVFRSSVLHSTQDLFLPFFSNVTWFHAIHVSGTNGTKRFDNPVLPFNDGVYFASTEKSNIIRGWIFGTTLDSKTQSLLIVNNATNVVIKVCEFQFCNDPFLGVYYHKNNKSWMESEFRVYSSANNCTFEYVSQPFLMDLEGKQGNFKNLREFVFKNIDGYFKIYSKHTPINLVRDLPQGFSALEPLVDLPIGINITRFQTLLALHRSYLTPGDSSSGWTAGAAAYYVGYLQPRTFLLKYNENGTITDAVDCALDPLSETKCTLKSFTVEKGIYQTSNFRVQPTESIVRFPNITNLCPFGEVFNATRFASVYAWNRKRISNCVADYSVLYNSASFSTFKCYGVSPTKLNDLCFTNVYADSFVIRGDEVRQIAPGQTGKIADYNYKLPDDFTGCVIAWNSNNLDSKVGGNYNYLYRLFRKSNLKPFERDISTEIYQAGSTPCNGVEGFNCYFPLQSYGFQPTNGVGYQPYRVVVLSFELLHAPATVCGPKKSTNLVKNKCVNFNFNGLTGTGVLTESNKKFLPFQQFGRDIADTTDAVRDPQTLEILDITPCSFGGVSVITPGTNTSNQVAVLYQDVNCTEVPVAIHADQLTPTWRVYSTGSNVFQTRAGCLIGAEHVNNSYECDIPIGAGICASYQTQTNSPRRARSVASQSIIAYTMSLGAENSVAYSNNSIAIPTNFTISVTTEILPVSMTKTSVDCTMYICGDSTECSNLLLQYGSFCTQLNRALTGIAVEQDKNTQQVFAQVKQIYKTPPIKDFGGFNFSQILPDPSKPSKRSFIEDLLFNKVTLADAGFIKQYGDCLGDIAARDLICAQKFNGLTVLPPLLTDEMIAQYTSALLAGTITSGWTFGAGAALQIPFAMQMAYRFNGIGVTQNVLYENQKLIANQFNSAIGKIQDSLSSTASALGKLQDVVNQNAQALNTLVKQLSSNFGAISSVLNDILSRLDPPEAEVQIDRLITGRLQSLQTYVTQQLIRAAEIRASANLAATKMSECVLGQSKRVDFCGKGYQLMSFPQSAPHGVVFLNVTYVPAQEKNFTTAPAICNDGKAHFPREGVFVSNGTNWFVTQRNFYEPQIITTDNTFVSGNCDVVIGIVNNTVYDPLQPELDSFKEELDKYFKNHTSPDVDLGDISGINASVVNIQKEIDRLNEVAKNLNESLIDLQELGKYEQYIKWPWYIWLGFIAGLIAIVMVTIMLCCMTSCCSCLKGCCSCGSCCKFDEDDSEPVLKGVKLHYT

SEQ ID NO: 570 - protein, 1273 aa, Artificial Sequence
  SARS-CoV-2/France/HF1805/2020__EPI_ISL_414628 spike protein (1-1273)(K986P_V987P_ H1048Q_H1064N_ H1083N_H1101N)
MFVFLVLLPLVSSQCVNLTTRTQLPPAYTNSFTRGVYYPDKVFRSSVLHSTQDLFLPFFSNVTWFHAIHVSGTNGTKRFDNPVLPFNDGVYFASTEKSNIIRGWIFGTTLDSKTQSLLIVNNATNVVIKVCEFQFCNDPFLGVYYHKNNKSWMESEFRVYSSANNCTFEYVSQPFLMDLEGKQGNFKNLREFVFKNIDGYFKIYSKHTPINLVRDLPQGFSALEPLVDLPIGINITRFQTLLALHRSYLTPGDSSSGWTAGAAAYYVGYLQPRTFLLKYNENGTITDAVDCALDPLSETKCTLKSFTVEKGIYQTSNFRVQPTESIVRFPNITNLCPFGEVFNATRFASVYAWNRKRISNCVADYSVLYNSASFSTFKCYGVSPTKLNDLCFTNVYADSFVIRGDEVRQIAPGQTGKIADYNYKLPDDFTGCVIAWNSNNLDSKVGGNYNYLYRLFRKSNLKPFERDISTEIYQAGSTPCNGVEGFNCYFPLQSYGFQPTNGVGYQPYRVVVLSFELLHAPATVCGPKKSTNLVKNKCVNFNFNGLTGTGVLTESNKKFLPFQQFGRDIADTTDAVRDPQTLEILDITPCSFGGVSVITPGTNTSNQVAVLYQGVNCTEVPVAIHADQLTPTWRVYSTGSNVFQTRAGCLIGAEHVNNSYECDIPIGAGICASYQTQTNSPRRARSVASQSIIAYTMSLGAENSVAYSNNSIAIPTNFTISVTTEILPVSMTKTSVDCTMYICGDSTECSNLLLQYGSFCTQLNRALTGIAVEQDKNTQEVFAQVKQIYKTPPIKDFGGFNFSQILPDPSKPSKRSFIEDLLFNKVTLADAGFIKQYGDCLGDIAARDLICAQKFNGLTVLPPLLTDEMIAQYTSALLAGTITSGWTFGAGAALQIPFAMQMAYRFNGIGVTQNVLYENQKLIANQFNSAIGKIQDSLSSTASALGKLQDVVNQNAQALNTLVKQLSSNFGAISSVLNDILSRLDPPEAEVQIDRLITGRLQSLQTYVTQQLIRAAEIRASANLAATKMSECVLGQSKRVDFCGKGYQLMSFPQSAPHGVVFLNVTYVPAQEKNFTTAPAICNDGKAHFPREGVFVSNGTNWFVTQRNFYEPQIITTDNTFVSGNCDVVIGVVNNTVYDPLQPELDSFKEELDKYFKNHTSPDVDLGDISGINASVVNIQKEIDRLNEVAKNLNESLIDLQELGKYEQYIKWPWYIWLGFIAGLIAIVMVTIMLCCMTSCCSCLKGCCSCGSCCKFDEDDSEPVLKGVKLHYT

SEQ ID NO: 571 - protein, 1273 aa, Artificial Sequence
  SARS-CoV-2/Netherlands/ZuidHolland_9/2020__EPI_ISL_414445 spike protein (1-1273)(K986P_V987P_ H1048Q_H1064N_ H1083N_H1101N)
MFVFLVLLPLVSSQCVNLTTRTQLPPAYTNSFTRGVYYPDKVFRSSVLHSTQDLFLPFFSNVTWFHAIHVSGTNGTKRFDNPVLPFNDGVYFASTEKSNIIRGWIFGTTLDSKTQSLLIVNNATNVVIKVCEFQFCNDPFLGVYYHKNNKSWMESEFRVYSSANNCTFEYVSQPFLMDLEGKQGNFKNLREFVFKNIDGYFKIYSKHTPINLVRDLPQGFSALEPLVDLPIGINITRFQTLLALHRSYLTPGDSSSGWTAGAAAYYVGYLQPRTFLLKYNENGTITDAVDCALDPLSETKCTLKSFTVEKGIYQTSNFRVQPTESIVRFPNITNLCPFGEVFNATRFASVYAWNRKRISNCVADYSVLYNSASFSTFKCYGVSPTKLNDLCFTNVYADSFVIRGDEVRQIAPGQTGKIADYNYKLPDDFTGCVIAWNSNNLDSKVGGNYNYLYRLFRKSNLKPFERDISTEIYQAGSTPCNGVEGFNCYFPLQSYGFQPTNGVGYQPYRVVVLSFELLHAPATVCGPKKSTNLVKNKCVNFNFNGLTGTGVLTESNKKFLPFQQFGRDIADTTDAVRDPQTLEILDITPCSFGGVSVITPGTNTSNQVAVLYQGVNCTEVPVAIHADQLTPTWRVYSTGSNVFQTRAGCLIGAEHVNNSYECDIPIGAGICASYQTQTNSPRRARSVASQSIIAYTMSLGAENSVAYSNNSIAIPTNFTISVTTEILPVSMTKTSVDCTMYICGDSTECSNLLLQYGSFCTQLNRALTGIAVEQDKNTQEVFAQVKQIYKTPPIKDFGGFNFSQILPDPSKPSKRSFIEDLLFNKVTLADAGFIKQYGDCLGDIAARDLICVQKFNGLTVLPPLLTDEMIAQYTSALLAGTITSGWTFGAGAALQIPFAMQMAYRFNGIGVTQNVLYENQKLIANQFNSAIGKIQDSLSSTASALGKLQDVVNQNAQALNTLVKQLSSNFGAISSVLNDILSRLDPPEAEVQIDRLITGRLQSLQTYVTQQLIRAAEIRASANLAATKMSECVLGQSKRVDFCGKGYQLMSFPQSAPHGVVFLNVTYVPAQEKNFTTAPAICNDGKAHFPREGVFVSNGTNWFVTQRNFYEPQIITTDNTFVSGNCDVVIGIVNNTVYDPLQPELDSFKEELDKYFKNHTSPDVDLGDISGINASVVNIQKEIDRLNEVAKNLNESLIDLQELGKYEQYIKWPWYIWLGFIAGLIAIVMVTIMLCCMTSCCSCLKGCCSCGSCCKFDEDDSEPVLKGVKLHYT

SEQ ID NO: 572 - protein, 1273 aa, Artificial Sequence
  SARS-CoV-2/Finland/FIN03032020A/2020__EPI_ISL_413602 spike protein (1-1273)(K986P_V987P_ H1048Q_H1064N_ H1083N_H1101N)
MFVFLVLLPLVSSQCVNLTTRTQLPPAYTNSFTRGVYYPDKVFRSSVLHSTQDLFLPFFSNVTWFHAIHVSGTNGTKRFDNPVLPFNDGVYFASTEKSNIIRGWIFGTTLDSKTQSLLIVNNATNVVIKVCEFQFCNDPFLGVYYHKNNKSWMESEFRVYSSANNCTFEYVSQPFLMDLEGKQGNFKNLREFVFKNIDGYFKIYSKHTPINLVRDLPQGFSALEPLVDLPIGINITRFQTLLALHRSYLTPGDSSSGWTAGAAAYYVGYLQPRTFLLKYNENGTITDAVDCALDPLSETKCTLKSFTVEKGIYQTSNFRVQPTESIVRFPNITNLCPFGEVFNATRFASVYAWNRKRISNCVADYSVLYNSASFSTFKCYGVSPTKLNDLCFTNVYADSFVIRGDEVRQIAPGQTGKIADYNYKLPDDFTGCVISWNSNNLDSKVGGNYNYLYRLFRKSNLKPFERDISTEIYQAGSTPCNGVEGFNCYFPLQSYGFQPTNGVGYQPYRVVVLSFELLHAPATVCGPKKSTNLVKNKCVNFNFNGLTGTGVLTESNKKFLPFQQFGRDIADTTDAVRDPQTLEILDITPCSFGGVSVITPGTNTSNQVAVLYQGVNCTEVPVAIHADQLTPTWRVYSTGSNVFQTRAGCLIGAEHVNNSYECDIPIGAGICASYQTQTNSPRRARSVASQSIIAYTMSLGAENSVAYSNNSIAIPTNFTISVTTEILPVSMTKTSVDCTMYICGDSTECSNLLLQYGSFCTQLNRALTGIAVEQDKNTQEVFAQVKQIYKTPPIKDFGGFNFSQILPDPSKPSKRSFIEDLLFNKVTLADAGFIKQYGDCLGDIAARDLICAQKFNGLTVLPPLLTDEMIAQYTSALLAGTITSGWTFGAGAALQIPFAMQMAYRFNGIGVTQNVLYENQKLIANQFNSAIGKIQDSLSSTASALGKLQDVVNQNAQALNTLVKQLSSNFGAISSVLNDILSRLDPPEAEVQIDRLITGRLQSLQTYVTQQLIRAAEIRASANLAATKMSECVLGQSKRVDFCGKGYQLMSFPQSAPHGVVFLNVTYVPAQEKNFTTAPAICNDGKAHFPREGVFVSNGTNWFVTQRNFYEPQIITTDNTFVSGNCDVVIGIVNNTVYDPLQPELDSFKEELDKYFKNHTSPDVDLGDISGINASVVNIQKEIDRLNEVAKNLNESLIDLQELGKYEQYIKWPWYIWLGFIAGLIAIVMVTIMLCCMTSCCSCLKGCCSCGSCCKFDEDDSEPVLKGVKLHYT

SEQ ID NO: 573 - protein, 1273 aa, Artificial Sequence
  SARS-CoV-2/France/GE1977/2020__EPI_ISL_414632 spike protein (1-1273)(K986P_V987P_ H1048Q_H1064N_ H1083N_H1101N)
MFVFLVLLPLVSSQCVNLTTRTQLPPAYTNSFTRGVYYPDKVFRSSVLHSTQDLFLPFFSNVTWFHAIHVSGTNGTKRFDNPVLPFNDGVYFASTEKSNIIRGWIFGTTLDSKTQSLLIVNNATNVVIKVCEFQFCNDPFLGVYYHKNNKSWMESEFRVYSSANNCTFEYVSQPFLMDLEGKQGNFKNLREFVFKNIDGYFKIYSKHTPINLVRDLPQGFSALEPLVDLPIGINITRFQTLLALHRSYLTPGDSSSGWTAGAAAYYVGYLQPRTFLLKYNENGTITDAVDCALDPLSETKCTLKSFTVEKGIYQTSNFRVQPTESIVRFPNITNLCPFGEVFNATRFASVYAWNRKRISNCVADYSVLYNSASFSTFKCYGVSPTKLNDLCFTNVYADSFVIRGDEVRQIAPGQTGKIADYNYKLPDDFTGCVIAWNSNNLDSKVGGNYNYLYRLFRKSNLKPFERDISTEIYQAGSTPCNGVEGFNCYFPLQSYGFQPTNGVGYQPYRVVVLSFELLHAPATVCGPKKSTNLVKNKCVNFNFNGLTGTGVLTESNKKFLPFQQFGRDIADTTDAVRDPQTLEILDITPCSFGGVSVITPGTNTSNQVAVLYQGVNCTEVPVAIHADQLTPTWRVYSTGSNVFQTRAGCLIGAEHVNNSYECDIPIGAGICASYQTQTNSPRRARSVASQSIIAYTMSLGAENSVAYSNNSIAIPTNFTISVTTEILPVSMTKTSVDCTMYICGDSTECSNLLLQYGSFCTQLNRALTGIAVEQDKNTQEVFAQVKQIYKTPPIKDFGGFNFSQILPDPSKPSKRSFIEDLLFNKVTLADAGFIKQYGDCLGDIAARDLICAQKFNGLTVLPPLLTDEMIAQYTSALLAGTITSGWTFGAGAALQIPFAMQMAYRFNGIGVTQNVLYENQKLIANQFNSAIGKIQDSLFSTASALGKLQDVVNQNAQALNTLVKQLSSNFGAISSVLNDILSRLDPPEAEVQIDRLITGRLQSLQTYVTQQLIRAAEIRASANLAATKMSECVLGQSKRVDFCGKGYQLMSFPQSAPHGVVFLNVTYVPAQEKNFTTAPAICNDGKAHFPREGVFVSNGTNWFVTQRNFYEPQIITTDNTFVSGNCDVVIGIVNNTVYDPLQPELDSFKEELDKYFKNHTSPDVDLGDISGINASVVNIQKEIDRLNEVAKNLNESLIDLQELGKYEQYIKWPWYIWLGFIAGLIAIVMVTIMLCCMTSCCSCLKGCCSCGSCCKFDEDDSEPVLKGVKLHYT

SEQ ID NO: 574 - protein, 1273 aa, Artificial Sequence
  SARS-CoV-2/Finland/FIN-313/2020__EPI_ISL_414641 spike protein (1-1273)(K986P_V987P_ H1048Q_H1064N_ H1083N_H1101N)
MFVFLVLLPLVSSQCVNLTTRTQLPPAYTNSFTRGVYYPDKVFRSSVLHSTQDLFLPFFSNVTWFHAIHVSGTNGTKRFDNPVLPFNDGVYFASTEKSNIIRGWIFGTTLDSKTQSLLIVNNATNVVIKVCEFQFCNDPFLGVYYHKNNKSWMESEFRVYSSANNCTFEYVSQPFLMDLEGKQGNFKNLREFVFKNIDGYFKIYSKHTPINLVRDLPQGFSALEPLVDLPIGINITRFKTLLALHRSYLTPGDSSSGWTAGAAAYYVGYLQPRTFLLKYNENGTITDAVDCALDPLSETKCTLKSFTVEKGIYQTSNFRVQPTESIVRFPNITNLCPFGEVFNATRFASVYAWNRKRISNCVADYSVLYNSASFSTFKCYGVSPTKLNDLCFTNVYADSFVIRGDEVRQIAPGQTGKIADYNYKLPDDFTGCVIAWNSNNLDSKVGGNYNYLYRLFRKSNLKPFERDISTEIYQAGSTPCNGVEGFNCYFPLQSYGFQPTNGVGYQPYRVVVLSFELLHAPATVCGPKKSTNLVKNKCVNFNFNGLTGTGVLTESNKKFLPFQQFGRDIADTTDAVRDPQTLEILDITPCSFGGVSVITPGTNTSNQVAVLYQGVNCTEVPVAIHADQLTPTWRVYSTGSNVFQTRAGCLIGAEHVNNSYECDIPIGAGICASYQTQTNSPRRARSVASQSIIAYTMSLGAENSVAYSNNSIAIPTNFTISVTTEILPVSMTKTSVDCTMYICGDSTECSNLLLQYGSFCTQLNRALTGIAVEQDKNTQEVFAQVKQIYKTPPIKDFGGFNFSQILPDPSKPSKRSFIEDLLFNKVTLADAGFIKQYGDCLGDIAARDLICAQKFNGLTVLPPLLTDEMIAQYTSALLAGTITSGWTFGAGAALQIPFAMQMAYRFNGIGVTQNVLYENQKLIANQFNSAIGKIQDSLSSTASALGKLQDVVNQNAQALNTLVKQLSSNFGAISSVLNDILSRLDPPEAEVQIDRLITGRLQSLQTYVTQQLIRAAEIRASANLAATKMSECVLGQSKRVDFCGKGYQLMSFPQSAPHGVVFLNVTYVPAQEKNFTTAPAICNDGKAHFPREGVFVSNGTNWFVTQRNFYEPQIITTDNTFVSGNCDVVIGIVNNTVYDPLQPELDSFKEELDKYFKNHTSPDVDLGDISGINASVVNIQKEIDRLNEVAKNLNESLIDLQELGKYEQYIKWPWYIWLGFIAGLIAIVMVTIMLCCMTSCCSCLKGCCSCGSCCKFDEDDSEPVLKGVKLHYT

SEQ ID NO: 575 - protein, 1273 aa, Artificial Sequence
  SARS-CoV-2/Netherlands/ZuidHolland_2/2020__EPI_ISL_414556 spike protein (1-1273)(K986P_V987P_ H1048Q_H1064N_ H1083N_H1101N)
MFVFLVLLPLVSSQCVNLTTRTQLPPAYTNSFTRGVYYPDKVFRSSVLHSTQDLFLPFFSNVTWFHAIHVSGTNGTKRFDNPVLPFNDGVYFASTEKSNIIRGWIFGTTLDSKTQSLLIVNNATNVVIKVCEFQFCNDPFLGVYYHKNNKSWMESEFRVYSSANNCTFEYVSQPFLMDLEGKQGNFKNLREFVFKNIDGYFKIYSKHTPINLVRDLPQGFSALEPLVDLPIGINITRFQTLLALHRSYLTPGDSSSGWTAGAAAYYVGYLQPRTFLLKYNENGTITDAVDCALDPLSETKCTLKSFTVEKGIYQTSNFRVQPTESIVRFPNITNLCPFGEVFNATRFASVYAWNRKRISNCVADYSVLYNSASFSTFKCYGVSPTKLNDLCFTNVYADSFVIRGDEVRQIAPGQTGKIADYNYKLPDDFTGCVIAWNSNNLDSKVGGNYNYLYRLFRKSNLKPFERDISTEIYQAGSTPCNGVEGFNCYFPLQSYGFQPTNGVGYQPYRVVVLSFELLHAPATVCGPKKSTNLVKNKCVNFNFNGLTGTGVLTESNKKFLPFQQFGRDIADTTDAVRDPQTLEILDITPCSFGGVSVITPGTNTSNQVAVLYQGVNCTEVPVAIHADQLTPTWRVYSTGSNVFQTRAGCLIGAEHVNNSYECDIPIGAGICASYQTQTNSPRRARSVASQSIIAYTMSLGAENSVAYSNNSIAIPTNFTISVTTEILPVSMTKTSVDCTMYICGDSTECSNLLLQYGSFCTQLNRALTGIALEQDKNTQEVFAQVKQIYKTPPIKDFGGFNFSQILPDPSKPSKRSFIEDLLFNKVTLADAGFIKQYGDCLGDIAARDLICAQKFNGLTVLPPLLTDEMIAQYTSALLAGTITSGWTFGAGAALQIPFAMQMAYRFNGIGVTQNVLYENQKLIANQFNSAIGKIQDSLSSTASALGKLQDVVNQNAQALNTLVKQLSSNFGAISSVLNDILSRLDPPEAEVQIDRLITGRLQSLQTYVTQQLIRAAEIRASANLAATKMSECVLGQSKRVDFCGKGYQLMSFPQSAPHGVVFLNVTYVPAQEKNFTTAPAICNDGKAHFPREGVFVSNGTNWFVTQRNFYEPQIITTDNTFVSGNCDVVIGIVNNTVYDPLQPELDSFKEELDKYFKNHTSPDVDLGDISGINASVVNIQKEIDRLNEVAKNLNESLIDLQELGKYEQYIKWPWYIWLGFIAGLIAIVMVTIMLCCMTSCCSCLKGCCSCGSCCKFDEDDSEPVLKGVKLHYT

SEQ ID NO: 576 - protein, 1273 aa, Artificial Sequence
  SARS-CoV-2/USA/WA-UW31/2020__EPI_ISL_414618 spike protein (1-1273)(K986P_V987P_ H1048Q_H1064N_ H1083N_H1101N)
MFVFLVLLPLVSSQCVNLTTRTQLPPAYTNSFTRGVYYPDKVFRSSVLHSTQDLFLPFFSNVTWFHAIHVSGTNGTKRFDNPVLPFNDGVYFASTEKSNIIRGWIFGTTLDSKTQSLLIVNNATNVVIKVCEFQFCNDPFLGVYYHKNNKSWMESEFRVYSSANNCTFEYVSQPFLMDLEGKQGNFKNLREFVFKNIDGYFKIYSKHTPINLVRDLPQGFSALEPLVDLPIGINITRFQTLLALHRSYLTPGDSSSGWTAGAAAYYVGYLQPRTFLLKYNENGTITDAVDCALDPLSETKCTLKSFTVEKGIYQTSNFRVQPTESIVRFPNITNLCPFGEVFNATRFASVYAWNRKRISNCVADYSVLYNSASFSTFKCYGVSPTKLNDLCFTNVYADSFVIRGDEVRQIAPGQTGKIADYNYKLPDDFTGCVIAWNSNNLDSKVGGNYNYLYRLFRKSNLKPFERDISTEIYQAGSTPCNGAEGFNCYFPLQSYGFQPTNGVGYQPYRVVVLSFELLHAPATVCGPKKSTNLVKNKCVNFNFNGLTGTGVLTESNKKFLPFQQFGRDIADTTDAVRDPQTLEILDITPCSFGGVSVITPGTNTSNQVAVLYQDVNCTEVPVAIHADQLTPTWRVYSTGSNVFQTRAGCLIGAEHVNNSYECDIPIGAGICASYQTQTNSPRRARSVASQSIIAYTMSLGAENSVAYSNNSIAIPTNFTISVTTEILPVSMTKTSVDCTMYICGDSTECSNLLLQYGSFCTQLNRALTGIAVEQDKNTQEVFAQVKQIYKTPPIKDFGGFNFSQILPDPSKPSKRSFIEDLLFNKVTLADAGFIKQYGDCLGDIAARDLICAQKFNGLTVLPPLLTDEMIAQYTSALLAGTITSGWTFGAGAALQIPFAMQMAYRFNGIGVTQNVLYENQKLIANQFNSAIGKIQDSLSSTASALGKLQDVVNQNAQALNTLVKQLSSNFGAISSVLNDILSRLDPPEAEVQIDRLITGRLQSLQTYVTQQLIRAAEIRASANLAATKMSECVLGQSKRVDFCGKGYQLMSFPQSAPHGVVFLNVTYVPAQEKNFTTAPAICNDGKAHFPREGVFVSNGTNWFVTQRNFYEPQIITTDNTFVSGNCDVVIGIVNNTVYDPLQPELDSFKEELDKYFKNHTSPDVDLGDISGINASVVNIQKEIDRLNEVAKNLNESLIDLQELGKYEQYIKWPWYIWLGFIAGLIAIVMVTIMLCCMTSCCSCLKGCCSCGSCCKFDEDDSEPVLKGVKLHYT

SEQ ID NO: 577 - protein, 1273 aa, Artificial Sequence
  SARS-CoV-2/South Korea/SNU01/2020__EPI_ISL_411929 spike protein (1-1273)(K986P_V987P_ H1048Q_H1064N_ H1083N_H1101N)
MFVFLVLLPLVSSQCVNLTTRTQLPPAYTNSFTRGVYYPDKVFRSSVLHSTQDLFLPFFSNVTWFHAIHVSGTNGTKRFDNPVLPFNDGVYFASTEKSNIIRGWIFGTTLDSKTQSLLIVNNATNVVIKVCEFQFCNDPFLGVYYHKNNKSWMESEFRVYSSANNCTFEYVSQPFLMDLEGKQGNFKNLREFVFKNIDGYFKIYSKHTPINLVRDLPQGFWALEPLVDLPIGINITRFQTLLALHRSYLTPGDSSSGWTAGAAAYYVGYLQPRTFLLKYNENGTITDAVDCALDPLSETKCTLKSFTVEKGIYQTSNFRVQPTESIVRFPNITNLCPFGEVFNATRFASVYAWNRKRISNCVADYSVLYNSASFSTFKCYGVSPTKLNDLCFTNVYADSFVIRGDEVRQIAPGQTGKIADYNYKLPDDFTGCVIAWNSNNLDSKVGGNYNYLYRLFRKSNLKPFERDISTEIYQAGSTPCNGVEGFNCYFPLQSYGFQPTNGVGYQPYRVVVLSFELLHAPATVCGPKKSTNLVKNKCVNFNFNGLTGTGVLTESNKKFLPFQQFGRDIADTTDAVRDPQTLEILDITPCSFGGVSVITPGTNTSNQVAVLYQDVNCTEVPVAIHADQLTPTWRVYSTGSNVFQTRAGCLIGAEHVNNSYECDIPIGAGICASYQTQTNSPRRARSVASQSIIAYTMSLGAENSVAYSNNSIAIPTNFTISVTTEILPVSMTKTSVDCTMYICGDSTECSNLLLQYGSFCTQLNRALTGIAVEQDKNTQEVFAQVKQIYKTPPIKDFGGFNFSQILPDPSKPSKRSFIEDLLFNKVTLADAGFIKQYGDCLGDIAARDLICAQKFNGLTVLPPLLTDEMIAQYTSALLAGTITSGWTFGAGAALQIPFAMQMAYRFNGIGVTQNVLYENQKLIANQFNSAIGKIQDSLSSTASALGKLQDVVNQNAQALNTLVKQLSSNFGAISSVLNDILSRLDPPEAEVQIDRLITGRLQSLQTYVTQQLIRAAEIRASANLAATKMSECVLGQSKRVDFCGKGYQLMSFPQSAPHGVVFLNVTYVPAQEKNFTTAPAICNDGKAHFPREGVFVSNGTNWFVTQRNFYEPQIITTDNTFVSGNCDVVIGIVNNTVYDPLQPELDSFKEELDKYFKNHTSPDVDLGDISGINASVVNIQKEIDRLNEVAKNLNESLIDLQELGKYEQYIKWPWYIWLGFIAGLIAIVMVTIMLCCMTSCCSCLKGCCSCGSCCKFDEDDSEPVLKGVKLHYT

SEQ ID NO: 578 - protein, 1273 aa, Artificial Sequence
  SARS-CoV-2/China/WF0004/2020__EPI_ISL_413694 spike protein (1-1273)(K986P_V987P_ H1048Q_H1064N_ H1083N_H1101N)
MFVFLVLLPLVSSQCVNLTTRTQLPPAYTNSFTRGVYYPDKVFRSSVLHSTQDLFLPFFSNVTWFHAIHVSGTNGTKRFDNPVLPFNDGVYFASTEKSNIIRGWIFGTTLDSKTQSLLIVNNATNVVIKVCEFQFCNDPFLGVYYHKNNKSWTESEFRVYSSANNCTFEYVSQPFLMDLEGKQGNFKNLREFVFKNIDGYFKIYSKHTPINLVRDLPQGFSALEPLVDLPIGINITRFQTLLALHRSYLTPGDSSSGWTAGAAAYYVGYLQPRTFLLKYNENGTITDAVDCALDPLSETKCTLKSFTVEKGIYQTSNFRVQPTESIVRFPNITNLCPFGEVFNATRFASVYAWNRKRISNCVADYSVLYNSASFSTFKCYGVSPTKLNDLCFTNVYADSFVIRGDEVRQIAPGQTGKIADYNYKLPDDFTGCVIAWNSNNLDSKVGGNYNYLYRLFRKSNLKPFERDISTEIYQAGSTPCNGVEGFNCYFPLQSYGFQPTNGVGYQPYRVVVLSFELLHAPATVCGPKKSTNLVKNKCVNFNFNGLTGTGVLTESNKKFLPFQQFGRDIADTTDAVRDPQTLEILDITPCSFGGVSVITPGTNTSNQVAVLYQDVNCTEVPVAIHADQLTPTWRVYSTGSNVFQTRAGCLIGAEHVNNSYECDIPIGAGICASYQTQTNSPRRARSVASQSIIAYTMSLGAENSVAYSNNSIAIPTNFTISVTTEILPVSMTKTSVDCTMYICGDSTECSNLLLQYGSFCTQLNRALTGIAVEQDKNTQEVFAQVKQIYKTPPIKDFGGFNFSQILPDPSKPSKRSFIEDLLFNKVTLADAGFIKQYGDCLGDIAARDLICAQKFNGLTVLPPLLTDEMIAQYTSALLAGTITSGWTFGAGAALQIPFAMQMAYRFNGIGVTQNVLYENQKLIANQFNSAIGKIQDSLSSTASALGKLQDVVNQNAQALNTLVKQLSSNFGAISSVLNDILSRLDPPEAEVQIDRLITGRLQSLQTYVTQQLIRAAEIRASANLAATKMSECVLGQSKRFDFCGKGYQLMSFPQSAPHGVVFLNVTYVPAQEKNFTTAPAICNDGKAHFPREGVFVSNGTNWFVTQRNFYEPQIITTDNTFVSGNCDVVIGIVNNTVYDPLQPELDSFKEELDKYFKNHTSPDVDLGDISGINASVVNIQKEIDRLNEVAKNLNESLIDLQELGKYEQYIKWPWYIWLGFIAGLIAIVMVTIMLCCMTSCCSCLKGCCSCGSCCKFDEDDSEPVLKGVKLHYT

SEQ ID NO: 579 - protein, 1273 aa, Artificial Sequence
  SARS-CoV-2/China/WF0028/2020__EPI_ISL_413791 spike protein (1-1273)(K986P_V987P_ H1048Q_H1064N_ H1083N_H1101N)
MFVFLVLLPLVSSQCVNLTTRTQLPPAYTNSFTRGVYYPDKVFRSSVLHSTQDLFLPFFSNVTWFHAIHVSGTNGTKRFDNPVLPFNDGVYFASTEKSNIIRGWIFGTTLDSKTQSLLIVNNATNVVIKVCEFQFCNDPFLGVYYHKNNKSWMESEFRVYSSANNCTFEYVSQPFLMDLEGKQGNFKNLREFVFKNIDGYFKIYSKHTPINLVRDLPQGFSALEPLVDLPIGINITRFQTLLALHRSYLTPGDSSSGWTAGAAAYYVGYLQPRTFLLKYNENGTITDAVDCALDPLSETKCTLKSFTVEKGIYQTSNFRVQPTESIVRFPNITNLCPFGEVFNATRFASVYAWNRKRISNCVADYSVLYNSASFSTFKCYGVSPTKLNDLCFTNVYADSFVIRGDEVRQIAPGQTGKIADYNYKLPDDFTGCVIAWNSNNLDSKVGGNYNYLYRLFRKSNLKPFERDISTEIYQAGSTPCNGVEGFNCYFPLQSYGFQPTNGVGYQPYRVVVLSFELLHAPATVCGPKKSTNLVKNKCVNFNFNGLTGTGVLTESNKKFLPFQQFGRDIADTTDAVRDPQTLEILDITPCSFGGVSVITPGTNTSNQVAVLYQDVNCTEVPVAIHADQLTPTWRVYSTGSNVFQTRAGCLIGAEHVNNSYECDIPIGAGICASYQTQTNSPRRARSVASQSIIAYTMSLGAENSVAYSNNSIAIPTNFTISVTTEILPVSMTKTSVDCTMYICGDSTECSNLLLQYGSFCTQLNRALTGIAVEQDKNTQEVFAQVKQIYKTPPIKDFGGFNFSQILPDPSKPSKRSFIEDLLFNKVTLADAGFIKQYGDCLGDIAARDLICAQKFNGLTVLPPLLTDEMIAQYTSALLAGTITSGWTFGAGAALQIPFAMQMAYRFNGIGVTQNVLYENQKLIANQFNSAIGKIQDSLSSTASALGKLQDVVNQNAQALNTLVKQLSSNFGAISSVLNDILSRLDPPEAEVQIDRLITGRLQSLQTYVTQQLIRAAEIRASANLAATKMSECVLGQSKRVDFCGKGYQLMSFPQSAPHGVVFLNVTYVPAQEKNFTTAPAICNDGKAHFPREGVFVSNGTNWFVTQRNFYEPQIITTDNTFVSGNCDVVIGIVNNTVYDPLQPELESFKEELDKYFKNHTSPDVDLGDISGINASVVNIQKEIDRLNEVAKNLNESLIDLQELGKYEQYIKWPWYIWLGFIAGLIAIVMVTIMLCCMTSCCSCLKGCCSCGSCCKFDEDDSEPVLKGVKLHYT

SEQ ID NO: 580 - protein, 1273 aa, Artificial Sequence
  SARS-CoV-2/2019-nCoV/USA-CruiseA-18/2020__MT159716.1 spike protein (1-1273)(K986P_V987P_ H1048Q_H1064N_ H1083N_H1101N)
MFVFLVLLPLVSSQCVNLTTRTQLPPAYTNSFTRGVYYPDKVFRSSVLHSTQDLFLPFFSNVTWFHAIHVSGTNGTKRFDNPVLPFNDGVYFASTEKSNIIRGWIFGTTLDSKTQSLLIVNNATNVVIKVCEFQFCNDPFLGVYYHKNNKSWMESELRVYSSANNCTFEYVSQPFLMDLEGKQGNFKNLREFVFKNIDGYFKIYSKHTPINLVRDLPQGFSALEPLVDLPIGINITRFQTLLALHRSYLTPGDSSSGWTAGAAAYYVGYLQPRTFLLKYNENGTITDAVDCALDPLSETKCTLKSFTVEKGIYQTSNFRVQPTESIVRFPNITNLCPFGEVFNATRFASVYAWNRKRISNCVADYSVLYNSASFSTFKCYGVSPTKLNDLCFTNVYADSFVIRGDEVRQIAPGQTGKIADYNYKLPDDFTGCVIAWNSNNLDSKVGGNYNYLYRLFRKSNLKPFERDISTEIYQAGSTPCNGVEGFNCYFPLQSYGFQPTNGVGYQPYRVVVLSFELLHAPATVCGPKKSTNLVKNKCVNFNFNGLTGTGVLTESNKKFLPFQQFGRDIADTTDAVRDPQTLEILDITPCSFGGVSVITPGTNTSNQVAVLYQDVNCTEVPVAIHADQLTPTWRVYSTGSNVFQTRAGCLIGAEHVNNSYECDIPIGAGICASYQTQTNSPRRARSVASQSIIAYTMSLGAENSVAYSNNSIAIPTNFTISVTTEILPVSMTKTSVDCTMYICGDSTECSNLLLQYGSFCTQLNRALTGIAVEQDKNTQEVFAQVKQIYKTPPIKDFGGFNFSQILPDPSKPSKRSFIEDLLFNKVTLADAGFIKQYGDCLGDIAARDLICAQKFNGLTVLPPLLTDEMIAQYTSALLAGTITSGWTFGAGAALQIPFAMQMAYRFNGIGVTQNVLYENQKLIANQFNSAIGKIQDSLSSTASALGKLQDVVNQNAQALNTLVKQLSSNFGAISSVLNDILSRLDPPEAEVQIDRLITGRLQSLQTYVTQQLIRAAEIRASANLAATKMSECVLGQSKRVDFCGKGYQLMSFPQSAPHGVVFLNVTYVPAQEKNFTTAPAICNDGKAHFPREGVFVSNGTNWFVTQRNFYEPQIITTDNTFVSGNCDVVIGIVNNTVYDPLQPELDSFKEELDKYFKNHTSPDVDLGDISGINASVVNIQKEIDRLNEVAKNLNESLIDLQELGKYEQYIKWPWYIWLGFIAGLIAIVMVTIMLCCMTSCCSCLKGCCSCGSCCKFDEDDSEPVLKGVKLHYT

SEQ ID NO: 581 - protein, 1273 aa, Artificial Sequence
  SARS-CoV-2/SARS-CoV-2/Yunnan-01/human/2020/CHN__MT049951.1 spike protein (1-1273)(K986P_V987P_ H1048Q_H1064N_ H1083N_H1101N)
MFVFLVLLPLVSSQCVNLTTRTQLPPANTNSFTRGVYYPDKVFRSSVLHSTQDLFLPFFSNVTWFHAIHVSGTNGTKRFDNPVLPFNDGVYFASTEKSNIIRGWIFGTTLDSKTQSLLIVNNATNVVIKVCEFQFCNDPFLGVYYHKNNKSWMESEFRVYSSANNCTFEYVSQPFLMDLEGKQGNFKNLREFVFKNIDGYFKIYSKHTPINLVRDLPQGFSALEPLVDLPIGINITRFQTLLALHRSYLTPGDSSSGWTAGAAAYYVGYLQPRTFLLKYNENGTITDAVDCALDPLSETKCTLKSFTVEKGIYQTSNFRVQPTESIVRFPNITNLCPFGEVFNATRFASVYAWNRKRISNCVADYSVLYNSASFSTFKCYGVSPTKLNDLCFTNVYADSFVIRGDEVRQIAPGQTGKIADYNYKLPDDFTGCVIAWNSNNLDSKVGGNYNYLYRLFRKSNLKPFERDISTEIYQAGSTPCNGVEGFNCYFPLQSYGFQPTNGVGYQPYRVVVLSFELLHAPATVCGPKKSTNLVKNKCVNFNFNGLTGTGVLTESNKKFLPFQQFGRDIADTTDAVRDPQTLEILDITPCSFGGVSVITPGTNTSNQVAVLYQDVNCTEVPVAIHADQLTPTWRVYSTGSNVFQTRAGCLIGAEHVNNSYECDIPIGAGICASYQTQTNSPRRARSVASQSIIAYTMSLGAENSVAYSNNSIAIPTNFTISVTTEILPVSMTKTSVDCTMYICGDSTECSNLLLQYGSFCTQLNRALTGIAVEQDKNTQEVFAQVKQIYKTPPIKDFGGFNFSQILPDPSKPSKRSFIEDLLFNKVTLADAGFIKQYGDCLGDIAARDLICAQKFNGLTVLPPLLTDEMIAQYTSALLAGTITSGWTFGAGAALQIPFAMQMAYRFNGIGVTQNVLYENQKLIANQFNSAIGKIQDSLSSTASALGKLQDVVNQNAQALNTLVKQLSSNFGAISSVLNDILSRLDPPEAEVQIDRLITGRLQSLQTYVTQQLIRAAEIRASANLAATKMSECVLGQSKRVDFCGKGYQLMSFPQSAPHGVVFLNVTYVPAQEKNFTTAPAICNDGKAHFPREGVFVSNGTNWFVTQRNFYEPQIITTDNTFVSGNCDVVIGIVNNTVYDPLQPELDSFKEELDKYFKNHTSPDVDLGDISGINASVVNIQKEIDRLNEVAKNLNESLIDLQELGKYEQYIKWPWYIWLGFIAGLIAIVMVTIMLCCMTSCCSCLKGCCSCGSCCKFDEDDSEPVLKGVKLHYT

SEQ ID NO: 582 - protein, 1273 aa, Artificial Sequence
  SARS-CoV-2/USA/WA-UW292/2020__EPI_ISL_418077 spike protein (1-1273)(K986P_V987P_ H1048Q_H1064N_ H1083N_H1101N)
MFVFLVLLPLVSSQCVNLTTRTQLPPAYTNSFTRGVYYPDKVFRSSVLHSTQDLFLPFFSNVTWFHAIHVSGTNGTKRFDNPVLPFNDGVYFASTEKSNIIRGWIFGTTLDSKTQSLLIVNNATNVVIKVCEFQFCNDPFLGVYYHKNNKSWMESEFRVYSSANNCTFEYVSQPFLMDLEGKQGNFKNLREFVFKNIDGYFKIYSKHTPINLVRDLPQGFSALEPLVDLPIGINITRFQTLLALHRSYLTPGDSSSGWTAGAAAYYVGYLQPRTFLLKYNENGTITDAVDCALDPLSETKCTLKSFTVEKGIYQTSNFRVQPTESIVRFPNITNLCPFGEVFNATRFASVYAWNRKRISNCVADYSVLYNSASFSTFKCYGVSPTKLNDLCFTNVYADSFVIRGDEVRQIAPGQTGKIADYNYKLPDDFTGCVIAWNSNNLDSKVGGNYNYLYRLFRKSNLKPFERDISTEIYQASSTPCNGVEGFNCYFPLQSYGFQPTNGVGYQPYRVVVLSFELLHAPATVCGPKKSTNLVKNKCVNFNFNGLTGTGVLTESNKKFLPFQQFGRDIADTTDAVRDPQTLEILDITPCSFGGVSVITPGTNTSNQVAVLYQDVNCTEVPVAIHADQLTPTWRVYSTGSNVFQTRAGCLIGAEHVNNSYECDIPIGAGICASYQTQTNSPRRARSVASQSIIAYTMSLGAENSVAYSNNSIAIPTNFTISVTTEILPVSMTKTSVDCTMYICGDSTECSNLLLQYGSFCTQLNRALTGIAVEQDKNTQEVFAQVKQIYKTPPIKDFGGFNFSQILPDPSKPSKRSFIEDLLFNKVTLADAGFIKQYGDCLGDIAARDLICAQKFNGLTVLPPLLTDEMIAQYTSALLAGTITSGWTFGAGAALQIPFAMQMAYRFNGIGVTQNVLYENQKLIANQFNSAIGKIQDSLSSTASALGKLQDVVNQNAQALNTLVKQLSSNFGAISSVLNDILSRLDPPEAEVQIDRLITGRLQSLQTYVTQQLIRAAEIRASANLAATKMSECVLGQSKRVDFCGKGYQLMSFPQSAPHGVVFLNVTYVPAQEKNFTTAPAICNDGKAHFPREGVFVSNGTNWFVTQRNFYEPQIITTDNTFVSGNCDVVIGIVNNTVYDPLQPELDSFKEELDKYFKNHTSPDVDLGDISGINASVVNIQKEIDRLNEVAKNLNESLIDLQELGKYEQYIKWPWYIWLGFIAGLIAIVMVTIMLCCMTSCCSCLKGCCSCGSCCKFDEDDSEPVLKGVKLHYT

SEQ ID NO: 583 - protein, 1273 aa, Artificial Sequence
  SARS-CoV-2/Iceland/192/2020__EPI_ISL_417819 spike protein (1-1273)(K986P_V987P_ H1048Q_H1064N_ H1083N_H1101N)
MFVFFVLLPLVSSQCVNLTTRTQLPPAYTNSFTRGVYYPDKVFRSSVLHSTQDLFLPFFSNVTWFHAIHVSGTNGTKRFDNPVLPFNDGVYFASTEKSNIIRGWIFGTTLDSKTQSLLIVNNATNVVIKVCEFQFCNDPFLGVYYHKNNKSWMESEFRVYSSANNCTFEYVSQPFLMDLEGKQGNFKNLREFVFKNIDGYFKIYSKHTPINLVRDLPQGFSALEPLVDLPIGINITRFQTLLALHRSYLTPGDSSSGWTAGAAAYYVGYLQPRTFLLKYNENGTITDAVDCALDPLSETKCTLKSFTVEKGIYQTSNFRVQPTESIVRFPNITNLCPFGEVFNATRFASVYAWNRKRISNCVADYSVLYNSASFSTFKCYGVSPTKLNDLCFTNVYADSFVIRGDEVRQIAPGQTGKIADYNYKLPDDFTGCVIAWNSNNLDSKVGGNYNYLYRLFRKSNLKPFERDISTEIYQAGSTPCNGVEGFNCYFPLQSYGFQPTNGVGYQPYRVVVLSFELLHAPATVCGPKKSTNLVKNKCVNFNFNGLTGTGVLTESNKKFLPFQQFGRDIADTTDAVRDPQTLEILDITPCSFGGVSVITPGTNTSNQVAVLYQGVNCTEVPVAIHADQLTPTWRVYSTGSNVFQTRAGCLIGAEHVNNSYECDIPIGAGICASYQTQTNSPRRARSVASQSIIAYTMSLGAENSVAYSNNSIAIPTNFTISVTTEILPVSMTKTSVDCTMYICGDSTECSNLLLQYGSFCTQLNRALTGIAVEQDKNTQEVFAQVKQIYKTPPIKDFGGFNFSQILPDPSKPSKRSFIEDLLFNKVTLADAGFIKQYGDCLGDIAARDLICAQKFNGLTVLPPLLTDEMIAQYTSALLAGTITSGWTFGAGAALQIPFAMQMAYRFNGIGVTQNVLYENQKLIANQFNSAIGKIQDSLSSTASALGKLQDVVNQNAQALNTLVKQLSSNFGAISSVLNDILSRLDPPEAEVQIDRLITGRLQSLQTYVTQQLIRAAEIRASANLAATKMSECVLGQSKRVDFCGKGYQLMSFPQSAPHGVVFLNVTYVPAQEKNFTTAPAICNDGKAHFPREGVFVSNGTNWFVTQRNFYEPQIITTDNTFVSGNCDVVIGIVNNTVYDPLQPELDSFKEELDKYFKNHTSPDVDLGDISGINASVVNIQKEIDRLNEVAKNLNESLIDLQELGKYEQYIKWPWYIWLGFIAGLIAIVMVTIMLCCMTSCCSCLKGCCSCGSCCKFDEDDSEPVLKGVKLHYT

SEQ ID NO: 584 - protein, 1273 aa, Artificial Sequence
  SARS-CoV-2/Belgium/ULG-6939/2020__EPI_ISL_417020 spike protein (1-1273)(K986P_V987P_ H1048Q_H1064N_ H1083N_H1101N)
MFVFLVLLPLVSSQCVNLTTRTQLPPAYTNSFTRGVYYPDKVFRSSVLHSTQDLFLPFFSNVTWFHAIHVSGTNGTKRFDNPVLPFNDGVYFASTEKSNIIRGWIFGTTLDSKTQSLLIVNNATNVVIKVCEFQFCNDPFLGVYYHKNNKSWMESEFRVYSSANNCTFEYVSQPFLMDLEGKQGNFKNLREFVFKNIDGYFKIYSKHTPINLVRDLPQGFSALEPLVDLPIGINITRFQTLLALHRSYLTPGDSSSGWTAGAAAYYVGYLQPRTFLLKYNENGTITDAVDCALDPLSETKCTLKSFTVEKGIYQTSNFRVQPTESIVRFPNITNLCPFGEVFNATRFASVYAWNRKRISNCVADYSVLYNSASFSTFKCYGVSPTKLNDLCFTNVYADSFVIRGDEVRQIAPGQTGKIADYNYKLPDDFTGCVIAWNSNNLDSKVGGNYNYLYRLFRKSNLKPFERDISTEIYQAGSTPCNGVEGFNCYFPLQSYGFQPTNGVGYQPYRVVVLSFELLHAPATVCGPKKSTNLVKNKCVNFNFNGLTGTGVLTESNKKFLPFQQFGRDIADTTDAVRDPQTLEILDITPCSFGGVSVITPGTNTSNQVAVLYQGVNCTEVPVAIHADQLTPTWRVYSTGSNVFQTRAGCLIGAEHVNNSYECDIPIGAGICASYQTQTNSPRRARSVASQSIIAYTMSLGAENSVVYSNNSIAIPTNFTISVTTEILPVSMTKTSVDCTMYICGDSTECSNLLLQYGSFCTQLNRALTGIAVEQDKNTQEVFAQVKQIYKTPPIKDFGGFNFSQILPDPSKPSKRSFIEDLLFNKVTLADAGFIKQYGDCLGDIAARDLICAQKFNGLTVLPPLLTDEMIAQYTSALLAGTITSGWTFGAGAALQIPFAMQMAYRFNGIGVTQNVLYENQKLIANQFNSAIGKIQDSLSSTASALGKLQDVVNQNAQALNTLVKQLSSNFGAISSVLNDILSRLDPPEAEVQIDRLITGRLQSLQTYVTQQLIRAAEIRASANLAATKMSECVLGQSKRVDFCGKGYQLMSFPQSAPHGVVFLNVTYVPAQEKNFTTAPAICNDGKAHFPREGVFVSNGTNWFVTQRNFYEPQIITTDNTFVSGNCDVVIGIVNNTVYDPLQPELDSFKEELDKYFKNHTSPDVDLGDISGINASVVNIQKEIDRLNEVAKNLNESLIDLQELGKYEQYIKWPWYIWLGFIAGLIAIVMVTIMLCCMTSCCSCLKGCCSCGSCCKFDEDDSEPVLKGVKLHYT

SEQ ID NO: 585 - protein, 1273 aa, Artificial Sequence
  SARS-CoV-2/France/HF2496/2020__EPI_ISL_418231 spike protein (1-1273)(K986P_V987P_ H1048Q_H1064N_ H1083N_H1101N)
MFVFLVLLPLVSSQCVNLTTRTQLPPAYTNSFTRGVYYPDKVFRSSVLHSTQDLFLPFFSNVTWFHAIHVSGTNGTKRFDNPVLPFNDGVYFASTEKSNIIRGWIFGTTLDSKTQSLLIVNNATNVVIKVCEFQFCNDPFLGVYYHKNNKSWMESEFRVYSSANNCTFEYVSQPFLMDLEGKQGNFKNLREFVFKNIDGYFKIYSKHTPINLVRDLPQGFSALEPLVDLPIGINITRFQTLLALHRSYLTPGDSSSGWTAGAAAYYVGYLQPRTFLLKYNENGTITDAVDCALDPLSETKCTLKSFTVEKGIYQTSNFRVQPTESIVRFPNITNLCPFGEVFNATRFASVYAWNRKRISNCVADYSVLYNSASFSTFKCYGVSPTKLNDLCFTNVYADSFVIRGDEVRQIAPGQTGKIADYNYKLPDDFTGCVIAWNSNNLDSKVGGNYNYLYRLFRKSNLKPFERDISTEIYQAGSTPCNGVEGFNCYFPLQSYGFQPTNGVGYQPYRVVVLSFELLHAPATVCGPKKSTNLVKNKCVNFNFNGLTGTGVLTESNKKFLPFQQFGRDIADTTDAVRDPQTLEILDITPCSFGGVSVITPGTNTSNQVAVLYQGVNCTEVPVAIHADQLTPTWRVYSTGSNVFQTRAGCLIGAEHVNNSYECDIPIGAGICASYQTQTNSPRRARSVASQSIIAYTMSLGAENSVAYSNNSIAIPTNFTISVTTEILPVSMTKTSVDCTMYICGDSTECSNLLLQYGSFCTQLNRALTGIAVEQDKNTQEVFAQVKQIYKTPPIKDFGGFNFSQILPDPSKPSKRSFIEDLLFNKVTLADAGFIKQYGDCLGDIVARDLICAQKFNGLTVLPPLLTDEMIAQYTSALLAGTITSGWTFGAGAALQIPFAMQMAYRFNGIGVTQNVLYENQKLIANQFNSAIGKIQDSLSSTASALGKLQDVVNQNAQALNTLVKQLSSNFGAISSVLNDILSRLDPPEAEVQIDRLITGRLQSLQTYVTQQLIRAAEIRASANLAATKMSECVLGQSKRVDFCGKGYQLMSFPQSAPHGVVFLNVTYVPAQEKNFTTAPAICNDGKAHFPREGVFVSNGTNWFVTQRNFYEPQIITTDNTFVSGNCDVVIGIVNNTVYDPLQPELDSFKEELDKYFKNHTSPDVDLGDISGINASVVNIQKEIDRLNEVAKNLNESLIDLQELGKYEQYIKWPWYIWLGFIAGLIAIVMVTIMLCCMTSCCSCLKGCCSCGSCCKFDEDDSEPVLKGVKLHYT

SEQ ID NO: 586 - protein, 1273 aa, Artificial Sequence
  SARS-CoV-2/USA/WA-UW291/2020__EPI_ISL_418076 spike protein (1-1273)(K986P_V987P_ H1048Q_H1064N_ H1083N_H1101N)
MFVFLVLLPLVSSQCVNLTTRTQLPPAYTNSFTRGVYYPDKVFRSSVLHSTQDLFLPFFSNVTWFHAIHVSGTNGTKRFDNPVLPFNDGVYFASTEKSNIIRGWIFGTTLDSKTQSLLIVNNATNVVIKVCEFQFCNDPFLGVYYHKNNKSWMESEFRVYSSANNCTFEYVSQPFLMDLEGKQGNFKNLREFVFKNIDGYFKIYSKHTPINLVRDLPQGFSALEPLVDLPIGINITRFQTLLALHRSYLTPGDSSSGWTAGAAAYYVGYLQPRTFLLKYNENGTITDAVDCALDPLSETKCTLKSFTVEKGIYQTSNFRVQPTESIVRFPNITNLCPFGEVFNATRFASVYAWNRKRISNCVADYSVLYNSASFSTFKCYGVSPTKLNDLCFTNVYADSFVIRGDEVRQIAPGQTGKIADYNYKLPDDFTGCVIAWNSNNLDSKVGGNYNYLYRLFRKSNLKPFERDISTEIYQAGSTPCNGVEGFNCYFPLQSYGFQPTNGVGYQPYRVVVLSFELLHAPATVCGPKKSTNLVKNKCVNFNFNGLTGTGVLTESNKKFLPFQQFGRDIADTTDAVRDPQTLEILDITPCSFGGVSVITPGTNTSNQVAVLYQGVNCTEVPVAIHADQLTPTWRVYSTGSNVFQTRAGCLIGAEHVNNSYECDIPIGAGICASYQTQTNSPRRARSVASQSIIAYTMSLGAENSVAYSNNSIAIPTNFTISVTTEILPVSMTKTSVDCTMYICGDSTECSNLLLQYGSFCTQLNRALTGIAVEQDKNTQEVFAQVKQIYKTPPIKDFGGFNFSQILPDPSKPSKRSFIEDLLFNKVTLADAGFIKQYGDCLGDIAARDLICAQKFNGLTVLPPLLTDEMIAQYTSALLAGTITSGWTFGAGAALQIPFAMQMAYRFNGIGVTQNVLYENQKLIANQFNSAIGKIQYSLSSTASALGKLQDVVNQNAQALNTLVKQLSSNFGAISSVLNDILSRLDPPEAEVQIDRLITGRLQSLQTYVTQQLIRAAEIRASANLAATKMSECVLGQSKRVDFCGKGYQLMSFPQSAPHGVVFLNVTYVPAQEKNFTTAPAICNDGKAHFPREGVFVSNGTNWFVTQRNFYEPQIITTDNTFVSGNCDVVIGIVNNTVYDPLQPELDSFKEELDKYFKNHTSPDVDLGDISGINASVVNIQKEIDRLNEVAKNLNESLIDLQELGKYEQYIKWPWYIWLGFIAGLIAIVMVTIMLCCMTSCCSCLKGCCSCGSCCKFDEDDSEPVLKGVKLHYT

SEQ ID NO: 587 - protein, 1273 aa, Artificial Sequence
  SARS-CoV-2/Portugal/PT0034/2020__EPI_ISL_418019 spike protein (1-1273)(K986P_V987P_ H1048Q_H1064N_ H1083N_H1101N)
MFVFLVLLPLVSSQCVNLTTRTQLPPAYTNSFTRGVYYPDKVFRSSVLHSTQDLFLPFFSNVTWFHAIHVSGTNGTKRFDNPVLPFNDGVYFASTEKSNIIRGWIFGTTLDSKTQSLLIVNNATNVVIKVCEFQFCNDPFLGVYYHKNNKSWMESEFRVYSSANNCTFEYVSQPFLMDLEGKQGNFKNLREFVFKNIDGYFKIYSKHTPINLVRDLPQGFSALEPLVDLPIGINITRFQTLLALHRSYLTPGDSSSGWTAGAAAYYVGYLQPRTFLLKYNENGTITDAVDCALDPLSETKCTLKSFTVEKGIYQTSNFRVQPTESIVRFPNITNLCPFGEVFNATRFASVYAWNRKRISNCVADYSVLYNSASFSTFKCYGVSPTKLNDLCFTNVYADSFVIRGDEVRQIAPGQTGKIADYNYKLPDDFTGCVIAWNSNNLDSKVGGNYNYLYRLFRKSNLKPFERDISTEIYQAGSTPCNGVEGFNCYFPLQSYGFQPTNGVGYQPYRVVVLSFELLHAPATVCGPKKSTNLVKNKCVNFNFNGLTGTGVLTESNKKFLPFQQFGRDIADTTDAVRDPQTLEILDITPCSFGGVSVITPGTNTSNQVAVLYQGVNCTEVPVAIHADQLTPTWRVYSTGSNVFQTRAGCLIGAEHVNNSYECDIPIGAGICASYQTQTNSPRRARSVASQSIIAYTMSLGAENSVAYSNNSIAIPTNFTISVTTEILPVSMTKTSVDCTMYICGDSTECSNLLLQYGSFCTQLNRALTGIAVEQDKNTQEVFAQVKQIYKTPPIKDFGGFNFSQILPDPSKPSKRSFIEDLLFNKVTLADAGFIKQYGDCLGDIAARDLICAQKFNGLTVLPPLLTDEMIAQYTSALLAGTITSGWTFGAGAALQIPFAMQMAYRFNGIGVTQNVLYENQKLIANQFNSAIGKIQDSLSSTASALGKLQDVVNQNAQALNTLVKQLSSNFGAISSVLNDILSRLDPPEAEVQIDRLITGRLQSLQTYVTQQLIRAAEIRASANLAATKMSECVLGQSKRVDFCGKGYQLMSFPQSAPHGVVFLNVTYVPAQEKNFTTAPAICNDGKAHFPREGVFVSNGTNWFVTQRNFYEPQIITTDNTFVSGNCDVVIGIVNNTVYDPLQPELDSFKEELDKYFKNHTSPDVDLGDISGINASVVNIQKEIDRLNEVAKNLNESLIDLQELGKYEQYIKWPWYIWLGFIAGLIAIVMVTIMLCCITSCCSCLKGCCSCGSCCKFDEDDSEPVLKGVKLHYT

SEQ ID NO: 588 - protein, 1273 aa, Artificial Sequence
  SARS-CoV-2/Iceland/202/2020__EPI_ISL_417750 spike protein (1-1273)(K986P_V987P_ H1048Q_H1064N_ H1083N_H1101N)
MFVFLVLLPLVSSQCVNLTTRTQLPPAYTNSFTRGVYYPDKVFRSSVLHSTQDLFLPFFSNVTWFHAIHVSGTNGTKRFDNPVLPFNDGVYFASTEKSNIIRGWIFGTTLDSKTQSLLIVNNATNVVIKVCEFQFCNDPFLGVYYHKNNKSWMESEFRVYSSANNCTFEYVSQPFLMDLEGKQGNFKNLREFVFKNIDGYFKIYSKHTPINLVRDLPQGFSALEPLVDLPIGINITRFQTLLALHRSYLTPGDSSSGWTAGAAAYYVGYLQPRTFLLKYNENGTITDAVDCALDPLSETKCTLKSFTVEKGIYQTSNFRVQPTESIVRFPNITNLCPFGEVFNATRFASVYAWNRKRISNCVADYSVLYNSASFSTFKCYGVSPTKLNDLCFTNVYADSFVIRGDEVRQIAPGQTGKIADYNYKLPDDFTGCVIAWNSNNLDSKVGGNYNYLYRLFRKSNLKPFERDISTEIYQAGSTPCNGVEGFNCYFPLQSYGFQPTNGVGYQPYRVVVLSFELLHAPATVCGPKKSTNLVKNKCVNFNFNGLTGTGVLTESNKKFLPFQQFGRDIADTTDAVRDPQTLEILDITPCSFGGVSVITPGTNTSNQVAVLYQDVNCTEVPVAIHADQLTPTWRVYSTGSNVFQTRAGCLIGAEHVNNSYECDIPIGAGICASYQTQTNSPRRARSVASQSIIAYTMSLGAENSVAYSNNSIAIPTNFTISVTTEILPVSMTKTSVDCTMYICGDSTECSNLLLQYGSFCTQLNRALTGIAVEQDKNTQEVFAQVKQIYKTPPIKDFGGFNFSQILPDPSKPSKRSFIEDLLFNKVTLADAGFIKQYGDCLGDIAARDLICAQKFNGLTVLPPLLTDEMIAQYTSALLAGTITSGWTFGAGAALQIPFAMQMAYRFNGIGVTQNVLYENQKLIANQFNSAIGKIQDSLSSTASALGKLQDVVNQNAQALNTLVKQLSSNFGAISSVLNDILSRLDPPEAEVQIDRLITGRLQSLQTYVTQQLIRAAEIRASANLAATKMSECVLGQSKRVDFCGKGYQLMSFPQSAPHGVVFLNVTYVPAQEKNFTTAPAICNDGKAHFPREGVFVSNGTNWFVTQRNFYEPQIITTDNTFVSGNCDVVIGIVNNTVYDPLQPELDSFKEELDKYFKNHTSPDVDLGDIPGINASVVNIQKEIDRLNEVAKNLNESLIDLQELGKYEQYIKWPWYIWLGFIAGLIAIVMVTIMLCCMTSCCSCLKGCCSCGSCCKFDEDDSEPVLKGVKLHYT

SEQ ID NO: 589 - protein, 1273 aa, Artificial Sequence
  SARS-CoV-2/USA/WA-UW261/2020__EPI_ISL_418046 spike protein (1-1273)(K986P_V987P_ H1048Q_H1064N_ H1083N_H1101N)
MFVFLVLLPLVSSQCVNLTTRTQLPPAYTNSFTRGVYYPDKVFRSSVLHSTQDLFLPFFSNVTWFHAIHVSGTNGTKRFDNPVLPFNDGVYFASTEKSNIIRGWIFGTTLDSKTQSLLIVNNATNVVIKVCEFQFCNDPFLGVYYHKNNKSWMESEFRVYSSANNCTFEYVSQPFLMDLEGKQGNFKNLREFVFKNIDGYFKIYSKHTPINLVRDLPQGFSALEPLVDLPIGINITRFQTLLALHRSYLTPGDSSSGWTAGAAAYYVGYLQPRTFLLKYNENGTITDAVDCALDPLSETKCTLKSFTVEKGIYQTSNFRVQPTESIVRFPNITNLCPFGEVFNATRFTSVYAWNRKRISNCVADYSVLYNSASFSTFKCYGVSPTKLNDLCFTNVYADSFVIRGDEVRQIAPGQTGKIADYNYKLPDDFTGCVIAWNSNNLDSKVGGNYNYLYRLFRKSNLKPFERDISTEIYQAGSTPCNGVEGFNCYFPLQSYGFQPTNGVGYQPYRVVVLSFELLHAPATVCGPKKSTNLVKNKCVNFNFNGLTGTGVLTESNKKFLPFQQFGRDIADTTDAVRDPQTLEILDITPCSFGGVSVITPGTNTSNQVAVLYQDVNCTEVPVAIHADQLTPTWRVYSTGSNVFQTRAGCLIGAEHVNNSYECDIPIGAGICASYQTQTNSPRRARSVASQSIIAYTMSLGAENSVAYSNNSIAIPTNFTISVTTEILPVSMTKTSVDCTMYICGDSTECSNLLLQYGSFCTQLNRALTGIAVEQDKNTQEVFAQVKQIYKTPPIKDFGGFNFSQILPDPSKPSKRSFIEDLLFNKVTLADAGFIKQYGDCLGDIAARDLICAQKFNGLTVLPPLLTDEMIAQYTSALLAGTITSGWTFGAGAALQIPFAMQMAYRFNGIGVTQNVLYENQKLIANQFNSAIGKIQDSLSSTASALGKLQDVVNQNAQALNTLVKQLSSNFGAISSVLNDILSRLDPPEAEVQIDRLITGRLQSLQTYVTQQLIRAAEIRASANLAATKMSECVLGQSKRVDFCGKGYQLMSFPQSAPHGVVFLNVTYVPAQEKNFTTAPAICNDGKAHFPREGVFVSNGTNWFVTQRNFYEPQIITTDNTFVSGNCDVVIGIVNNTVYDPLQPELDSFKEELDKYFKNHTSPDVDLGDISGINASVVNIQKEIDRLNEVAKNLNESLIDLQELGKYEQYIKWPWYIWLGFIAGLIAIVMVTIMLCCMTSCCSCLKGCCSCGSCCKFDEDDSEPVLKGVKLHYT

SEQ ID NO: 590 - protein, 1273 aa, Artificial Sequence
  SARS-CoV-2/Portugal/PT0035/2020__EPI_ISL_418020 spike protein (1-1273)(K986P_V987P_ H1048Q_H1064N_ H1083N_H1101N)
MFVFLVLLPLVSSQCVNLTTRTQLPPAYTNSFTRGVYYPDKVFRSSVLHSTQDLFLPFFSNVTWFHAIHVSGTNGTKRFDNPVLPFNDGVYFASTEKSNIIRGWIFGTTLDSKTQSLLIVNNATNVVIKVCEFQFCNDPFLGVYYHKNNKSWMESEFRVYSSANNCTFEYVSQPFLMDLEGKQGNFKNLREFVFKNIDGYFKIYSKHTPINLVRDLPQGFSALEPLVDLPIGINITRFQTLLALHRSYLTPGDSSSGWTAGAAAYYVGYLQPRTFLLKYNENGTITDAVDCALDPLSETKCTLKSFTVEKGIYQTSNFRVQPTESIVRFPNITNLCPFGEVFNATRFASVYAWNRKRISNCVADYSVLYNSASFSTFKCYGVSPTKLNDLCFTNVYADSFVIRGDEVRQIAPGQTGKIADYNYKLPDDFTGCVIAWNSNNLDSKVGGNYNYLYRLFRKSNLKPFERDISTEIYQAGSTPCNGVEGFNCYFPLQSYGFQPTNGVGYQPYRVVVLSFELLHAPATVCGPKKSTNLVKNKCVNFNFNGLTGTGVLTESNKKFLPFQQFGRDIADTTDAVRDPQTLEILDITPCSFGGVSVITPGTNTSNQVAVLYQDVNCTEVPVAIHADQLTPTWRVYSTGSNVFQTRAGCLIGAEHVNNSYECDIPIGAGICASYQTQTNSPRRARSVASQSIIAYTMSLGAENSVAYSNNSIAIPTNFTISVTTEILPVSMTKTSVDCTMYICGDSTECSNLLLQYGSFCTQLNRALTGIAVEQDKNTQEVFAQVKQIYKTPPIKDFGGFNFSQILPDPSKPSKRSFIEDLLFNKVTLADAGFIKQYGDCLGDISARDLICAQKFNGLTVLPPLLTDEMIAQYTSALLAGTITSGWTFGAGAALQIPFAMQMAYRFNGIGVTQNVLYENQKLIANQFNSAIGKIQDSLSSTASALGKLQDVVNQNAQALNTLVKQLSSNFGAISSVLNDILSRLDPPEAEVQIDRLITGRLQSLQTYVTQQLIRAAEIRASANLAATKMSECVLGQSKRVDFCGKGYQLMSFPQSAPHGVVFLNVTYVPAQEKNFTTAPAICNDGKAHFPREGVFVSNGTNWFVTQRNFYEPQIITTDNTFVSGNCDVVIGIVNNTVYDPLQPELDSFKEELDKYFKNHTSPDVDLGDISGINASVVNIQKEIDRLNEVAKNLNESLIDLQELGKYEQYIKWPWYIWLGFIAGLIAIVMVTIMLCCMTSCCSCLKGCCSCGSCCKFDEDDSEPVLKGVKLHYT

SEQ ID NO: 591 - protein, 1273 aa, Artificial Sequence
  SARS-CoV-2/USA/NY-NYUMC7/2020__EPI_ISL_418192 spike protein (1-1273)(K986P_V987P_ H1048Q_H1064N_ H1083N_H1101N)
MFVFLVLLPLVSSQCVNLTTRTQLPPAYTNSFTRGVYYPDKVFRSSVLHSTQDLFLPFFSNVTWFHAIHVSGTNGTKRFDNPVLPFNDGVYFASTEKSNIIRGWIFGTTLDSKTQSLLIVNNATNVVIKVCEFQFCNDPFLGVYHHKNNKSWMESEFRVYSSANNCTFEYVSQPFLMDLEGKQGNFKNLREFVFKNIDGYFKIYSKHTPINLVRDLPQGFSALEPLVDLPIGINITRFQTLLALHRSYLTPGDSSSGWTAGAAAYYVGYLQPRTFLLKYNENGTITDAVDCALDPLSETKCTLKSFTVEKGIYQTSNFRVQPTESIVRFPNITNLCPFGEVFNATRFASVYAWNRKRISNCVADYSVLYNSASFSTFKCYGVSPTKLNDLCFTNVYADSFVIRGDEVRQIAPGQTGKIADYNYKLPDDFTGCVIAWNSNNLDSKVGGNYNYLYRLFRKSNLKPFERDISTEIYQAGSTPCNGVEGFNCYFPLQSYGFQPTNGVGYQPYRVVVLSFELLHAPATVCGPKKSTNLVKNKCVNFNFNGLTGTGVLTESNKKFLPFQQFGRDIADTTDAVRDPQTLEILDITPCSFGGVSVITPGTNTSNQVAVLYQGVNCTEVPVAIHADQLTPTWRVYSTGSNVFQTRAGCLIGAEHVNNSYECDIPIGAGICASYQTQTNSPRRARSVASQSIIAYTMSLGAENSVAYSNNSIAIPTNFTISVTTEILPVSMTKTSVDCTMYICGDSTECSNLLLQYGSFCTQLNRALTGIAVEQDKNTQEVFAQVKQIYKTPPIKDFGGFNFSQILPDPSKPSKRSFIEDLLFNKVTLADAGFIKQYGDCLGDIAARDLICAQKFNGLTVLPPLLTDEMIAQYTSALLAGTITSGWTFGAGAALQIPFAMQMAYRFNGIGVTQNVLYENQKLIANQFNSAIGKIQDSLSSTASALGKLQDVVNQNAQALNTLVKQLSSNFGAISSVLNDILSRLDPPEAEVQIDRLITGRLQSLQTYVTQQLIRAAEIRASANLAATKMSECVLGQSKRVDFCGKGYQLMSFPQSAPHGVVFLNVTYVPAQEKNFTTAPAICNDGKAHFPREGVFVSNGTNWFVTQRNFYEPQIITTDNTFVSGNCDVVIGIVNNTVYDPLQPELDSFKEELDKYFKNHTSPDVDLGDISGINASVVNIQKEIDRLNEVAKNLNESLIDLQELGKYEQYIKWPWYIWLGFIAGLIAIVMVTIMLCCMTSCCSCLKGCCSCGSCCKFDEDDSEPVLKGVKLHYT

SEQ ID NO: 592 - protein, 1273 aa, Artificial Sequence
  SARS-CoV-2/Iceland/189/2020__EPI_ISL_417709 spike protein (1-1273)(K986P_V987P_ H1048Q_H1064N_ H1083N_H1101N)
MFVFLVLLPLVSSQCVNLTTRTQLPPAYTNSFTRGVYYPDKVFRSSVLHSTQDLFLPFFSNVTWFHAIHVSGTNGTKRFDNPVLPFNDGVYFASTEKSNIIRGWIFGTTLDSKTQSLLIVNNATNVVIKVCEFQFCNDPFLGVYYHKNNKSWMESEFRVYSSANNCTFEYVSQPFLMDLEGKQGNFKNLREFVFKNIDGYFKIYSKHTPINLVRDLPQGFSALEPLVDLPIGINITRFQTLLALHRSYLTPGDSSSGWTAGAAAYYVGYLQPRTFLLKYNENGTITDAVDCALDPLSETKCTLKSFTVEKGIYQTSNFRVQPTESIVRFPNITNLCPFGEVFNATRFASVYAWNRKRISNCVADYSVLYNSASFSTFKCYGVSPTKLNDLCFTNVYADSFVIRGDEVRQIAPGQTGKIADYNYKLPDDFTGCVIAWNSNNLDSKVGGNYNYLYRLFRKSNLKPFERDISTEIYQAGSTPCNGVEGFNCYFPLQSYGFQPTNGVGYQPYRVVVLSFELLHAPATVCGPKKSTNLVKNKCVNFNFNGLTGTGVLTESNKKFLPFQQFGRDIADTTDAVRDPQTLEILDITPCSFGGVSVITPGTNTSNQVAVLYQGVNCTEVPVAIHADQLTPTWRVYSTGSNVFQTRAGCLIGAEHVNNSYECDIPIGAGICASYQTQTNSPRRARSVASQSIIAYTMSLGAENSVAYSNNSIAIPTNFTISVTTEILPVSMTKTSVDCTMYICGDSTECSNLLLQYGSFCTQLNRALTGIAVEQDKNTQEVFAQVKQIYKTPPIKDFGGFNFSQILPDPSKPSKRSFIEDLLFNKVTLADAGFTKQYGDCLGDIAARDLICAQKFNGLTVLPPLLTDEMIAQYTSALLAGTITSGWTFGAGAALQIPFAMQMAYRFNGIGVTQNVLYENQKLIANQFNSAIGKIQDSLSSTASALGKLQDVVNQNAQALNTLVKQLSSNFGAISSVLNDILSRLDPPEAEVQIDRLITGRLQSLQTYVTQQLIRAAEIRASANLAATKMSECVLGQSKRVDFCGKGYQLMSFPQSAPHGVVFLNVTYVPAQEKNFTTAPAICNDGKAHFPREGVFVSNGTNWFVTQRNFYEPQIITTDNTFVSGNCDVVIGIVNNTVYDPLQPELDSFKEELDKYFKNHTSPDVDLGDISGINASVVNIQKEIDRLNEVAKNLNESLIDLQELGKYEQYIKWPWYIWLGFIAGLIAIVMVTIMLCCMTSCCSCLKGCCSCGSCCKFDEDDSEPVLKGVKLHYT

SEQ ID NO: 593 - protein, 1273 aa, Artificial Sequence
  SARS-CoV-2/Australia/NSW56/2020__EPI_ISL_417408 spike protein (1-1273)(K986P_V987P_ H1048Q_H1064N_ H1083N_H1101N)
MFVFLVLLPLVSSQCVNLTTRTQLPPAYTNSFTRGVYYPDKVFRSSVLHSTQDLFLPFFSNVTWFHAIHVSGTNGTKRFDNPVLPFNDGVYFASTEKSNIIRGWIFGTTLDSKTQSLLIVNNATNVVIKVCEFQFCNDPFLGVYYHKNNKSWMESEFRVYSSANNCTFEYVSQPFLMDLEGKQGNFKNLREFVFKNIDGYFKIYSKHTPINLVRDLPQGFSALEPLVDLPIGINITRFQTLLALHRSYLTPGDSSSGWTAGAAAYYVGYLQPRTFLLKYNENGTITDAVDCALDPLSETKCTLKSFTVEKGIYQTSNFRVQPTESIVRFPNITNLCPFGEVFNATRFASVYAWNRKRISNCVADYSVLYNSASFSTFKCYGVSPTKLNDLCFTNVYADSFVIRGDEVRQIAPGQTGKIADYNYKLPDDFTGCVIAWNSNNLDSKVGGNYNYLYRLFRKSNLKPFERDISTEIYQAGSTPCNGVEGFNCYFPLQSYGFQPTNGVGYQPYRVVVLSFELLHAPATVCGPKKSTNLVKNKCVNFNFNGLTGTGVLTESNKKFLPFQQFGRDIADTTDAVRDPQTLEILDITPCSFGGVSVITPGTNTSNQVAVLYQDVNCTEVPVAIHADQLTPTWRVYSTGSNVFQTRAGCLIGAEHVNNSYECDIPIGAGICASYQTQTNSPRRARSVASQSIIAYTMSLGAENSVAYSNNSIAIPTNFTISVTTEILPVSMTKTSVDCTMYICGDSTECSNLLLQYGSFCTQLNRALTGIAVEQDKNTQEVFAQVKQIYKTPPIKDFGGFNFSQILPDSSKPSKRSFIEDLLFNKVTLADAGFIKQYGDCLGDIAARDLICAQKFNGLTVLPPLLTDEMIAQYTSALLAGTITSGWTFGAGAALQIPFAMQMAYRFNGIGVTQNVLYENQKLIANQFNSAIGKIQDSLSSTASALGKLQDVVNQNAQALNTLVKQLSSNFGAISSVLNDILSRLDPPEAEVQIDRLITGRLQSLQTYVTQQLIRAAEIRASANLAATKMSECVLGQSKRVDFCGKGYQLMSFPQSAPHGVVFLNVTYVPAQEKNFTTAPAICNDGKAHFPREGVFVSNGTNWFVTQRNFYEPQIITTDNTFVSGNCDVVIGIVNNTVYDPLQPELDSFKEELDKYFKNHTSPDVDLGDISGINASVVNIQKEIDRLNEVAKNLNESLIDLQELGKYEQYIKWPWYIWLGFIAGLIAIVMVTIMLCCMTSCCSCLKGCCSCGSCCKFDEDDSEPVLKGVKLHYT

SEQ ID NO: 594 - protein, 1273 aa, Artificial Sequence
  SARS-CoV-2/Iceland/280/2020__EPI_ISL_417608 spike protein (1-1273)(K986P_V987P_ H1048Q_H1064N_ H1083N_H1101N)
MFVFLVLLPLVSSQCVNLTTRTQLPPAYTNSFTRGVYYPDKVFRSSVLHSTQDLFLPFFSNVTWFHAIHVSGTNGTKRFDNPVLPFNDGVYFASTEKSNIIRGWIFGTTLDSKTQSLLIVNNATNVVIKVCEFQFCNDPFLGVYYHKNNKSWMESEFRVYSSANNCTFEYVSQPFLMDLEGKQGNFKNLREFVFKNIDGYFKIYSKHTPINLVRDLPQGFSALEPLVDLPIGINITRFQTLLALHRSYLTPGDSSSGWTAGAAAYYVGYLQPRTFLLKYNENGTITDAVDCALDPLSETKCTLKSFTVEKGIYQTSNFRVQPTESIVRFPNITNLCPFGEVFNATRFASVYAWNRKRISNCVADYSVLYNSASFSTFKCYGVSPTKLNDLCFTNVYADSFVIRGDEVRQIAPGQTGKIADYNYKLPDDFTGCVIAWNSNNLDSKVGGNYNYLYRLFRKSNLKPFERDISTEIYQAGSTPCNGVEGFNCYFPLQSYGFQPTNGVGYQPYRVVVLSFELLHAPATVCGPKKSTNLVKNKCVNFNFNGLTGTGVLTESNKKFLPFQQFGRDIADTTDAVRDPQTLEILDITPCSFGGVSVITPGTNTSNQVAVLYQGVNCTEVPVAIHADQLTPTWRVYSTGSNVFQTRAGCLIGAEHVNNSYECDIPIGAGICASYHTQTNSPRRARSVASQSIIAYTMSLGAENSVAYSNNSIAIPTNFTISVTTEILPVSMTKTSVDCTMYICGDSTECSNLLLQYGSFCTQLNRALTGIAVEQDKNTQEVFAQVKQIYKTPPIKDFGGFNFSQILPDPSKPSKRSFIEDLLFNKVTLADAGFIKQYGDCLGDIAARDLICAQKFNGLTVLPPLLTDEMIAQYTSALLAGTITSGWTFGAGAALQIPFAMQMAYRFNGIGVTQNVLYENQKLIANQFNSAIGKIQDSLSSTASALGKLQDVVNQNAQALNTLVKQLSSNFGAISSVLNDILSRLDPPEAEVQIDRLITGRLQSLQTYVTQQLIRAAEIRASANLAATKMSECVLGQSKRVDFCGKGYQLMSFPQSAPHGVVFLNVTYVPAQEKNFTTAPAICNDGKAHFPREGVFVSNGTNWFVTQRNFYEPQIITTDNTFVSGNCDVVIGIVNNTVYDPLQPELDSFKEELDKYFKNHTSPDVDLGDISGINASVVNIQKEIDRLNEVAKNLNESLIDLQELGKYEQYIKWPWYIWLGFIAGLIAIVMVTIMLCCMTSCCSCLKGCCSCGSCCKFDEDDSEPVLKGVKLHYT

SEQ ID NO: 595 - protein, 1273 aa, Artificial Sequence
  SARS-CoV-2/Iceland/247/2020__EPI_ISL_417575 spike protein (1-1273)(K986P_V987P_ H1048Q_H1064N_ H1083N_H1101N)
MFVFLVLLPLVSSQCVNLTTRTQLPPAYTNSFTRGVYYPDKVFRSSVLHSTQDLFLPFFSNVTWFHAIHVSGTNGTKRFDNPVLPFNDGVYFASTEKSNIIRGWIFGTTLDSKTQSLLIVNNATNVVIKVCEFQFCNDPFLGVYYHKNNKSWMESEFRVYSSANNCTFEYVSQPFLMDLEGKQGNFKNLREFVFKNIDGYFKIYSKHTPINLVRDLPQGFSALEPLVDLPIGINITRFQTLLALHRSYLTPGDSSSGWTAGAAAYYVGYLQPRTFLLKYNENGTITDAVDCALDPLSETKCTLKSFTVEKGIYQTSNFRVQPTESIVRFPNITNLCPFGEVFNATRFASVYAWNRKRISNCVADYSVLYNSASFSTFKCYGVSPTKLNDLCFTNVYADSFVIRGDEVRQIAPGQTGKIADYNYKLPDDFTGCVIAWNSNNLDSKVGGNYNYLYRLFRKSNLKPFERDISTEIYQAGSTPCNGVEGFNCYFPLQSYGFQPTNGVGYQPYRVVVLSFELLHAPATVCGPKKSTNLVKNKCVNFNFNGLTGTGVLTESNKKFLPFQQFGRDIADTTDAVRDPQTLEILDITPCSFGGVSVITPGTNTSNQVAVLYQGVNCTEVPVAIHADQLTPTWRVYSTGSNVFQTRAGCLIGAEHVNNSYECDIPIGAGICASYQTQTNSPRRARSVASQSIIAYTMSLGAENSVAYSNNSIAIPTNFTISVTTEILPVSMTKTSVDCTMYICGDSTECSNLLLQYGSFCTQLNRALTGIAVEQDKNTQEVFAQVKQIYKTPPIKDFGGFNFSQILPDPSKPSKRSFIEDLLFNKVTLADAGFIKQYGDCLGDIAARDLICAQKFNGLTVLPPLLTDEMIAQYTSALLAGTITSGWTFGAGAALQIPFAMQMAYRFNGIGVTQNVLYENQKLIANQFNSAIGKIQDSLSSTASALGKLQDVVNQNAQALNTLVKQLSSNFGAISSVLNDILSRLDPPEAEVQIDRLITGRLQSLQTYVTQQLIRAAEIRASANLAATKMSECVLGQSKRVDFCGKGYQLMSFPQSAPHGVVFLNVTYVPAQEKNFTTAPAICNDGKAHFPREGVFVSNGTNWFVTQRNFYEPQIITTDNTFVSGNCDVVIGIVNNTVYDPLQPELDSFKEELDKYFKNHTSPDVDLGDISGINASVVNIQKEIDRLNEVAKNLNESLIDLQELGKYEQYIKWPWYIWLGFIAGLIAIVIVTIMLCCMTSCCSCLKGCCSCGSCCKFDEDDSEPVLKGVKLHYT

SEQ ID NO: 596 - protein, 1273 aa, Artificial Sequence
  SARS-CoV-2/Iceland/238/2020__EPI_ISL_417566 spike protein (1-1273)(K986P_V987P_ H1048Q_H1064N_ H1083N_H1101N)
MFVFLVLLPLVSSQCVNLTTRTQLPPAYTNSFTRGVYYPDKVFRSSVLHSTQDLFLPFFSNVTWFHAIHVSGTNGTKRFDNPVLPFNDGVYFASTEKSNIIRGWIFGTTLDSKTQSLLIVNNATNVVIKVCEFQFCNDPFLGVYYHKNNKSWMESEFRVYSSANNCTFEYVSQPFLMDLEGKQGNFKNLREFVFKNIDGYFKIYSKHTPINLVRDLPQGFSALEPLVDLPIGINITRFQTLLALHRSYLTPGDSSSGWTAGAAAYYVGYLQPRTFLLKYNENGTITDAVDCALDPLSETKCTLKSFTVEKGIYQTSNFRVQPTESIVRFPNITNLCPFGEVFNATRFASVYAWNRKRISNCVADYSVLYNSASFSTFKCYGVSPTKLNDLCFTNVYADSFVIRGDEVRQIAPGQTGKIADYNYKLPDDFTGCVIAWNSNNLDSKVGGNYNYLYRLFRKSNLKPFERDISTEIYQAGSTPCNGVEGFNCYFPLQSYGFQPTNGVGYQPYRVVVLSFELLHAPATVCGPKKSTNLVKNKCVNFNFNGLTGTGVLTESNKKFLPFQQFGRDIADTTDAVRDPQTLEILDITPCSFGGVSVITPGTNTSNQVAVLYQGVNCTEVPVAIHADQLTPTWRVYSTGSNVFQTRAGCLIGAEHVNNSYECDIPIGAGICASYQTQTNSPRRARSVASQSIIAYTMSLGAENSVAYSNNSIAIPTNFTISVTTEILPVSMTKTSVDCTMYICGDSTECSNLLLQYGSFCTQLNRALTGIAVEQDKNTQEVFAQVKQIYKTPPIKDFGGFNFSQILPDPSKPSKRSFIEDLLFNKVTLADVGFIKQYGDCLGDIAARDLICAQKFNGLTVLPPLLTDEMIAQYTSALLAGTITSGWTFGAGAALQIPFAMQMAYRFNGIGVTQNVLYENQKLIANQFNSAIGKIQDSLSSTASALGKLQDVVNQNAQALNTLVKQLSSNFGAISSVLNDILSRLDPPEAEVQIDRLITGRLQSLQTYVTQQLIRAAEIRASANLAATKMSECVLGQSKRVDFCGKGYQLMSFPQSAPHGVVFLNVTYVPAQEKNFTTAPAICNDGKAHFPREGVFVSNGTNWFVTQRNFYEPQIITTDNTFVSGNCDVVIGIVNNTVYDPLQPELDSFKEELDKYFKNHTSPDVDLGDISGINASVVNIQKEIDRLNEVAKNLNESLIDLQELGKYEQYIKWPWYIWLGFIAGLIAIVMVTIMLCCMTSCCSCLKGCCSCGSCCKFDEDDSEPVLKGVKLHYT

SEQ ID NO: 597 - protein, 1273 aa, Artificial Sequence
  SARS-CoV-2/Greece/16/2020__EPI_ISL_418265 spike protein (1-1273)(K986P_V987P_ H1048Q_H1064N_ H1083N_H1101N)
MFVFLVLLPLVSSQCVNLTTRTQLPPAYTNSFTRGVYYPDKVFRSSVLHSTQDLFLPFFSNVTWFHAIHVSGTNGTKRFDNPVLPFNDGVYFASTEKSNIIRGWIFGTTLDSKTQSLLIVNNATNVVIKVCEFQFCNDPFLGVYYHKNNKSWMESEFRVYSSANNCTFEYVSQPFLMDLEGKQGNFKNLREFVFKNVDGYFKIYSKHTPINLVRDLPQGFSALEPLVDLPIGINITRFQTLLALHRSYLTPGDSSSGWTAGAAAYYVGYLQPRTFLLKYNENGTITDAVDCALDPLSETKCTLKSFTVEKGIYQTSNFRVQPTESIVRFPNITNLCPFGEVFNATRFASVYAWNRKRISNCVADYSVLYNSASFSTFKCYGVSPTKLNDLCFTNVYADSFVIRGDEVRQIAPGQTGKIADYNYKLPDDFTGCVIAWNSNNLDSKVGGNYNYLYRLFRKSNLKPFERDISTEIYQAGSTPCNGVEGFNCYFPLQSYGFQPTNGVGYQPYRVVVLSFELLHAPATVCGPKKSTNLVKNKCVNFNFNGLTGTGVLTESNKKFLPFQQFGRDIADTTDAVRDPQTLEILDITPCSFGGVSVITPGTNTSNQVAVLYQDVNCTEVPVAIHADQLTPTWRVYSTGSNVFQTRAGCLIGAEHVNNSYECDIPIGAGICASYQTQTNSPRRARSVASQSIIAYTMSLGAENSVAYSNNSIAIPTNFTISVTTEILPVSMTKTSVDCTMYICGDSTECSNLLLQYGSFCTQLNRALTGIAVEQDKNTQEVFAQVKQIYKTPPIKDFGGFNFSQILPDPSKPSKRSFIEDLLFNKVTLADAGFIKQYGDCLGDIAARDLICAQKFNGLTVLPPLLTDEMIAQYTSALLAGTITSGWTFGAGAALQIPFAMQMAYRFNGIGVTQNVLYENQKLIANQFNSAIGKIQDSLSSTASALGKLQDVVNQNAQALNTLVKQLSSNFGAISSVLNDILSRLDPPEAEVQIDRLITGRLQSLQTYVTQQLIRAAEIRASANLAATKMSECVLGQSKRVDFCGKGYQLMSFPQSAPHGVVFLNVTYVPAQEKNFTTAPAICNDGKAHFPREGVFVSNGTNWFVTQRNFYEPQIITTDNTFVSGNCDVVIGIVNNTVYDPLQPELDSFKEELDKYFKNHTSPDVDLGDISGINASVVNIQKEIDRLNEVAKNLNESLIDLQELGKYEQYIKWPWYIWLGFIAGLIAIVMVTIMLCCMTSCCSCLKGCCSCGSCCKFDEDDSEPVLKGVKLHYT

SEQ ID NO: 598 - protein, 1273 aa, Artificial Sequence
  SARS-CoV-2/Iceland/319/2020__EPI_ISL_417648 spike protein (1-1273)(K986P_V987P_ H1048Q_H1064N_ H1083N_H1101N)
MFVFLVLLPLVSSQCVNLTTRTQLPPAYTNSFTRGVYYPDKVFRSSVLHSTQDLFLPFFSNVTWFHAIHVSGTNGTKRFDNPVLPFNDGVYFASTEKSNIIRGWIFGTTLDSKTQSLLIVNNATNVVIKVCEFQFCNDPFLGVYYHKNNKSWMESEFRVYSSANNCTFEYVSQPFLIDLEGKQGNFKNLREFVFKNIDGYFKIYSKHTPINLVRDLPQGFSALEPLVDLPIGINITRFQTLLALHRSYLTPGDSSSGWTAGAAAYYVGYLQPRTFLLKYNENGTITDAVDCALDPLSETKCTLKSFTVEKGIYQTSNFRVQPTESIVRFPNITNLCPFGEVFNATRFASVYAWNRKRISNCVADYSVLYNSASFSTFKCYGVSPTKLNDLCFTNVYADSFVIRGDEVRQIAPGQTGKIADYNYKLPDDFTGCVIAWNSNNLDSKVGGNYNYLYRLFRKSNLKPFERDISTEIYQAGSTPCNGVEGFNCYFPLQSYGFQPTNGVGYQPYRVVVLSFELLHAPATVCGPKKSTNLVKNKCVNFNFNGLTGTGVLTESNKKFLPFQQFGRDIADTTDAVRDPQTLEILDITPCSFGGVSVITPGTNTSNQVAVLYQGVNCTEVPVAIHADQLTPTWRVYSTGSNVFQTRAGCLIGAEHVNNSYECDIPIGAGICASYQTQTNSPRRARSVASQSIIAYTMSLGAENSVAYSNNSIAIPTNFTISVTTEILPVSMTKTSVDCTMYICGDSTECSNLLLQYGSFCTQLNRALTGIAVEQDKNTQEVFAQVKQIYKTPPIKDFGGFNFSQILPDPSKPSKRSFIEDLLFNKVTLADAGFIKQYGDCLGDIAARDLICAQKFNGLTVLPPLLTDEMIAQYTSALLAGTITSGWTFGAGAALQIPFAMQMAYRFNGIGVTQNVLYENQKLIANQFNSAIGKIQDSLSSTASALGKLQDVVNQNAQALNTLVKQLSSNFGAISSVLNDILSRLDPPEAEVQIDRLITGRLQSLQTYVTQQLIRAAEIRASANLAATKMSECVLGQSKRVDFCGKGYQLMSFPQSAPHGVVFLNVTYVPAQEKNFTTAPAICNDGKAHFPREGVFVSNGTNWFVTQRNFYEPQIITTDNTFVSGNCDVVIGIVNNTVYDPLQPELDSFKEELDKYFKNHTSPDVDLGDISGINASVVNIQKEIDRLNEVAKNLNESLIDLQELGKYEQYIKWPWYIWLGFIAGLIAIVMVTIMLCCMTSCCSCLKGCCSCGSCCKFDEDDSEPVLKGVKLHYT

SEQ ID NO: 599 - protein, 1273 aa, Artificial Sequence
  SARS-CoV-2/Congo/94/2020__EPI_ISL_417947 spike protein (1-1273)(K986P_V987P_ H1048Q_H1064N_ H1083N_H1101N)
MFVFLVLLPLVSSQCVNLTTRTQLPPAYTNSFTRGVYYPDKVFRSSVLHSTQDLFLPFFSNVTWFHAIHVSGTNGTKRFDNPVLPFNDGVYFASTEKSNIIRGWIFGTTLDSKTQSLLIVNNATNVVIKVCEFQFCNDPFLGVYYHKNNKSWMESEFRVYSSANNCTFEYVSQPFLMDLEGKQGNFKNLREFVFKNIDGYFKIYSKHTPINLVRDLPQGFSALEPLVDLPIGINITRFQTLLALHRSYLTPGDSSSGWTAGAAAYYVGYLQPRTFLLKYNENGTITDAVDCALDPLSETKCTLKSFTVEKGIYQTSNFRVQPTESIVRFPNITNLCPFGEVFNATRFASVYAWNRKRISNCVADYSVLYNSASFSTFKCYGVSPTKLNDLCFTNVYADSFVIRGDEVRQIAPGQTGKIADYNYKLPDDFTGCVIAWNSNNLDSKVGGNYNYLYRLFRKSNLKPFERDISTEIYQAGSTPCNGVEGFNCYFPLQSYGFQPTNGVGYQPYRVVVLSFELLHAPATVCGPKKSTNLVKNKCVNFNFNGLTGTGVLTESNKKFLPFQQFGRDIADTTDAVRDPQTLEILDITPCSFGGVSVITPGTNTSNQVAVLYQGVNCTEVPVAIHADQLTPTWRVYSTGSNVFQTRAGCLIGAEHVNNSYECDIPIGAGICASYQTQTNSPRRARSVASQSIIAYTMSLGAENSVAYSNNSIAIPTNFTISVTTEILPVSMTKTSVDCTMYICGDSTECSNLLLQYGSFCTQLNRALTGIAVEQDKNTQEVFAQVKQIYKTPPIKDFGGFNFSQILPDPSKPSKRSFIEDILFNKVTLADAGFIKQYGDCLGDIAARDLICAQKFNGLTVLPPLLTDEMIAQYTSALLAGTITSGWTFGAGAALQIPFAMQMAYRFNGIGVTQNVLYENQKLIANQFNSAIGKIQDSLSSTASALGKLQDVVNQNAQALNTLVKQLSSNFGAISSVLNDILSRLDPPEAEVQIDRLITGRLQSLQTYVTQQLIRAAEIRASANLAATKMSECVLGQSKRVDFCGKGYQLMSFPQSAPHGVVFLNVTYVPAQEKNFTTAPAICNDGKAHFPREGVFVSNGTNWFVTQRNFYEPQIITTDNTFVSGNCDVVIGIVNNTVYDPLQPELDSFKEELDKYFKNHTSPDVDLGDISGINASVVNIQKEIDRLNEVAKNLNESLIDLQELGKYEQYIKWPWYIWLGFIAGLIAIVMVTIMLCCMTSCCSCLKGCCSCGSCCKFDEDDSEPVLKGVKLHYT

SEQ ID NO: 600 - protein, 1273 aa, Artificial Sequence
  SARS-CoV-2/Congo/158/2020__EPI_ISL_417950 spike protein (1-1273)(K986P_V987P_ H1048Q_H1064N_ H1083N_H1101N)
MFVFLVLLPLVSSQCVNLTTRTQLPPAYTNSFTRGVYYPDKVFRSSVLHSTQDLFLPFFSNVTWFHAIHVSGTNGTKRFDNPVLPFNDGVYFASTEKSNIIRGWIFGTTLDSKTQSLLIVNNATNVVIKVCEFQFCNDPFLGVYYHKNNKSWMESEFRVYSSANNCTFEYVSQPFLMDLEGKQGNFKNLREFVFKNIDGYFKIYSKHTPINLVRDLPQGFSALEPLVDLPIGINITRFQTLLALHRSYLTPGDSSSGWTAGAAAYYVGYLQPRTFLLKYNENGTITDAVDCALDPLSETKCTLKSFTVEKGIYQTSNFRVQPTESIVRFPNITNLCPFGEVFNATRFASVYAWNRKRISNCVADYSVLYNSASFSTFKCYGVSPTKLNDLCFTNVYADSFVIRGDEVRQIAPGQTGKIADYNYKLPDDFTGCVIAWNSNNLDSKVGGNYNYLYRLFRKSNLKPFERDISTEIYQAGSTPCNGVEGFNCYFPLQSYGFQPTNGVGYQPYRVVVLSFELLHAPATVCGPKKSTNLVKNKCVNFNFNGLTGTGVLTESNKKFLPFQQFGRDIADTTDAVRDPQTLEILDITPCSFGGVSVITPGTNTSNQVAVLYQDVNCTEVPVAIHADQLTPTWRVYSTGSNVFQTRAGCLIGAEHVNNSYECDIPIGAGICASYQTQTNSPRRARSVASQSIIAYTMSLGAENSVAYSNNSIAIPTNFTISVTTEILPVSMTKTSVDCTMYICGDSTECSNLLLQYGSFCTQLNRALTGIAVEQDKNTQEVFAQVKQIYKTPPIKDFGGFNFSQILPDPSKPSKRSFIEDLLFNKVTLADAGFIKQYGDCLGDIAARDLICAQKFNGLTVLPPLLTDEMIAQYTSALLAGTITSGWTFGAGAALQIPFAMQMAYRFNGIGVTQNVLYENQKLIANQFNSAIGKIQDSLSSTASALGKLQDVVNQNAQALNTLVKQLSSNFGAISSVLNDILSRLDPPEAEVQIDRLITGRLQSLQTYVTQQLIRAAEIRASANLAATKMSECVLGQSKRVDFCGKGYQLMSFPQSAPHGVVFLNVTYVPAQEKNFTTAPAICNDGKAHFPREGVFVSNGTNWFVTQRNFYEPQIITTDNTFLSGNCDVVIGIVNNTVYDPLQPELDSFKEELDKYFKNHTSPDVDLGDISGINASVVNIQKEIDRLNEVAKNLNESLIDLQELGKYEQYIKWPWYIWLGFIAGLIAIVMVTIMLCCMTSCCSCLKGCCSCGSCCKFDEDDSEPVLKGVKLHYT

SEQ ID NO: 601 - protein, 1273 aa, Artificial Sequence
  SARS-CoV-2/USA/UT-00034/2020__EPI_ISL_417977 spike protein (1-1273)(K986P_V987P_ H1048Q_H1064N_ H1083N_H1101N)
MFVFLVLLPLVSSQCVNLTTRTQLPPAYTNSFTRGVYYPDKVFRSSVLHSTQDLFLPFFSNVTWFHAIHVSGTNGTKRFDNPVLPFNDGVYFASTEKSNIIRGWIFGTTLDSKTQSLLIVNNATNVVIKVCEFQFCNDPFLGVYYYKNNKSWMESEFRVYSSANNCTFEYVSQPFLMDLEGKQGNFKNLREFVFKNIDGYFKIYSKHTPINLVRDLPQGFSALEPLVDLPIGINITRFQTLLALHRSYLTPGDSSSGWTAGAAAYYVGYLQPRTFLLKYNENGTITDAVDCALDPLSETKCTLKSFTVEKGIYQTSNFRVQPTESIVRFPNITNLCPFGEVFNATRFASVYAWNRKRISNCVADYSVLYNSASFSTFKCYGVSPTKLNDLCFTNVYADSFVIRGDEVRQIAPGQTGKIADYNYKLPDDFTGCVIAWNSNNLDSKVGGNYNYLYRLFRKSNLKPFERDISTEIYQAGSTPCNGVEGFNCYFPLQSYGFQPTNGVGYQPYRVVVLSFELLHAPATVCGPKKSTNLVKNKCVNFNFNGLTGTGVLTESNKKFLPFQQFGRDIADTTDAVRDPQTLEILDITPCSFGGVSVITPGTNTSNQVAVLYQGVNCTEVPVAIHADQLTPTWRVYSTGSNVFQTRAGCLIGAEHVNNSYECDIPIGAGICASYQTQTNSPRRARSVASQSIIAYTMSLGAENSVAYSNNSIAIPTNFTISVTTEILPVSMTKTSVDCTMYICGDSTECSNLLLQYGSFCTQLNRALTGIAVEQDKNTQEVFAQVKQIYKTPPIKDFGGFNFSQILPDPSKPSKRSFIEDLLFNKVTLADAGFIKQYGDCLGDIAARDLICAQKFNGLTVLPPLLTDEMIAQYTSALLAGTITSGWTFGAGAALQIPFAMQMAYRFNGIGVTQNVLYENQKLIANQFNSAIGKIQDSLSSTASALGKLQDVVNQNAQALNTLVKQLSSNFGAISSVLNDILSRLDPPEAEVQIDRLITGRLQSLQTYVTQQLIRAAEIRASANLAATKMSECVLGQSKRVDFCGKGYQLMSFPQSAPHGVVFLNVTYVPAQEKNFTTAPAICNDGKAHFPREGVFVSNGTNWFVTQRNFYEPQIITTDNTFVSGNCDVVIGIVNNTVYDPLQPELDSFKEELDKYFKNHTSPDVDLGDISGINASVVNIQKEIDRLNEVAKNLNESLIDLQELGKYEQYIKWPWYIWLGFIAGLIAIVMVTIMLCCMTSCCSCLKGCCSCGSCCKFDEDDSEPVLKGVKLHYT

SEQ ID NO: 602 - protein, 1273 aa, Artificial Sequence
  SARS-CoV-2/USA/UT-00033/2020__EPI_ISL_417976 spike protein (1-1273)(K986P_V987P_ H1048Q_H1064N_ H1083N_H1101N)
MFVFLVLLPLVSSQCVNLTTRTQLPPAYTNSFTRGVYYPDKVFRSSVLHSTQDLFLPFFSNVTWFHAIHVSGTNGTKRFDNPVLPFNDGVYFASTEKSNIIRGWIFGTTLDSKTQSLLIVNNATNVVIKVCEFQFCNDPFLGVYYHKNNKSWMESEFRVYSSANNCTFEYVSQPFLMDLEGKQGNFKNLREFVFKNIDGYFKIYSKHTPINLVRDLPQGFSALEPLVDLPIGINITRFQTLLALHRSYLTPGDSSSGLTAGAAAYYVGYLQPRTFLLKYNENGTITDAVDCALDPLSETKCTLKSFTVEKGIYQTSNFRVQPTESIVRFPNITNLCPFGEVFNATRFASVYAWNRKRISNCVADYSVLYNSASFSTFKCYGVSPTKLNDLCFTNVYADSFVIRGDEVRQIAPGQTGKIADYNYKLPDDFTGCVIAWNSNNLDSKVGGNYNYLYRLFRKSNLKPFERDISTEIYQAGSTPCNGVEGFNCYFPLQSYGFQPTNGVGYQPYRVVVLSFELLHAPATVCGPKKSTNLVKNKCVNFNFNGLTGTGVLTESNKKFLPFQQFGRDIADTTDAVRDPQTLEILDITPCSFGGVSVITPGTNTSNQVAVLYQGVNCTEVPVAIHADQLTPTWRVYSTGSNVFQTRAGCLIGAEHVNNSYECDIPIGAGICASYQTQTNSPRRARSVASQSIIAYTMSLGAENSVAYSNNSIAIPTNFTISVTTEILPVSMTKTSVDCTMYICGDSTECSNLLLQYGSFCTQLNRALTGIAVEQDKNTQEVFAQVKQIYKTPPIKDFGGFNFSQILPDPSKPSKRSFIEDLLFNKVTLADAGFIKQYGDCLGDIAARDLICAQKFNGLTVLPPLLTDEMIAQYTSALLAGTITSGWTFGAGAALQIPFAMQMAYRFNGIGVTQNVLYENQKLIANQFNSAIGKIQDSLSSTASALGKLQDVVNQNAQALNTLVKQLSSNFGAISSVLNDILSRLDPPEAEVQIDRLITGRLQSLQTYVTQQLIRAAEIRASANLAATKMSECVLGQSKRVDFCGKGYQLMSFPQSAPHGVVFLNVTYVPAQEKNFTTAPAICNDGKAHFPREGVFVSNGTNWFVTQRNFYEPQIITTDNTFVSGNCDVVIGIVNNTVYDPLQPELDSFKEELDKYFKNHTSPDVDLGDISGINASVVNIQKEIDRLNEVAKNLNESLIDLQELGKYEQYIKWPWYIWLGFIAGLIAIVMVTIMLCCMTSCCSCLKGCCSCGSCCKFDEDDSEPVLKGVKLHYT

SEQ ID NO: 603 - protein, 1273 aa, Artificial Sequence
  SARS-CoV-2/USA/WI-13/2020__EPI_ISL_417516 spike protein (1-1273)(K986P_V987P_ H1048Q_H1064N_ H1083N_H1101N)
MFVFLVLLPLVSSQCVNLTTRTQLPPAYTNSFTRGVYYPDKVFRSSVLHSTQDLFLPFFSNVTWFHAIHVSGTNGTKRFDNPVLPFNDGVYFASTEKSNIIRGWIFGTTLDSKTQSLLIVNNATNVVIKVCEFQFCNDPFLGVYYHKNNKSWMESEFRVYSSANNCTFEYVSQPFLMDLEGKQGNFKNLREFVFKNIDGYFKIYSKHTPINLVRDLPQGFSALEPLVDLPIGINITRFQTLLALHRSYLTPGDSSSGWTAGAAAYYVGYLQPRTFLLKYNENGTITDAVDCALDPLSETKCTLKSFTVEKGIYQTSNFRVLPTESIVRFPNITNLCPFGEVFNATRFASVYAWNRKRISNCVADYSVLYNSASFSTFKCYGVSPTKLNDLCFTNVYADSFVIRGDEVRQIAPGQTGKIADYNYKLPDDFTGCVIAWNSNNLDSKVGGNYNYLYRLFRKSNLKPFERDISTEIYQAGSTPCNGVEGFNCYFPLQSYGFQPTNGVGYQPYRVVVLSFELLHAPATVCGPKKSTNLVKNKCVNFNFNGLTGTGVLTESNKKFLPFQQFGRDIADTTDAVRDPQTLEILDITPCSFGGVSVITPGTNTSNQVAVLYQGVNCTEVPVAIHADQLTPTWRVYSTGSNVFQTRAGCLIGAEHVNNSYECDIPIGAGICASYQTQTNSPRRARSVASQSIIAYTMSLGAENSVAYSNNSIAIPTNFTISVTTEILPVSMTKTSVDCTMYICGDSTECSNLLLQYGSFCTQLNRALTGIAVEQDKNTQEVFAQVKQIYKTPPIKDFGGFNFSQILPDPSKPSKRSFIEDLLFNKVTLADAGFIKQYGDCLGDIAARDLICAQKFNGLTVLPPLLTDEMIAQYTSALLAGTITSGWTFGAGAALQIPFAMQMAYRFNGIGVTQNVLYENQKLIANQFNSAIGKIQDSLSSTASALGKLQDVVNQNAQALNTLVKQLSSNFGAISSVLNDILSRLDPPEAEVQIDRLITGRLQSLQTYVTQQLIRAAEIRASANLAATKMSECVLGQSKRVDFCGKGYQLMSFPQSAPHGVVFLNVTYVPAQEKNFTTAPAICNDGKAHFPREGVFVSNGTNWFVTQRNFYEPQIITTDNTFVSGNCDVVIGIVNNTVYDPLQPELDSFKEELDKYFKNHTSPDVDLGDISGINASVVNIQKEIDRLNEVAKNLNESLIDLQELGKYEQYIKWPWYIWLGFIAGLIAIVMVTIMLCCMTSCCSCLKGCCSCGSCCKFDEDDSEPVLKGVKLHYT

SEQ ID NO: 604 - protein, 1272 aa, Artificial Sequence
  SARS-CoV-2/India/1-27/2020__EPI_ISL_413522 spike protein (1-1272)(K985P_V986P_ H1047Q_H1063N_ H1082N_H1100N)
MFVFLVLLPLVSSQCVNLTTRTQLPPAYTNSFTRGVYYPDKVFRSSVLHSTQDLFLPFFSNVTWFHAIHVSGTNGTKRFDNPVLPFNDGVYFASTEKSNIIRGWIFGTTLDSKTQSLLIVNNATNVVIKVCEFQFCNDPFLGVYHKNNKSWMESEFRVYSSANNCTFEYVSQPFLMDLEGKQGNFKNLREFVFKNIDGYFKIYSKHTPINLVRDLPQGFSALEPLVDLPIGINITRFQTLLALHRSYLTPGDSSSGWTAGAAAYYVGYLQPRTFLLKYNENGTITDAVDCALDPLSETKCTLKSFTVEKGIYQTSNFRVQPTESIVRFPNITNLCPFGEVFNATRFASVYAWNRKRISNCVADYSVLYNSASFSTFKCYGVSPTKLNDLCFTNVYADSFVIRGDEVIQIAPGQTGKIADYNYKLPDDFTGCVIAWNSNNLDSKVGGNYNYLYRLFRKSNLKPFERDISTEIYQAGSTPCNGVEGFNCYFPLQSYGFQPTNGVGYQPYRVVVLSFELLHAPATVCGPKKSTNLVKNKCVNFNFNGLTGTGVLTESNKKFLPFQQFGRDIADTTDAVRDPQTLEILDITPCSFGGVSVITPGTNTSNQVAVLYQDVNCTEVPVAIHADQLTPTWRVYSTGSNVFQTRAGCLIGAEHVNNSYECDIPIGAGICASYQTQTNSPRRARSVASQSIIAYTMSLGAENSVAYSNNSIAIPTNFTISVTTEILPVSMTKTSVDCTMYICGDSTECSNLLLQYGSFCTQLNRALTGIAVEQDKNTQEVFAQVKQIYKTPPIKDFGGFNFSQILPDPSKPSKRSFIEDLLFNKVTLADAGFIKQYGDCLGDIAARDLICAQKFNGLTVLPPLLTDEMIAQYTSALLAGTITSGWTFGAGAALQIPFAMQMAYRFNGIGVTQNVLYENQKLIANQFNSAIGKIQDSLSSTASALGKLQDVVNQNAQALNTLVKQLSSNFGAISSVLNDILSRLDPPEAEVQIDRLITGRLQSLQTYVTQQLIRAAEIRASANLAATKMSECVLGQSKRVDFCGKGYQLMSFPQSAPHGVVFLNVTYVPAQEKNFTTAPAICNDGKAHFPREGVFVSNGTNWFVTQRNFYEPQIITTDNTFVSGNCDVVIGIVNNTVYDPLQPELDSFKEELDKYFKNHTSPDVDLGDISGINASVVNIQKEIDRLNEVAKNLNESLIDLQELGKYEQYIKWPWYIWLGFIAGLIAIVMVTIMLCCMTSCCSCLKGCCSCGSCCKFDEDDSEPVLKGVKLHYT

SEQ ID NO: 605 - protein, 1267 aa, Artificial Sequence
  SARS-CoV-2/pangolin/Guangxi/P4L/2017__EPI_ISL_410538 spike protein (1-1267)(K980P_V981P_ H1042Q_H1058N_ H1077N_H1095N)
MFVFLFVLPLVSSQCVNLTTRTGIPPGYTNSSTRGVYYPDKVFRSSILHLTQDLFLPFFSNVTWFNTINYQGGFKKFDNPVLPFNDGVYFASTEKSNIIRGWIFGTTLDARTQSLLIVNNATNVVIKVCEFQFCTDPFLGVYYHNNNKTWVENEFRVYSSANNCTFEYISQPFLMDLEGKQGNFKNLREFVFKNVDGYFKIYSKHTPIDLVRDLPRGFAALEPLVDLPIGINITRFQTLLALHRSYLTPGNLESGWTTGAAAYYVGYLQQRTFLLSYNQNGTITDAVDCSLDPLSETKCTLKSLTVEKGIYQTSNFRVQPTISIVRFPNITNLCPFGEVFNASKFASVYAWNRKRISNCVADYSVLYNSTSFSTFKCYGVSPTKLNDLCFTNVYADSFVVKGDEVRQIAPGQTGVIADYNYKLPDDFTGCVIAWNSVKQDALTGGNYGYLYRLFRKSKLKPFERDISTEIYQAGSTPCNGQVGLNCYYPLERYGFHPTTGVNYQPFRVVVLSFELLNGPATVCGPKLSTTLVKDKCVNFNFNGLTGTGVLTTSKKQFLPFQQFGRDISDTTDAVRDPQTLEILDITPCSFGGVSVITPGTNTSNQVAVLYQDVNCTEVPMAIHAEQLTPAWRVYSAGANVFQTRAGCLVGAEHVNNSYECDIPVGAGICASYHSMSSLRSVNQRSIIAYTMSLGAENSVAYSNNSIAIPTNFTISVTTEILPVSMTKTSVDCTMYICGDSIECSNLLLQYGSFCTQLNRALTGIAVEQDKNTQEVFAQVKQIYKTPPIKDFGGFNFSQILPDPSKPSKRSFIEDLLFNKVTLADAGFIKQYGDCLGDIAARDLICAQKFNGLTVLPPLLTDEMIAQYTSALLAGTITSGWTFGAGAALQIPFAMQMAYRFNGIGVTQNVLYENQKLIANQFNSAIGKIQDSLSSTASALGKLQDVVNQNAQALNTLVKQLSSNFGAISSVLNDILSRLDPPEAEVQIDRLITGRLQSLQTYVTQQLIRAAEIRASANLAATKMSECVLGQSKRVDFCGKGYQLMSFPQSAPHGVVFLNVTYVPAQEKNFTTAPAICNEGKAHFPREGVFVSNGTNWFITQRNFYEPQIITTDNTFVSGSCDVVIGIVNNTVYDPLQPELDSFKEELDKYFKNHTSPDVDLGDISGINASVVNIQKEIDRLNEVAKNLNESPIDLQELGKYEQYIKWPWYIWLGFIAGLIAIIMVTIMLCCMTSCCSCLKGCCSCGSCCKFDEDDSEPVLKGVKLHYT

SEQ ID NO: 606 - protein, 1267 aa, Artificial Sequence
  SARS-CoV-2/pangolin/Guangxi/P5L/2017__EPI_ISL_410540 spike protein (1-1267)(K980P_V981P_ H1042Q_H1058N_ H1077N_H1095N)
MFVFLFVLPLVSSQCVNLTTRTGIPPGYTNSSTRGVYYPDKVFRSSILHLTQDLFLPFFSNVTWFNTINYQGGFKKFDNPVLPFNDGVYFASTEKSNIIRGWIFGTTLDARTQSLLIVNNATNVVIKVCEFQFCTDPFLGVYYHNNNKTWVENEFRVYSSANNCTFEYISQPFLMDLEGKQGNFKNLREFVFKNVDGYFKIYSKHTPIDLVRDLPRGFAALEPLVDLPIGINITRFQTLLALHRSYLTPGKLESGWTTGAAAYYVGYLQQRTFLLSYNQNGTITDAVDCSLDPLSETKCTLKSLTVEKGIYQTSNFRVQPTISIVRFPNITNLCPFGEVFNASKFASVYAWNRKRISNCVADYSVLYNSTSFSTFKCYGVSPTKLNDLCFTNVYADSFVVKGDEVRQIAPGQTGVIADYNYKLPDDFTGCVIAWNSVKQDALTGGNYGYLYRLFRKSKLKPFERDISTEIYQAGSTPCNGQVGLNCYYPLERYGFHPTTGVNYQPFRVVVLSFELLNGPATVCGPKLSTTLVKDKCVNFNFNGLTGTGVLTTSKKQFLPFQQFGRDISDTTDAVRDPQTLEILDITPCSFGGVSVITPGTNTSNQVAVLYQDVNCTEVPMAIHAEQLTPAWRVYSAGANVFQTRAGCLVGAEHVNNSYECDIPVGAGICASYHSMSSFRSVNQRSIIAYTMSLGAENSVAYSNNSIAIPTNFTISVTTEILPVSMTKTSVDCTMYICGDSIECSNLLLQYGSFCTQLNRALTGIAVEQDKNTQEVFAQVKQIYKTPPIKDFGGFNFSQILPDPSKPSKRSFIEDLLFNKVTLADAGFIKQYGDCLGDIAARDLICAQKFNGLTVLPPLLTDEMIAQYTSALLAGTITSGWTFGAGAALQIPFAMQMAYRFNGIGVTQNVLYENQKLIANQFNSAIGKIQDSLSSTASALGKLQDVVNQNAQALNTLVKQLSSNFGAISSVLNDILSRLDPPEAEVQIDRLITGRLQSLQTYVTQQLIRAAEIRASANLAATKMSECVLGQSKRVDFCGKGYQLMSFPQSAPHGVVFLNVTYVPAQEKNFTTAPAICNEGKAHFPREGVFVSNGTNWFITQRNFYEPQIITTDNTFVSGSCDVVIGIVNNTVYDPLQPELDSFKEELDKYFKNHTSPDVDLGDISGINASVVNIQKEIDRLNEVAKNLNESLIDLQELGKYEQYIKWPWYIWLGFIAGLIAIIMVTIMLCCMTSCCSCLKGCCSCGSCCKFDEDDSEPVLKGVKLHYT

SEQ ID NO: 607 - protein, 1267 aa, Artificial Sequence
  SARS-CoV-2/pangolin/Guangxi/P5E/2017__EPI_ISL_410541 spike protein (1-1267)(K980P_V981P_ H1042Q_H1058N_ H1077N_H1095N)
MFVFLFVLPLVSSQCVNLTTRTGIPPGYTNSSTRGVYYPDKVFRSSILHLTQDLFLPFFSNVTWFNTITYQGGSKKFDNPVLPFNDGVYFASTEKSNIIRGWIFGTTLDARTQSLLIVNNATNVVIKVCEFQFCTDPFLGVYYHNNNKTWVENEFRVYSSANNCTFEYISQPFLMDLEGKQGNFKNLREFVFKNVDGYFKIYSKHTPIDLVRDLPRGFAALEPLVDLPIGINITRFQTLLALHRSYLTPGKLESGWTTGAAAYYVGYLQQRTFLLSYNQNGTITDAVDCSLDPLSETKCTLKSLTVEKGIYQTSNFRVQPTISIVRFPNITNLCPFGEVFNASKFASVYAWNRKRISNCVADYSVLYNSTSFSTFKCYGVSPTKLNDLCFTNVYADSFVVKGDEVRQIAPGQTGVIADYNYKLPDDFTGCVIAWNSVKQDALTGDNYGYLYRLFRKSKLKPFERDISTEIYQAGSTPCNGQVGLNCYYPLERYGFHPTTGVNYQPFRVVVLSFELLNGPATVCGPKLSTTLVKDKCVNFNFNGLTGTGVLTTSKKQFLPFQQFGRDISDTTDAVRDPQTLEILDITPCSFGGVSVITPGTNTSNQVAVLYQDVNCTEVPMAIHAEQLTPAWRVYSAGANVFQTRAGCLVGAEHVNNSYECDIPVGAGICASYHSMSSFRSVNQRSIIAYTMSLGAENSVAYSNNSIAIPTNFTISVTTEILPVSMTKTSVDCTMYICGDSIECSNLLLQYGSFCTQLNRALTGIAVEQDKNTQEVFAQVKQIYKTPPIKDFGGFNFSQILPDPSKPSKRSFIEDLLFNKVTLADAGFIKQYGDCLGDIAARDLICAQKFNGLTVLPPLLTDEMIAQYTSALLAGTITSGWTFGAGAALQIPFAMQMAYRFNGIGVTQNVLYENQKLIANQFNSAIGKIQDSLSSTASALGKLQDVVNQNAQALNTLVKQLSSNFGAISSVLNDILSRLDPPEAEVQIDRLITGRLQSLQTYVTQQLIRAAEIRASANLAATKMSECVLGQSKRVDFCGKGYQLMSFPQSAPHGVVFLNVTYVPAQEKNFTTAPAICNEGKAHFPREGVFVSNGTNWFITQRNFYEPQIITTDNTFVSGSCDVVIGIVNNTVYDPLQPELDSFKEELDKYFKNHTSPDVDLGDISGINASVVNIQKEIDRLNEVAKNLNESLIDLQELGKYEQYIKWPWYIWLGFIAGLIAIIMVTIMLCCMTSCCSCLKGCCSCGSCCKFDEDDSEPVLKGVKLHYT

SEQ ID NO: 608 - protein, 1265 aa, Artificial Sequence
  SARS-CoV-2/pangolin/Guangxi/P1E/2017__EPI_ISL_410539 spike protein (1-1265)(K978P_V979P_ H1040Q_H1056N_ H1075N_H1093N)
MFVFLFVLPLVSSQCVNLTTRTGIQPGYTNSSTRGVYYPDKVFRSSILHLTQDLFLPFFSNVTWFNTINYQGGFKKFDNPVLPFNDGVYFASTEKSNIIRGWIFGTTLDARTQSLLIVNNATNVVIKVCEFQFCTDPFLGVYYHNNNKTWVENEFRVYSSANNCTFEYISQPFLMDLEGKQGNFKNLREFVFKNVDGYFKIYSKHTPIDLVRDLPRGFAALEPLVDLPIGINITRFQTLLALHRSYLTPGKLESGWTTGAAAYYVGYLQQRTFLLSYNQNGTITDAVDCSLDPLSETKCTLKSLTVEKGIYQTSNFRVQPTISIVRFPNITNLCPFGEVFNASKFASVYAWNRKRISNCVADYSVLYNSTSFSTFKCYGVSPTKLNDLCFTNVYADSFVVKGDEVRQIAPGQTGVIADYNYKLPDDFTGCVIAWNSVKQDALTGGNYLYRLFRKSKLKPFERDISTEIYQAGSTPCNGQVGLNCYYPLERYGFHPTTGVNYQPFRVVVLSFELLNGPATVCGPKLSTTLVKDKCVNFNFNGLTGTGVLTTSKKQFLPFQQFGRDISDTTDAVRDPQTLEILDITPCSFGGVSVITPGTNTSNQVAVLYQDVNCTEVPMAIHAEQLTPAWRVYSAGANVFQTRAGCLVGAEHVNNSYECDIPVGAGICASYHSMSSLRSVNQRSIIAYTMSLGAENSVAYSNNSIAIPTNFTISVTTEILPVSMTKTSVDCTMYICGDSIECSNLLLQYGSFCTQLNRALTGIAVEQDKNTQEVFAQVKQIYKTPPIKDFGGFNFSQILPDPSKPSKRSFIEDLLFNKVTLADAGFIKQYGDCLGDIAARDLICAQKFNGLTVLPPLLTDEMIAQYTSALLAGTITSGWTFGAGAALQIPFAMQMAYRFNGIGVTQNVLYENQKLIANQFNSAIGKIQDSLSSTASALGKLQDVVNQNAQALNTLVKQLSSNFGAISSVLNDILSRLDPPEAEVQIDRLITGRLQSLQTYVTQQLIRAAEIRASANLAATKMSECVLGQSKRVDFCGKGYQLMSFPQSAPHGVVFLNVTYVPAQEKNFTTAPAICNEGKAHFPREGVFVSNGTNWFITQRNFYEPQIITTDNTFVSGSCDVVIGIVNNTVYDPLQPELDSFKEELDKYFKNHTSPDVDLGDISGINASVVNIQKEIDRLNEVAKNLNESLIDLQELGKYEQYIKWPWYIWLGFIAGLIAIIMVTIMLCCMTSCCSCLKGCCSCGSCCKFDEDDSEPVLKGVKLHYT

SEQ ID NO: 609 - protein, 1273 aa, Artificial Sequence; identical to SEQ ID NO: 19
  SARS-CoV-2/Wuhan/WIV05/2019__EPI_ISL_402128 spike protein (1-1273)(I712C_T1077C)

SEQ ID NO: 610 - protein, 1269 aa, Artificial Sequence
  SARS-CoV-2/bat/Yunnan/RaTG13/2013__EPI_ISL_402131 spike protein (1-1269)(I708C_T1073C)
MFVFLVLLPLVSSQCVNLTTRTQLPPAYTNSSTRGVYYPDKVFRSSVLHLTQDLFLPFFSNVTWFHAIHVSGTNGIKRFDNPVLPFNDGVYFASTEKSNIIRGWIFGTTLDSKTQSLLIVNNATNVVIKVCEFQFCNDPFLGVYYHKNNKSWMESEFRVYSSANNCTFEYVSQPFLMDLEGKQGNFKNLREFVFKNIDGYFKIYSKHTPINLVRDLPPGFSALEPLVDLPIGINITRFQTLLALHRSYLTPGDSSSGWTAGAAAYYVGYLQPRTFLLKYNENGTITDAVDCALDPLSETKCTLKSFTVEKGIYQTSNFRVQPTDSIVRFPNITNLCPFGEVFNATTFASVYAWNRKRISNCVADYSVLYNSTSFSTFKCYGVSPTKLNDLCFTNVYADSFVITGDEVRQIAPGQTGKIADYNYKLPDDFTGCVIAWNSKHIDAKEGGNFNYLYRLFRKANLKPFERDISTEIYQAGSKPCNGQTGLNCYYPLYRYGFYPTDGVGHQPYRVVVLSFELLNAPATVCGPKKSTNLVKNKCVNFNFNGLTGTGVLTESNKKFLPFQQFGRDIADTTDAVRDPQTLEILDITPCSFGGVSVITPGTNASNQVAVLYQDVNCTEVPVAIHADQLTPTWRVYSTGSNVFQTRAGCLIGAEHVNNSYECDIPIGAGICASYQTQTNSRSVASQSIIAYTMSLGAENSVAYSNNSCAIPTNFTISVTTEILPVSMTKTSVDCTMYICGDSTECSNLLLQYGSFCTQLNRALTGIAVEQDKNTQEVFAQVKQIYKTPPIKDFGGFNFSQILPDPSKPSKRSFIEDLLFNKVTLADAGFIKQYGDCLGDIAARDLICAQKFNGLTVLPPLLTDEMIAQYTSALLAGTITSGWTFGAGAALQIPFAMQMAYRFNGIGVTQNVLYENQKLIANQFNSAIGKIQDSLSSTASALGKLQDVVNQNAQALNTLVKQLSSNFGAISSVLNDILSRLDKVEAEVQIDRLITGRLQSLQTYVTQQLIRAAEIRASANLAATKMSECVLGQSKRVDFCGKGYHLMSFPQSAPHGVVFLHVTYVPAQEKNFTCAPAICHDGKAHFPREGVFVSNGTHWFVTQRNFYEPQIITTDNTFVSGSCDVVIGIVNNTVYDPLQPELDSFKEELDKYFKNHTSPDVDLGDISGINASVVNIQKEIDRLNEVAKNLNESLIDLQELGKYEQYIKWPWYIWLGFIAGLIAIIMVTIMLCCMTSCCSCLKGCCSCGSCCKFDEDDSEPVLKGVKLHYT

SEQ ID NO: 611 - protein, 1273 aa, Artificial Sequence
  SARS-CoV-2/Wuhan/HBCDC-HB-01/2019__EPI_ISL_402132 spike protein (1-1273)(I712C_T1077C)
MFVFLVLLPLVSSQCVNLTTRTQLPPAYTNSITRGVYYPDKVFRSSVLHSTQDLFLPFFSNVTWFHAIHVSGTNGTKRFDNPVLPFNDGVYFASTEKSNIIRGWIFGTTLDSKTQSLLIVNNATNVVIKVCEFQFCNDPFLGVYYHKNNKSWMESEFRVYSSANNCTFEYVSQPFLMDLEGKQGNFKNLREFVFKNIDGYFKIYSKHTPINLVRDLPQGFSALEPLVDLPIGINITRFQTLLALHRSYLTPGDSSSGWTAGAAAYYVGYLQPRTFLLKYNENGTITDAVDCALDPLSETKCTLKSFTVEKGIYQTSNFRVQPTESIVRFPNITNLCPFGEVFNATRFASVYAWNRKRISNCVADYSVLYNSASFSTFKCYGVSPTKLNDLCFTNVYADSFVIRGDEVRQIAPGQTGKIADYNYKLPDDFTGCVIAWNSNNLDSKVGGNYNYLYRLFRKSNLKPFERDISTEIYQAGSTPCNGVEGFNCYFPLQSYGFQPTNGVGYQPYRVVVLSFELLHAPATVCGPKKSTNLVKNKCVNFNFNGLTGTGVLTESNKKFLPFQQFGRDIADTTDAVRDPQTLEILDITPCSFGGVSVITPGTNTSNQVAVLYQDVNCTEVPVAIHADQLTPTWRVYSTGSNVFQTRAGCLIGAEHVNNSYECDIPIGAGICASYQTQTNSPRRARSVASQSIIAYTMSLGAENSVAYSNNSCAIPTNFTISVTTEILPVSMTKTSVDCTMYICGDSTECSNLLLQYGSFCTQLNRALTGIAVEQDKNTQEVFAQVKQIYKTPPIKDFGGFNFSQILPDPSKPSKRSFIEDLLFNKVTLADAGFIKQYGDCLGDIAARDLICAQKFNGLTVLPPLLTDEMIAQYTSALLAGTITSGWTFGAGAALQIPFAMQMAYRFNGIGVTQNVLYENQKLIANQFNSAIGKIQDSLSSTASALGKLQDVVNQNAQALNTLVKQLSSNFGAISSVLNDILSRLDKVEAEVQIDRLITGRLQSLQTYVTQQLIRAAEIRASANLAATKMSECVLGQSKRVDFCGKGYHLMSFPQSAPHGVVFLHVTYVPAQEKNFTCAPAICHDGKAHFPREGVFVSNGTHWFVTQRNFYEPQIITTDNTFVSGNCDVVIGIVNNTVYDPLQPELDSFKEELDKYFKNHTSPDVDLGDISGINASVVNIQKEIDRLNEVAKNLNESLIDLQELGKYEQYIKWPWYIWLGFIAGLIAIVMVTIMLCCMTSCCSCLKGCCSCGSCCKFDEDDSEPVLKGVKLHYT

SEQ ID NO: 612 - protein, 1273 aa, Artificial Sequence
  SARS-CoV-2/Guangdong/20SF028/2020__EPI_ISL_403936 spike protein (1-1273)(I712C_T1077C)
MFVFLVLLPLVSSQCVNLTTRTQLPPAYTNSFTRGVYYPDKVFRSSVLYSTQDLFLPFFSNVTWFHAIHVSGTNGTKRFDNPVLPFNDGVYFASTEKSNIIRGWIFGTTLDSKTQSLLIVNNATNVVIKVCEFQFCNDPFLGVYYHKNNKSWMESEFRVYSSANNCTFEYVSQPFLMDLEGKQGNFKNLREFVFKNIDGYFKIYSKHTPINLVRDLPQGFSALEPLVDLPIGINITRFQTLLALHRSYLTPGDSSSGWTAGAAAYYVGYLQPRTFLLKYNENGTITDAVDCALDPLSETKCTLKSFTVEKGIYQTSNFRVQPTESIVRFPNITNLCPFGEVFNATRFASVYAWNRKRISNCVADYSVLYNSASFSTFKCYGVSPTKLNDLCFTNVYADSFVIRGDEVRQIAPGQTGKIADYNYKLPDDFTGCVIAWNSNNLDSKVGGNYNYLYRLFRKSNLKPFERDISTEIYQAGSTPCNGVEGFNCYFPLQSYGFQPTNGVGYQPYRVVVLSFELLHAPATVCGPKKSTNLVKNKCVNFNFNGLTGTGVLTESNKKFLPFQQFGRDIADTTDAVRDPQTLEILDITPCSFGGVSVITPGTNTSNQVAVLYQDVNCTEVPVAIHADQLTPTWRVYSTGSNVFQTRAGCLIGAEHVNNSYECDIPIGAGICASYQTQTNSPRRARSVASQSIIAYTMSLGAENSVAYSNNSCAIPTNFTISVTTEILPVSMTKTSVDCTMYICGDSTECSNLLLQYGSFCTQLNRALTGIAVEQDKNTQEVFAQVKQIYKTPPIKDFGGFNFSQILPDPSKPSKRSFIEDLLFNKVTLADAGFIKQYGDCLGDIAARDLICAQKFNGLTVLPPLLTDEMIAQYTSALLAGTITSGWTFGAGAALQIPFAMQMAYRFNGIGVTQNVLYENQKLIANQFNSAIGKIQDSLSSTASALGKLQDVVNQNAQALNTLVKQLSSNFGAISSVLNDILSRLDKVEAEVQIDRLITGRLQSLQTYVTQQLIRAAEIRASANLAATKMSECVLGQSKRVDFCGKGYHLMSFPQSAPHGVVFLHVTYVPAQEKNFTCAPAICHDGKAHFPREGVFVSNGTHWFVTQRNFYEPQIITTDNTFVSGNCDVVIGIVNNTVYDPLQPELDSFKEELDKYFKNHTSPDVDLGDISGINASVVNIQKEIDRLNEVAKNLNESLIDLQELGKYEQYIKWPWYIWLGFIAGLIAIVMVTIMLCCMTSCCSCLKGCCSCGSCCKFDEDDSEPVLKGVKLHYT

SEQ ID NO: 613 - protein, 1273 aa, Artificial Sequence
  SARS-CoV-2/Shenzhen/SZTH-001/2020__EPI_ISL_406592 spike protein (1-1273)(I712C_T1077C)
MFVFLVLLPLVSSQCVNLTTRTQLPPAYTNSFTRGVYYPDKVFRSSVLHSTQDLFLPFFSNVTWFHAIHVSGTNGTKRFDNPVLPFNDGVYFASTEKSNIIRGWIFGTTLDSKTQSLLIVNNATNVVIKVCEFQFCNDPFLGVYYHKNNKSWMESEFRVYSSANNCTFEYVSQPFLMDLEGKQGNFKNLREFVFKNIDGYFKIYSKHTPINLVRDLPQGFSALEPLVDLPIGINITRFQTLLALHRSYLTPGDSSSGWTAGAAAYYVGYLQPRTFLLKYNENGTITDAVDCALDPLSETKCTLKSFTVEKGIYQTSNFRVQPTESIVRFPNITNLCPFGEVFNATRFASVYAWNRKRISNCVADYSVLYNSASFSTFKCYGVSPTKLNDLCFTNVYADSFVIRGDEVRQIAPGQTGKIADYNYKLPDDFTGCVIAWNSNNLDSKVGGNYNYLYRLFRKSNLKPFERDISTEIYQAGSTPCNGVEGFNCYFPLQSYGFQPTNGVGYQPYRVVVLSFELLHAPATVCGPKKSTNLVKNKCVNFNFNGLTGTGVLTESNKKFLPFQQFGRDIADTTDAVRDPQTLEILDITPCSFGGVSVITPGTNTSNQVAVLYQDVNCTEVPVAIHADQLTPTWRVYSTGSNVFQTRAGCLIGAEHVNNSYECDIPIGAGICASYQTQTNSPRRARSVASQSIIAYTMSLGAENSVAYSNNSCAIPTNFTISVTTEILPVSMTKTSVDCTMYICGDSTECSNLLLQYGSFCTQLNRALTGIAVEQDKNTQEVFAQVKQIYKTPPIKDFGGFNFSQILPDPSKPSKRSFIEDLLFNKVTLADAGFIKQYGDCLGDIAARDLICAQKFNGLTVLPPLLTDEMIAQYTSALLAGTITSGWTFGAGAALQIPFAMQMAYRFNGIGVTQNVLYENQKLIANQFNSAIGKIQDSLSSTASALGKLQDVVNQNAQALNTLVKQLSSNFGAISSVLNDILSRLDKVEAEVQIDRLITGRLQSLQTYVTQQLIRAAEIRASANLAATKMSECVLGQSKRVDFCGKGYHLMSFPQSAPHGVVFLHVTYVPAQEKNFTCAPAICHDGKAHFPREGVFVSNGTHWFVTQRNFYEPQIITTDNTFVSGNCDVLIGIVNNTVYDPLQPELDSFKEELDKYFKNHTSPDVDLGDISGINASVVNIQKEIDRLNEVAKNLNESLIDLQELGKYEQYIKWPWYIWLGFIAGLIAIVMVTIMLCCMTSCCSCLKGCCSCGSCCKFDEDDSGPVLKGVKLHYT

SEQ ID NO: 614 - protein, 1273 aa, Artificial Sequence
  SARS-CoV-2/Shenzhen/SZTH-004/2020__EPI_ISL_406595 spike protein (1-1273)(I712C_T1077C)
MFVFLVLLPLVSSQCVNLTTRTQLPPAYTNSFTRGVYYPDKVFRSSVLHSTQDLFLPFFSNVTWFHAIHVSGTNGTKRFDNPVLPFNDGVYFASTEKSNIIRGWIFGTTLDSKTQSLLIVNNATNVVIKVCEFQFCNDPFLGVYYHKNNKSWMESEFRVYSSANNCTFEYVSQPFLMDLEGKQGNFKNLREFVFKNIDGYFKIYSKHTPINLVRDLPQGFSALEPLVDLPIGINITRFQTLLALHRSYLTPGDSSSGWTAGAAAYYVGYLQPRTFLLKYNENGTITDAVDCALDPLSETKCTLKSFTVEKGIYQTSNFRVQPTESIVRFPNITNLCPFGEVFNATRFASVYAWDRKRISNCVAYYSVLYNSASFSTFKCYGVSPTKLNDLCFTNVYADSFVIRGDEVRQIAPGQTGKIADYNYKLPDDFTGCVIAWNSNNLDSKVGGNYNYLYRLFRKSNLKPFERDISTEIYQAGSTPCNGVEGFNCYFPLQSYGFQPTNGVGYQPYRVVVLSFELLHAPATVCGPKKSTNLVKNKCVNFNFNGLTGTGVLTESNKKFLPFQQFGRDIADTTDAVRDPQTLEILDITPCSFGGVSVITPGTNTSNQVAVLYQDVNCTEVPVAIHADQLTPTWRVYSTGSNVFQTRAGCLIGAEHVNNSYECDIPIGAGICASYQTQTNSPRRARSVASQSIIAYTMSLGAENSVAYSNNSCAIPTNFTISVTTEILPVSMTKTSVDCTMYICGDSTECSNLLLQYGSFCTQLNRALTGIAVEQDKNTQEVFAQVKQIYKTPPIKDFGGFNFSQILPDPSKPSKRSFIEDLLFNKVTLADAGFIKQYGDCLGDIAARDLICAQKFNGLTVLPPLLTDEMIAQYTSALLAGTITSGWTFGAGAALQIPFAMQMAYRFNGIGVTQNVLYENQKLIANQFNSAIGKIQDSLSSTASALGKLQDVVNQNAQALNTLVKQLSSNFGAISSVLNDILSRLDKVEAEVQIDRLITGRLQSLQTYVTQQLIRAAEIRASANLAATKMSECVLGQSKRVDFCGKGYHLMSFPQSAPHGVVFLHVTYVPAQEKNFTCAPAICHDGKAHFPREGVFVSNGTHWFVTQRNFYEPQIITTDNTFVSGNCDVVIGIVNNTVYDPLQPELDSFKEELDKYFKNHTSPDVDLGDISGINASVVNIQKEIDRLNEVAKNLNESLIDLQELGKYEQYIKWPWYIWLGFIAGLIAIVMVTIMLCCMTSCCSCLKGCCSCGSCCKFDEDDSEPVLKGVKLHYT

SEQ ID NO: 615 - protein, 1273 aa, Artificial Sequence
  SARS-CoV-2/France/IDF0372/2020__EPI_ISL_406596 spike protein (1-1273)(I712C_T1077C)
MFVFLVLLPLVSSQCVNLTTRTQLPPAYTNSFTRGVYYPDKVFRSSVLHSTQDLFLPFFSNVTWFHAIHVSGTNGTKRFDNPVLPFNDGVYFASTEKSNIIRGWIFGTTLDSKTQSLLIVNNATNVVIKVCEFQFCNDPFLGVYYHKNNKSWMESEFRVYSSANNCTFEYVSQPFLMDLEGKQGNFKNLREFVFKNIDGYFKIYSKHTPINLVRDLPQGFSALEPLVDLPIGINITRFQTLLALHRSYLTPGDSSSGWTAGAAAYYVGYLQPRTFLLKYNENGTITDAVDCALDPLSETKCTLKSFTVEKGIYQTSNFRVQPTESIVRFPNITNLCPFGEVFNATRFASVYAWNRKRISNCVADYSFLYNSASFSTFKCYGVSPTKLNDLCFTNVYADSFVIRGDEVRQIAPGQTGKIADYNYKLPDDFTGCVIAWNSNNLDSKVGGNYNYLYRLFRKSNLKPFERDISTEIYQAGSTPCNGVEGFNCYFPLQSYGFQPTNGVGYQPYRVVVLSFELLHAPATVCGPKKSTNLVKNKCVNFNFNGLTGTGVLTESNKKFLPFQQFGRDIADTTDAVRDPQTLEILDITPCSFGGVSVITPGTNTSNQVAVLYQDVNCTEVPVAIHADQLTPTWRVYSTGSNVFQTRAGCLIGAEHVNNSYECDIPIGAGICASYQTQTNSPRRARSVASQSIIAYTMSLGAENSVAYSNNSCAIPTNFTISVTTEILPVSMTKTSVDCTMYICGDSTECSNLLLQYGSFCTQLNRALTGIAVEQDKNTQEVFAQVKQIYKTPPIKDFGGFNFSQILPDPSKPSKRSFIEDLLFNKVTLADAGFIKQYGDCLGDIAARDLICAQKFNGLTVLPPLLTDEMIAQYTSALLAGTITSGWTFGAGAALQIPFAMQMAYRFNGIGVTQNVLYENQKLIANQFNSAIGKIQDSLSSTASALGKLQDVVNQNAQALNTLVKQLSSNFGAISSVLNDILSRLDKVEAEVQIDRLITGRLQSLQTYVTQQLIRAAEIRASANLAATKMSECVLGQSKRVDFCGKGYHLMSFPQSAPHGVVFLHVTYVPAQEKNFTCAPAICHDGKAHFPREGVFVSNGTHWFVTQRNFYEPQIITTDNTFVSGNCDVVIGIVNNTVYDPLQPELDSFKEELDKYFKNHTSPDVDLGDISGINASVVNIQKEIDRLNEVAKNLNESLIDLQELGKYEQYIKWPWYIWLGFIAGLIAIVMVTIMLCCMTSCCSCLKGCCSCGSCCKFDEDDSEPVLKGVKLHYT

SEQ ID NO: 616 - protein, 1273 aa, Artificial Sequence
  SARS-CoV-2/Australia/VIC01/2020__EPI_ISL_406844 spike protein (1-1273)(I712C_T1077C)
MFVFLVLLPLVSSQCVNLTTRTQLPPAYTNSFTRGVYYPDKVFRSSVLHSTQDLFLPFFSNVTWFHAIHVSGTNGTKRFDNPVLPFNDGVYFASTEKSNIIRGWIFGTTLDSKTQSLLIVNNATNVVIKVCEFQFCNDPFLGVYYHKNNKSWMESEFRVYSSANNCTFEYVSQPFLMDLEGKQGNFKNLREFVFKNIDGYFKIYSKHTPINLVRDLPQGFSALEPLVDLPIGINITRFQTLLALHRRYLTPGDSSSGWTAGAAAYYVGYLQPRTFLLKYNENGTITDAVDCALDPLSETKCTLKSFTVEKGIYQTSNFRVQPTESIVRFPNITNLCPFGEVFNATRFASVYAWNRKRISNCVADYSVLYNSASFSTFKCYGVSPTKLNDLCFTNVYADSFVIRGDEVRQIAPGQTGKIADYNYKLPDDFTGCVIAWNSNNLDSKVGGNYNYLYRLFRKSNLKPFERDISTEIYQAGSTPCNGVEGFNCYFPLQSYGFQPTNGVGYQPYRVVVLSFELLHAPATVCGPKKSTNLVKNKCVNFNFNGLTGTGVLTESNKKFLPFQQFGRDIADTTDAVRDPQTLEILDITPCSFGGVSVITPGTNTSNQVAVLYQDVNCTEVPVAIHADQLTPTWRVYSTGSNVFQTRAGCLIGAEHVNNSYECDIPIGAGICASYQTQTNSPRRARSVASQSIIAYTMSLGAENSVAYSNNSCAIPTNFTISVTTEILPVSMTKTSVDCTMYICGDSTECSNLLLQYGSFCTQLNRALTGIAVEQDKNTQEVFAQVKQIYKTPPIKDFGGFNFSQILPDPSKPSKRSFIEDLLFNKVTLADAGFIKQYGDCLGDIAARDLICAQKFNGLTVLPPLLTDEMIAQYTSALLAGTITSGWTFGAGAALQIPFAMQMAYRFNGIGVTQNVLYENQKLIANQFNSAIGKIQDSLSSTASALGKLQDVVNQNAQALNTLVKQLSSNFGAISSVLNDILSRLDKVEAEVQIDRLITGRLQSLQTYVTQQLIRAAEIRASANLAATKMSECVLGQSKRVDFCGKGYHLMSFPQSAPHGVVFLHVTYVPAQEKNFTCAPAICHDGKAHFPREGVFVSNGTHWFVTQRNFYEPQIITTDNTFVSGNCDVVIGIVNNTVYDPLQPELDSFKEELDKYFKNHTSPDVDLGDISGINASVVNIQKEIDRLNEVAKNLNESLIDLQELGKYEQYIKWPWYIWLGFIAGLIAIVMVTIMLCCMTSCCSCLKGCCSCGSCCKFDEDDSEPVLKGVKLHYT

SEQ ID NO: 617 - protein, 1273 aa, Artificial Sequence
  SARS-CoV-2/Germany/BavPat1/2020__EPI_ISL_406862 spike protein (1-1273)(I712C_T1077C)
MFVFLVLLPLVSSQCVNLTTRTQLPPAYTNSFTRGVYYPDKVFRSSVLHSTQDLFLPFFSNVTWFHAIHVSGTNGTKRFDNPVLPFNDGVYFASTEKSNIIRGWIFGTTLDSKTQSLLIVNNATNVVIKVCEFQFCNDPFLGVYYHKNNKSWMESEFRVYSSANNCTFEYVSQPFLMDLEGKQGNFKNLREFVFKNIDGYFKIYSKHTPINLVRDLPQGFSALEPLVDLPIGINITRFQTLLALHRSYLTPGDSSSGWTAGAAAYYVGYLQPRTFLLKYNENGTITDAVDCALDPLSETKCTLKSFTVEKGIYQTSNFRVQPTESIVRFPNITNLCPFGEVFNATRFASVYAWNRKRISNCVADYSVLYNSASFSTFKCYGVSPTKLNDLCFTNVYADSFVIRGDEVRQIAPGQTGKIADYNYKLPDDFTGCVIAWNSNNLDSKVGGNYNYLYRLFRKSNLKPFERDISTEIYQAGSTPCNGVEGFNCYFPLQSYGFQPTNGVGYQPYRVVVLSFELLHAPATVCGPKKSTNLVKNKCVNFNFNGLTGTGVLTESNKKFLPFQQFGRDIADTTDAVRDPQTLEILDITPCSFGGVSVITPGTNTSNQVAVLYQGVNCTEVPVAIHADQLTPTWRVYSTGSNVFQTRAGCLIGAEHVNNSYECDIPIGAGICASYQTQTNSPRRARSVASQSIIAYTMSLGAENSVAYSNNSCAIPTNFTISVTTEILPVSMTKTSVDCTMYICGDSTECSNLLLQYGSFCTQLNRALTGIAVEQDKNTQEVFAQVKQIYKTPPIKDFGGFNFSQILPDPSKPSKRSFIEDLLFNKVTLADAGFIKQYGDCLGDIAARDLICAQKFNGLTVLPPLLTDEMIAQYTSALLAGTITSGWTFGAGAALQIPFAMQMAYRFNGIGVTQNVLYENQKLIANQFNSAIGKIQDSLSSTASALGKLQDVVNQNAQALNTLVKQLSSNFGAISSVLNDILSRLDKVEAEVQIDRLITGRLQSLQTYVTQQLIRAAEIRASANLAATKMSECVLGQSKRVDFCGKGYHLMSFPQSAPHGVVFLHVTYVPAQEKNFTCAPAICHDGKAHFPREGVFVSNGTHWFVTQRNFYEPQIITTDNTFVSGNCDVVIGIVNNTVYDPLQPELDSFKEELDKYFKNHTSPDVDLGDISGINASVVNIQKEIDRLNEVAKNLNESLIDLQELGKYEQYIKWPWYIWLGFIAGLIAIVMVTIMLCCMTSCCSCLKGCCSCGSCCKFDEDDSEPVLKGVKLHYT

SEQ ID NO: 618 - protein, 1273 aa, Artificial Sequence
  SARS-CoV-2/Wuhan/HBCDC-HB-02/2020__EPI_ISL_412978 spike protein (1-1273)(I712C_T1077C)
MFVFLVLLPLVSSQCVNLTTRTQLPPAYTNSFTRGVYYPDKVFRSSVLHSTQDLFLPFFSNVTWFHAIHVSGTNGTKRFDNPVLPFNDGVYFASTEKSNIIRGWIFGTTLDSKTQSLLIVNNATNVVIKVCEFQFCNDPFLGVYYHKNNKSWMESEFRVYSSANNCTFEYVSQPFLMDLEGKQGNFKNLREFVFKNIDGYFKIYSKHTPINLVRDLPQGFSALEPLVDLPIGINITRFQTLLALHRSYLTPGDSSSGWTAGAAAYYVGYLQPRTFLLKYNENGTITDAVDCALDPLSETKCTLKSFTVEKGIYQTSNFRVQPTESIVRFPNITNLCPFGEVFNATRFASVYAWNRKRISNCVADYSVLYNSASFSTFKCYGVSPTKLNDLCFTNVYADSFVIRGDEVRQIAPGQTGKIADYNYKLPDDFTGCVIAWNSNNLDSKVGGNYNYLYRLFRKSNLKPFERDISTEIYQAGSTPCNGVEGFNCYFPLQSYGFQPTNGVGYQPYRVVVLSFELLHAPATVCGPKKSTNLVKNKCVNFNFNGLTGTGVLTESNKKFLPFQQFGRDIADTTDAVRDPQTLEILDITPCSFGGVSVITPGTNTSNQVAVLYQDVNCTEVPVAIHADQLTPTWRVYSTGSNVFQTRAGCLIGAEHVNNSYECDIPIGAGICASYQTQTNSPRRARSVASQSIIAYTMSLGAENSVAYSNNSCAIPTNFTISVTTEILPVSMTKTSVDCTMYICGDSTECSNFLLQYGSFCTQLNRALTGIAVEQDKNTQEVFAQVKQIYKTPPIKDFGGFNFSQILPDPSKPSKRSFIEDLLFNKVTLADAGFIKQYGDCLGDIAARDLICAQKFNGLTVLPPLLTDEMIAQYTSALLAGTITSGWTFGAGAALQIPFAMQMAYRFNGIGVTQNVLYENQKLIANQFNSAIGKIQDSLSSTASALGKLQDVVNQNAQALNTLVKQLSSNFGAISSVLNDILSRLDKVEAEVQIDRLITGRLQSLQTYVTQQLIRAAEIRASANLAATKMSECVLGQSKRVDFCGKGYHLMSFPQSAPHGVVFLHVTYVPAQEKNFTCAPAICHDGKAHFPREGVFVSNGTHWFVTQRNFYEPQIITTDNTFVSGNCDVVIGIVNNTVYDPLQPELDSFKEELDKYFKNHTSPDVDLGDISGINASVVNIQKEIDRLNEVAKNLNESLIDLQELGKYEQYIKWPWYIWLGFIAGLIAIVMVTIMLCCMTSCCSCLKGCCSCGSCCKFDEDDSEPVLKGVKLHYT

SEQ ID NO: 619 - protein, 1273 aa, Artificial Sequence
  SARS-CoV-2/Australia/QLD02/2020__EPI_ISL_407896 spike protein (1-1273)(I712C_T1077C)
MFVFLVLLPLVSSQCVNLTTRTQLPPAYTNSFTRGVYYPDKVFRSSVLHSTQDLFLPFFSNVTWFHAIHVSGTNGTKRFDNPVLPFNDGVYFASTEKSNIIRGWIFGTTLDSKTQSLLIVNNATNVVIKVCEFQFCNDPFLGVYYHKNNKSWMESEFRVYSSANNCTFEYVSQPFLMDLEGKQGNFKNLREFVFKNIDGYFKIYSKHTPINLVRDLPQGFSALEPLVDLPIGINITRFQTLLALHRSYLTPGDSSSGWTAGAAAYYVGYLQPRTFLLKYNENGTITDAVDCALDPLSETKCTLKSFTVEKGIYQTSNFRVQPTESIVRFPNITNLCPFGEVFNATRFASVYAWNRKRISNCVADYSVLYNSASFSTFKCYGVSPTKLNDLCFTNVYADSFVIRGDEVRQIAPGQTGKIADYNYKLPDDFTGCVIAWNSNNLDSKVGGNYNYLYRLFRKSNLKPFERDISTEIYQAGSTPCNGVEGFNCYFPLQSYGFQPTNGVGYQPYRVVVLSFELLHAPATVCGPKKSTNLVKNKCVNFNFNGLTGTGVLTESNKKFLPFQQFGRDIADTTDAVRDPQTLEILDITPCSFGGVSVITPGTNTSNQVAVLYQDVNCTEVPVAIHADQLTPTWRVYSTGSNVFQTRAGCLIGAEHVNNSYECDIPIGAGICASYQTQTNSPRRARSVASQSIIAYTMSLGAENSVAYSNNSCAIPTNFTISVTTEILPVSMTKTSVDCTMYICGDSTECSNLLLQYGSFCTQLNRALTGIAVEQDKNTQEVFAQVKQIYKTPPIKDFGGFNFSQILPDPSKPSKRSFIEDLLFNKVTLADAGFIKQYGDCLGDIAARDLICAQKFNGLTVLPPLLTDEMIAQYTSALLAGTITSGWTFGAGAALQIPFAMQMAYRFNGIGVTQNVLYENQKLIANQFNSAIGKIQDSLSSTASALGKLQDVVNQNAQALNTLVKQLSSNFGAISSVLNDILSRLDKVEAEVQIDRLITGRLQSLQTYVTQQLIRAAEIRASANLAATKMSECVLGQSKRVDFCGKGYHLMSFPQSAPHGVVFLHVTYVPAQEKNFTCAPAICHDGKAHFPREGVFVSNGTHWFVTQRNFYEPQIITTDNTFVSGNCDVVIGIVNNTVYDPLQLELDSFKEELDKYFKNHTSPDVDLGDISGINASVVNIQKEIDRLNEVAKNLNESLIDLQELGKYEQYIKWPWYIWLGFIAGLIAIVMVTIMLCCMTSCCSCLKGCCSCGSCCKFDEDDSEPVLKGVKLHYT

SEQ ID NO: 620 - protein, 1273 aa, Artificial Sequence
  SARS-CoV-2/India/1-31/2020__EPI_ISL_413523 spike protein (1-1273)(I712C_T1077C)
MFVFLVLLPLVSSQCVNLTTRTQLPPAYTNSFTRGVYYPDKVFRSSVLHSTQDLFLPFFSNVTWFHAIHVSGTNGTKRFDNPVLPFNDGVYFASTEKSNIIRGWIFGTTLDSKTQSLLIVNNATNVVIKVCEFQFCNDPFLGVYYHKNNKSWMESEFRVYSSANNCTFEYVSQPFLMDLEGKQGNFKNLREFVFKNIDGYFKIYSKHTPINLVRDLPQGFSALEPLVDLPIGINITRFQTLLALHRSYLTPGDSSSGWTAGAAAYYVGYLQPRTFLLKYNENGTITDAVDCALDPLSETKCTLKSFTVEKGIYQTSNFRVQPTESIVRFPNITNLCPFGEVFNATRFASVYAWNRKRISNCVADYSVLYNSASFSTFKCYGVSPTKLNDLCFTNVYADSFVIRGDEVRQIAPGQTGKIADYNYKLPDDFTGCVIAWNSNNLDSKVGGNYNYLYRLFRKSNLKPFERDISTEIYQAGSTPCNGVEGFNCYFPLQSYGFQPTNGVGYQPYRVVVLSFELLHAPATVCGPKKSTNLVKNKCVNFNFNGLTGTGVLTESNKKFLPFQQFGRDIADTTDAVRDPQTLEILDITPCSFGGVSVITPGTNTSNQVAVLYQDVNCTEVPVAIHADQLTPTWRVYSTGSNVFQTRAGCLIGAEHVNNSYECDIPIGAGICASYQTQTNSPRRARSVASQSIIAYTMSLGAENSVAYSNNSCAIPTNFTISVTTEILPVSMTKTSVDCTMYICGDSTECSNLLLQYGSFCTQLNRALTGIAVEQDKNTQEVFAQVKQIYKTPPIKDFGGFNFSQILPDPSKPSKRSFIEDLLFNKVTLADAGFIKQYGDCLGDIAARDLICAQKFNGLTVLPPLLTDEMIAQYTSALLAGTITSGWTFGAGAALQIPFAMQMAYRFNGIGVTQNVLYENQKLIANQFNSVIGKIQDSLSSTASALGKLQDVVNQNAQALNTLVKQLSSNFGAISSVLNDILSRLDKVEAEVQIDRLITGRLQSLQTYVTQQLIRAAEIRASANLAATKMSECVLGQSKRVDFCGKGYHLMSFPQSAPHGVVFLHVTYVPAQEKNFTCAPAICHDGKAHFPREGVFVSNGTHWFVTQRNFYEPQIITTDNTFVSGNCDVVIGIVNNTVYDPLQPELDSFKEELDKYFKNHTSPDVDLGDISGINASVVNIQKEIDRLNEVAKNLNESLIDLQELGKYEQYIKWPWYIWLGFIAGLIAIVMVTIMLCCMTSCCSCLKGCCSCGSCCKFDEDDSEPVLKGVKLHYT

SEQ ID NO: 621 - protein, 1273 aa, Artificial Sequence
  SARS-CoV-2/Guangdong/GD2020087-P0008/2020__EPI_ISL_413863 spike protein (1-1273)(I712C_T1077C)
MFVFLVLLPLVSSQCVNLTTRTQLPPAYTNSFTRGVYYPDKVFRSSVLHSTQDLFLPFFSNVTWFHAIHVSGTNGTKRFDNPVLPFNDGVYFASTEKSNIIRGWIFGTTLDSKTQSLLIVNNATNVVIKVCEFQFCNDPFLGVYYHKNNKSWMESEFRVYSSANNCTFEYVSQPFLMDLEGKQGNFKNLREFVFKNIDGYFKIYSKHTPINLVRDLPQGFSALEPLVDLPIGINITRFQTLLALHRSYLTPGDSSSGWTAGAAAYYVGYLQPRTFLLKYNENGTITDAVDCALDPLSETKCTLKSFTVEKGIYQTSNFRVQPTESIVRFPNITNLCPFGEVFNATRFASVYAWNRKRISNCVADYSVLYNSASFSTFKCYGVSPTKLNDLCFTNVYADSFVIRGDEVREIAPGQTGKIADYNYKLPDDFTGCVIAWNSNNLDSKVGGNYNYLYRLFRKSNLKPFERDISTEIYQAGSTPCNGVEGFNCYFPLQSYGFQPTNGVGYQPYRVVVLSFELLHAPATVCGPKKSTNLVKNKCVNFNFNGLTGTGVLTESNKKFLPFQQFGRDIADTTDAVRDPQTLEILDITPCSFGGVSVITPGTNTSNQVAVLYQDVNCTEVPVAIHADQLTPTWRVYSTGSNVFQTRAGCLIGAEHVNNSYECDIPIGAGICASYQTQTNSPRRARSVASQSIIAYTMSLGAENSVAYSNNSCAIPTNFTISVTTEILPVSMTKTSVDCTMYICGDSTECSNLLLQYGSFCTQLNRALTGIAVEQDKNTQEVFAQVKQIYKTPPIKDFGGFNFSQILPDPSKPSKRSFIEDLLFNKVTLADAGFIKQYGDCLGDIAARDLICAQKFNGLTVLPPLLTDEMIAQYTSALLAGTITSGWTFGAGAALQIPFAMQMAYRFNGIGVTQNVLYENQKLIANQFNSAIGKIQDSLSSTASALGKLQDVVNQNAQALNTLVKQLSSNFGAISSVLNDILSRLDKVEAEVQIDRLITGRLQSLQTYVTQQLIRAAEIRASANLAATKMSECVLGQSKRVDFCGKGYHLMSFPQSAPHGVVFLHVTYVPAQEKNFTCAPAICHDGKAHFPREGVFVSNGTHWFVTQRNFYEPQIITTDNTFVSGNCDVVIGIVNNTVYDPLQPELDSFKEELDKYFKNHTSPDVDLGDISGINASVVNIQKEIDRLNEVAKNLNESLIDLQELGKYEQYIKWPWYIWLGFIAGLIAIVMVTIMLCCMTSCCSCLKGCCSCGSCCKFDEDDSEPVLKGVKLHYT

SEQ ID NO: 622 - protein, 1273 aa, Artificial Sequence
  SARS-CoV-2/Sweden/01/2020__EPI_ISL_411951 spike protein (1-1273)(I712C_T1077C)
MFVFLVLLPLVSSQCVNLTTRTQLPPAYTNSFTRGVYYPDKVFRSSVLHSTQDLFLPFFSNVTWFHAIHVSGTNGTKRFDNPVLPFNDGVYFASTEKSNIIRGWIFGTTLDSKTQSLLIVNNATNVVIKVCEFQFCNDPFLGVYYHKNNKSWMESEFRVYSSANNCTFEYVSQPFLMDLEGKQGNFKNLREFVFKNIDGYFKIYSKHTPINLVRDLPQGFSALEPLVDLPIGINITRFQTLLALHRSYLTPGDSSSGWTAGAAAYYVGYLQPRTFLLKYNENGTITDAVDCALDPLSETKCTLKSFTVEKGIYQTSNFRVQPTESIVRFPNITNLCPFGEVFNATRFASVYAWNRKRISNCVADYSVLYNSASFSTFKCYGVSPTKLNDLCFTNVYADSFVIRGDEVRQIAPGQTGKIADYNYKLPDDFTGCVIAWNSNNLDSKVGGNYNYLYRLFRKSNLKPFERDISTEIYQAGSTPCNGVEGFNCYFPLQSYGFQPTNGVGYQPYRVVVLSFELLHAPATVCGPKKSTNLVKNKCVNFNFNGLTGTGVLTESNKKFLPFQQFGRDIADTTDAVRDPQTLEILDITPCSFGGVSVITPGTNTSNQVAVLYQDVNCTEVPVAIHADQLTPTWRVYSTGSNVFQTRAGCLIGAEHVNNSYECDIPIGAGICASYQTQTNSPRRARSVASQSIIAYTMSLGAENSVAYSNNSCAIPTNFTISVTTEILPVSMTKTSVDCTMYICGDSTECSNLLLQYGSFCTQLNRALTGIAVEQDKNTQEVFAQVKQIYKTPPIKDCGGFNFSQILPDPSKPSKRSFIEDLLFNKVTLADAGFIKQYGDCLGDIAARDLICAQKFNGLTVLPPLLTDEMIAQYTSALLAGTITSGWTFGAGAALQIPFAMQMAYRFNGIGVTQNVLYENQKLIANQFNSAIGKIQDSLSSTASALGKLQDVVNQNAQALNTLVKQLSSNFGAISSVLNDILSRLDKVEAEVQIDRLITGRLQSLQTYVTQQLIRAAEIRASANLAATKMSECVLGQSKRVDFCGKGYHLMSFPQSAPHGVVFLHVTYVPAQEKNFTCAPAICHDGKAHFPREGVFVSNGTHWFVTQRNFYEPQIITTDNTFVSGNCDVVIGIVNNTVYDPLQPELDSFKEELDKYFKNHTSPDVDLGDISGINASVVNIQKEIDRLNEVAKNLNESLIDLQELGKYEQYIKWPWYIWLGFIAGLIAIVMVTIMLCCMTSCCSCLKGCCSCGSCCKFDEDDSEPVLKGVKLHYT

SEQ ID NO: 623 - protein, 1273 aa, Artificial Sequence
  SARS-CoV-2/Tianmen/HBCDC-HB-07/2020__EPI_ISL_412983 spike protein (1-1273)(I712C_T1077C)
MFVFLVLLPLVSSQCVNLTTRTQLPPAYTNSFTRGVYYPDKVFRSSVLHSTQDLFLPFFSNVTWFHAIHVSGTNGTKRFDNPVLPFNDGVYFASTEKSNIIRGWIFGTTLDSKTQSLLIVNNATNVVIKVCEFQFCNDPFLGVYYHKNNKSWMESEFRVYSSANNCTFEYVSQPFLMDLEGKQGNFKNLREFVFKNIDGYFKIYSKHTPINLVRDLPQGFSALEPLVDLPIGINITRFQTLLALHRSYLTPGDSSSGWTAGAAAYYVGYLQPRTFLLKYNENGTITDAVDCALDPLSETKCTLKSFTVEKGIYQTSNFRVQPTESIVRFPNITNLCPFGEVFNATRFASVYAWNRKRISNCVADYSVLYNSASFSTFKCYGVSPTKLNDLCFTNVYADSFVIRGDEVRQIAPGQTGKIADYNYKLPDDFTGCVIAWNSNNLDSKVGGNYNYLYRLFRKSNLKPFERDISTEIYQAGSTPCNGVEGFNCYFPLQSYGFQPTNGVGYQPYRVVVLSFELLHAPATVCGPKKSTNLVKNKCVNFNFNGLTGTGVLTESNKKFLPFQQFGRDIADTTDAVRDPQTLEILDITPCSFGGVSVITPGTNTSNQVAVLYQDLNCTEVPVAIHADQLTPTWRVYSTGSNVFQTRAGCLIGAEHVNNSYECDIPIGAGICASYQTQTNSPRRARSVASQSIIAYTMSLGAENSVAYSNNSCAIPTNFTISVTTEILPVSMTKTSVDCTMYICGDSTECSNLLLQYGSFCTQLNRALTGIAVEQDKNTQEVFAQVKQIYKTPPIKDFGGFNFSQILPDPSKPSKRSFIEDLLFNKVTLADAGFIKQYGDCLGDIAARDLICAQKFNGLTVLPPLLTDEMIAQYTSALLAGTITSGWTFGAGAALQIPFAMQMAYRFNGIGVTQNVLYENQKLIANQFNSAIGKIQDSLSSTASALGKLQDVVNQNAQALNTLVKQLSSNFGAISSVLNDILSRLDKVEAEVQIDRLITGRLQSLQTYVTQQLIRAAEIRASANLAATKMSECVLGQSKRVDFCGKGYHLMSFPQSAPHGVVFLHVTYVPAQEKNFTCAPAICHDGKAHFPREGVFVSNGTHWFVTQRNFYEPQIITTDNTFVSGNCDVVIGIVNNTVYDPLQPELDSFKEELDKYFKNHTSPDVDLGDISGINASVVNIQKEIDRLNEVAKNLNESLIDLQELGKYEQYIKWPWYIWLGFIAGLIAIVMVTIMLCCMTSCCSCLKGCCSCGSCCKFDEDDSEPVLKGVKLHYT

SEQ ID NO: 624 - protein, 1273 aa, Artificial Sequence
  SARS-CoV-2/Hong Kong/case42_VM20002493/2020__EPI_ISL_414527 spike protein (1-1273)(I712C_T1077C)
MFVFLVLLPLVSSQCVNLTTRTQLPPAYTNSFTRGVYYPDKVFRSSVLHSTQDLFLPFFSNVTWFHAIHVSGTNGTKRFDNPVLPFNDGVYFASTEKSNIIRGWIFGTTLDSKTQSLLIVNNATNVVIKVCEFQFCNDPFLGVYYHKNNKSWMESEFRVYSSANNCTFEYVSQPFLMDLEGKQGNFKNLREFVFKNIDGYFKIYSKHTPINLVRDLPQGFSALEPLVDLPIGINITRFQTLLALHRSYLTPGDSSSGWTAGAAAYYVGYLQPRTFLLKYNENGTITDAVDCALDPLSETKCTLKSFTVEKGIYQTSNFRVQPTESIVRFPNITNLCPFGEVFNATRFASVYAWNRKRISNCVADYSVLYNSASFSTFKCYGVSPTKLNDLCFTNVYADSFVIRGDEVRQIAPGQTGKIADYNYKLPDDFTGCVIAWNSNNLDSKVGGNYNYLYRLFRKSNLKPFERDISTEIYQAGSTPCNGVEGFNCYFPLQSYGFQPTNGVGYQPYRVVVLSFELLHAPATVCGPKKSTNLVKNKCVNFNFNGLTGTGVLTESNKKFLPFQQFGRDIADTTDAVRDPQTLEILDITPCSFGGVSVITPGTNTSNQVAVLYQDVNCTEVPVAIHADQLTPTWRVYSTGSNVFQTRAGCLIGAEHVNNSYECDIPIGAGICASYQTQTNSPRRARSVASQSIIAYTMSLGAENSVAYSNNSCAIPTNFAISVTTEILPVSMTKTSVDCTMYICGDSTECSNLLLQYGSFCTQLNRALTGIAVEQDKNTQEVFAQVKQIYKTPPIKDFGGFNFSQILPDPSKPSKRSFIEDLLFNKVTLADAGFIKQYGDCLGDIAARDLICAQKFNGLTVLPPLLTDEMIAQYTSALLAGTITSGWTFGAGAALQIPFAMQMAYRFNGIGVTQNVLYENQKLIANQFNSAIGKIQDSLSSTASALGKLQDVVNQNAQALNTLVKQLSSNFGAISSVLNDILSRLDKVEAEVQIDRLITGRLQSLQTYVTQQLIRAAEIRASANLAATKMSECVLGQSKRVDFCGKGYHLMSFPQSAPHGVVFLHVTYVPAQEKNFTCAPAICHDGKAHFPREGVFVSNGTHWFVTQRNFYEPQIITTDNTFVSGNCDVVIGIVNNTVYDPLQPELDSFKEELDKYFKNHTSPDVDLGDISGINASVVNIQKEIDRLNEVAKNLNESLIDLQELGKYEQYIKWPWYIWLGFIAGLIAIVMVTIMLCCMTSCCSCLKGCCSCGSCCKFDEDDSEPVLKGVKLHYT

SEQ ID NO: 625 - protein, 1273 aa, Artificial Sequence
  SARS-CoV-2/USA/CruiseA-23/2020__EPI_ISL_414482 spike protein (1-1273)(I712C_T1077C)
MFVFLVLLPLVSSQCVNLTTRTQLPPAYTNSFTRGVYYPDKVFRSSVLHSTQDLFLPFFSNVTWFHAIHVSGTNGTKRFDNPVLPFNDGVYFASTEKSNIIRGWIFGTTLDSKTQSLLIVNNATNVVIKVCEFQFCNDPFLGVYYHKNNKSWMESEFRVYSSANNCTFEYVSQPFLMDLEVKQGNFKNLREFVFKNIDGYFKIYSKHTPINLVRDLPQGFSALEPLVDLPIGINITRFQTLLALHRSYLTPGDSSSGWTAGAAAYYVGYLQPRTFLLKYNENGTITDAVDCALDPLSETKCTLKSFTVEKGIYQTSNFRVQPTESIVRFPNITNLCPFGEVFNATRFASVYAWNRKRISNCVADYSVLYNSASFSTFKCYGVSPTKLNDLCFTNVYADSFVIRGDEVRQIAPGQTGKIADYNYKLPDDFTGCVIAWNSNNLDSKVGGNYNYLYRLFRKSNLKPFERDISTEIYQAGSTPCNGVEGFNCYFPLQSYGFQPTNGVGYQPYRVVVLSFELLHAPATVCGPKKSTNLVKNKCVNFNFNGLTGTGVLTESNKKFLPFQQFGRDIADTTDAVRDPQTLEILDITPCSFGGVSVITPGTNTSNQVAVLYQDVNCTEVPVAIHADQLTPTWRVYSTGSNVFQTRAGCLIGAEHVNNSYECDIPIGAGICASYQTQTNSPRRARSVASQSIIAYTMSLGAENSVAYSNNSCAIPTNFTISVTTEILPVSMTKTSVDCTMYICGDSTECSNLLLQYGSFCTQLNRALTGIAVEQDKNTQEVFAQVKQIYKTPPIKDFGGFNFSQILPDPSKPSKRSFIEDLLFNKVTLADAGFIKQYGDCLGDIAARDLICAQKFNGLTVLPPLLTDEMIAQYTSALLAGTITSGWTFGAGAALQIPFAMQMAYRFNGIGVTQNVLYENQKLIANQFNSAIGKIQDSLSSTASALGKLQDVVNQNAQALNTLVKQLSSNFGAISSVLNDILSRLDKVEAEVQIDRLITGRLQSLQTYVTQQLIRAAEIRASANLAATKMSECVLGQSKRVDFCGKGYHLMSFPQSAPHGVVFLHVTYVPAQEKNFTCAPAICHDGKAHFPREGVFVSNGTHWFVTQRNFYEPQIITTDNTFVSGNCDVVIGIVNNTVYDPLQPELDSFKEELDKYFKNHTSPDVDLGDISGINASVVNIQKEIDRLNEVAKNLNESLIDLQELGKYEQYIKWPWYIWLGFIAGLIAIVMVTIMLCCMTSCCSCLKGCCSCGSCCKFDEDDSEPVLKGVKLHYT

SEQ ID NO: 626 - protein, 1273 aa, Artificial Sequence
  SARS-CoV-2/Hong Kong/case85_VM20002868/2020__EPI_ISL_414519 spike protein (1-1273)(I712C_T1077C)
MFVFLVLVPLVSSQCVNLTTRTQLPPAYTNSFTRGVYYPDKVFRSSVLHSTQDLFLPFFSNVTWFHAIHVSGTNGTKRFDNPVLPFNDGVYFASTEKSNIIRGWIFGTTLDSKTQSLLIVNNATNVVIKVCEFQFCNDPFLGVYYHKNNKSWMESEFRVYSSANNCTFEYVSQPFLMDLEGKQGNFKNLREFVFKNIDGYFKIYSKHTPINLVRDLPQGFSALEPLVDLPIGINITRFQTLLALHRSYLTPGDSSSGWTAGAAAYYVGYLQPRTFLLKYNENGTITDAVDCALDPLSETKCTLKSFTVEKGIYQTSNFRVQPTESIVRFPNITNLCPFGEVFNATRFASVYAWNRKRISNCVADYSVLYNSASFSTFKCYGVSPTKLNDLCFTNVYADSFVIRGDEVRQIAPGQTGKIADYNYKLPDDFTGCVIAWNSNNLDSKVGGNYNYLYRLFRKSNLKPFERDISTEIYQAGSTPCNGVEGFNCYFPLQSYGFQPTNGVGYQPYRVVVLSFELLHAPATVCGPKKSTNLVKNKCVNFNFNGLTGTGVLTESNKKFLPFQQFGRDIADTTDAVRDPQTLEILDITPCSFGGVSVITPGTNTSNQVAVLYQDVNCTEVPVAIHADQLTPTWRVYSTGSNVFQTRAGCLIGAEHVNNSYECDIPIGAGICASYQTQTNSPRRARSVASQSIIAYTMSLGAENSVAYSNNSCAIPTNFTISVTTEILPVSMTKTSVDCTMYICGDSTECSNLLLQYGSFCTQLNRALTGIAVEQDKNTQEVFAQVKQIYKTPPIKDFGGFNFSQILPDPSKPSKRSFIEDLLFNKVTLADAGFIKQYGDCLGDIAARDLICAQKFNGLTVLPPLLTDEMIAQYTSALLAGTITSGWTFGAGAALQIPFAMQMAYRFNGIGVTQNVLYENQKLIANQFNSAIGKIQDSLSSTASALGKLQDVVNQNAQALNTLVKQLSSNFGAISSVLNDILSRLDKVEAEVQIDRLITGRLQSLQTYVTQQLIRAAEIRASANLAATKMSECVLGQSKRVDFCGKGYHLMSFPQSAPHGVVFLHVTYVPAQEKNFTCAPAICHDGKAHFPREGVFVSNGTHWFVTQRNFYEPQIITTDNTFVSGNCDVVIGIVNNTVYDPLQPELDSFKEELDKYFKNHTSPDVDLGDISGINASVVNIQKEIDRLNEVAKNLNESLIDLQELGKYEQYIKWPWYIWLGFIAGLIAIVMVTIMLCCMTSCCSCLKGCCSCGSCCKFDEDDSEPVLKGVKLHYT

SEQ ID NO: 627 - protein, 1273 aa, Artificial Sequence
  SARS-CoV-2/England/200990660/2020__EPI_ISL_414523 spike protein (1-1273)(I712C_T1077C)
MFVFLVLLPLVSSQCVNLTTRTQLPPAYTNSFTRGVYYPDKVFRSSVLHSTQDLFLPFFSNVTWFHAIHVSGTNGTKRFDNPVLPFNDGVYFASTEKSNIIRGWIFGTTLDSKTQSLLIVNNATNVVIKVCEFQFCNDPFLGVYYHKNNKSWMESEFRVYSSANNCTFEYVSQPFLMDLEGKQGNFKNLREFVFKNIDGYFKIYSKHTPINLVRDLPQGFSALEPLVDLPIGINITRFQTLLALHRSYLTPGDSSSGWTAGAAAYYVGYLQPRTFLLKYNENGTITDAVDCALDPLSETKCTLKSFTVEKGIYQTSNFRVQPTESIVRFPNITNLCPFGEVFNATRFASVYAWNRKRISNCVADYSVLYNSASFSTFKCYGVSPTKLNDLCFTNVYADSFVIRGDEVRQIAPGQTGKIADYNYKLPDDFTGCVIAWNSNNLDSKVGGNYNYLYRLFRKSNLKPFERDISTEIYQAGSTPCNGVEGFNCYFPLQSYGFQPTNGVGYQPYRVVVLSFELLHAPATVCGPKKSTNLVKNKCVNFNFNGLTGTGVLTESNKKFLPFQQFGRDIADTTDAVRDPQTLEILDITPCSFGGVSVITPGTNTSNQVAVLYQGVNCTEVPVAIHADQLTPTWRVYSTGSNVFQTRAGCLIGAEHVNNSYECDIPIGAGICASYQTQTNSPRRARSVASQSIIAYTMSLGAENSVAYSNNSCAIPTNFTISVTTEILPVSMTKTSVDCTMYICGDSTECSNLLLQYGSFCTQLNRALTGIAVEQDKNTQEVFAQVKQIYKTPPIKDFGGFNFSQILPDPSKPSKRSFIEDLLFNKVTLADAGFIKQYGDCLGDIAARDLICAQKFNGLTVLPPLLTDEMIAQYTSALLAGTITSGWTFGAGAALQIPFAMQMAYRFNGIGVTQNVLYENQKLIANQFNSAIGKIQDSLSSTASALGKLQDVVNQNAQALNTLVKQLSSNFGAISSVLNDILSRLDKVEAEVQIDRLITGRLQSLQTYVTQQLIRAAEIRASANLAATKMSECVLGQSKRVDFCGKGYHLMSFPQSAPHGVVFLHVTYVPAQEKNFTCAPAICHDGKAHFPREGVFVSNGTHWFVTQRNFYEPQIITTDNTFVSGNCDVVIGIVNNTVYDPLQPELDSFKEELDKYFKNHTSPDVDLGDISGINASVVNIQKEIDRLNEVAKNLNESLIDLQELGKYEQYIKWPWYIWLGFIAGLIAIVMVTIMLCCMTSCCSCLKGCCSCGSCCKFDEDDSELVLKGVKLHYT

SEQ ID NO: 628 - protein, 1273 aa, Artificial Sequence
  SARS-CoV-2/Australia/NSW09/2020__EPI_ISL_413595 spike protein (1-1273)(I712C_T1077C)
MFVFLVLLPLVSSQCVNLTTRTQLPPAYTNSFTRGVYYPDKVFRSSVLHSTQDLFLPFFSNVTWFHAIHVSGTNGTKRFDNPVLPFNDGVYFASTEKSNIIRGWIFGTTLDSKTQSLLIVNNATNVVIKVCEFQFCNDPFLGVYYHKNNKSWMESEFRVYSSANNCTFEYVSQPFLMDLEGKQGNFKNLREFVFKNIDGYFKIYSKHTPINLVRDLPQGFSALEPLVDLPIGINITRFQTLLALHRSYLTPGDSSSGWTAGAAAYYVGYLQPRTFLLKYNENGTITDAVDCALDPLSETKCTLKSFTVEKGIYQTSNFRVQPTESIVRFPNITNLCPFGEVFNATRFASVYAWNRKRISNCVADYSVLYNSASFSTFKCYGVSPTKLNDLCFTNVYADSFVIRGDEVRQIAPGQTGKIADYNYKLPDDFTGCVIAWNSNNLDSKVGGNYNYLYRLFRKSNLKPFERDISTEIYQAGSTPCNGVEGFNCYFPLQSYGFQPTNGVGYQPYRVVVLSFELLHAPATVCGPKKSTNLVKNKCVNFNFNGLTGTGVLTESNKKFLPFQQFGRDIADTTDAVRDPQTLEILDITPCSFGGVSVITPGTNTSNQVAVLYQDVNCTEVPVAIHADQLTPTWRVYSTGSNVFQTRAGCLIGAEHVNNSYECDIPIGAGICASYQTQTNSPRRARSVASQSIIAYTMSLGAENSVAYSNNSCAIPTNFTISVTTEILPVSMTKTSVDCTMYICGDSTECSNLLLQYGSFCTQLNRALTGIAVEQDKNTQEVFAQVKQIYKTPPIKDFGGFNFSQILPDPSKPSKRSFIEDLLFNKVTLADAGFIKQYGDCLGDIAARDLICAQKFNGLTVLPPLLTDEMIAQYTSALLAGTITSGWTFGAGAALQIPFAMQMAYRFNGIGVTQNVLYENQKLIANQFNSAIGKIQDSLSFTASALGKLQDVVNQNAQALNTLVKQLSSNFGAISSVLNDILSRLDKVEAEVQIDRLITGRLQSLQTYVTQQLIRAAEIRASANLAATKMSECVLGQSKRVDFCGKGYHLMSFPQSAPHGVVFLHVTYVPAQEKNFTCAPAICHDGKAHFPREGVFVSNGTHWFVTQRNFYEPQIITTDNTFVSGNCDVVIGIVNNTVYDPLQPELDSFKEELDKYFKNHTSPDVDLGDISGINASVVNIQKEIDRLNEVAKNLNESLIDLQELGKYEQYIKWPWYIWLGFIAGLIAIVMVTIMLCCMTSCCSCLKGCCSCGSCCKFDEDDSEPVLKGVKLHYT

SEQ ID NO: 629 - protein, 1273 aa, Artificial Sequence
  SARS-CoV-2/Australia/NSW10/2020__EPI_ISL_413596 spike protein (1-1273)(I712C_T1077C)
MFVFLVLLPLVSSQCVNLTTRTQLPPAYTNSFTRGVYYPDKVFRSSVLHSTQDLFLPFFSNVTWFHAIHVSGTNGTKRFDNPVLPFNDGVYFASTEKSNIIRGWIFGTTLDSKTQSLLIVNNATNVVIKVCEFQFCNDPFLGVYYHKNNKSWMESEFRVYSSANNCTFEYVSQPFLMDLEGKQGNFKNLREFVFKNIDGYFKIYSKHTPINLVRDLPQGFSALEPLVDLPIGINITRFQTLLALHRSYLTPGDSSSGWTAGAAAYYVGYLQPRTFLLKYNENGTITDAVDCALDPLSETKCTLKSFTVEKGIYQTSNFRVQPTESIVRFPNITNLCPFGEVFNATRFASVYAWNRKRISNCVADYSVLYNSASFSTFKCYGVSPTKLNDLCFTNVYADSFVIRGDEVRQIAPGQTGKIADYNYKLPDDFTGCVIAWNSNNLDSKVGGNYNYLYRLFRKSNLKPFERDISTEIYQAGSTPCNGVEGFNCYFPLQSYGFQPTNGVGYQPYRVVVLSFELLHAPATVCGPKKSTNLVKNKCVNFNFNGLTGTGVLTESNKKFLPFQQFGRDIADTTDAVRDPQTLEILDITPCSFGGVSVITPGTNTSNQVAVLYQDVNCTEVPVAIHADQLTPTWRVYSTGSNVFQTRAGCLIGAEHVNNSYECDIPIGAGICASYQTQTNSPRRARSVASQSIIAYTMSLGAENSVAYSNNSCAIPTNFTISVTTEILPVSMTKTSVDCTMYICGDSTECSNLLLQYGSFCTQLNRALTGIAVEQDKNTQEVFAQVKQIYKTPPIKDFGGFNFSQILPDPSKPSKRSFIEDLLFNKVTLADAGFIKQYGDCLGDIAARDLICAQKFNGLTVLPPLLTDEMIAQYTSALLAGTITSGWTFGAGAALQIPFAMQMAYRFNGIGVTQNVLYENQKLIANQFNSAIGKIQDSLSSTASALGKLQDVVNQNAQALNTLVKQLSSNFGAISSVLNDILSRLDKVEAEVQIDRLITGRLQSLQTYVTQQLIRAAEIRASANLAATKMSECVLGQSKRVDFCGKGYHLMSFPQSAPHGVVFLHVTYVPAQEKNFTCAPAICHDGKAHFPREGVFVSNGTHWFVTQRNFYEPQIITTDNTFVSGNCDVVIGIVNNTVYDPLQPELDSFKEELDKYFKNHTSPDVDLGDISGINASVVNIQKEIDRLNEVAKNLNESLIDLQELGKYEQYIKWPWYIWLGFIAGLIAIVMVTIMLCCMTSCCSCLKGCCSCGSCFKFDEDDSEPVLKGVKLHYT

SEQ ID NO: 630 - protein, 1273 aa, Artificial Sequence
  SARS-CoV-2/Switzerland/1000477797/2020__EPI_ISL_413023 spike protein (1-1273)(I712C_T1077C)
MFVFLVLLPLVSSQCVNLTTRTQLPPAYTNSFTRGVYYPDKVFRSSVLHSTQDLFLPFFSNVTWFHAIHVSGTNGTKRFDNPVLPFNDGVYFASTEKSNIIRGWIFGTTLDSKTQSLLIVNNATNVVIKVCEFQFCNDPFLGVYYHKNNKSWMESEFRVYSSANNCTFEYVSQPFLMDLEGKQGNFKNLREFVFKNIDGYFNIYSKHTPINLVRDLPQGFSALEPLVDLPIGINITRFQTLLALHRSYLTPGDSSSGWTAGAAAYYVGYLQPRTFLLKYNENGTITDAVDCALDPLSETKCTLKSFTVEKGIYQTSNFRVQPTESIVRFPNITNLCPFGEVFNATRFASVYAWNRKRISNCVADYSVLYNSASFSTFKCYGVSPTKLNDLCFTNVYADSFVIRGDEVRQIAPGQTGKIADYNYKLPDDFTGCVIAWNSNNLDSKVGGNYNYLYRLFRKSNLKPFERDISTEIYQAGSTPCNGVEGFNCYFPLQSYGFQPTNGVGYQPYRVVVLSFELLHAPATVCGPKKSTNLVKNKCVNFNFNGLTGTGVLTESNKKFLPFQQFGRDIADTTDAVRDPQTLEILDITPCSFGGVSVITPGTNTSNQVAVLYQGVNCTEVPVAIHADQLTPTWRVYSTGSNVFQTRAGCLIGAEHVNNSYECDIPIGAGICASYQTQTNSPRRARSVASQSIIAYTMSLGAENSVAYSNNSCAIPTNFTISVTTEILPVSMTKTSVDCTMYICGDSTECSNLLLQYGSFCTQLNRALTGIAVEQDKNTQEVFAQVKQIYKTPPIKDFGGFNFSQILPDPSKPSKRSFIEDLLFNKVTLADAGFIKQYGDCLGDIAARDLICAQKFNGLTVLPPLLTDEMIAQYTSALLAGTITSGWTFGAGAALQIPFAMQMAYRFNGIGVTQNVLYENQKLIANQFNSAIGKIQDSLSSTASALGKLQDVVNQNAQALNTLVKQLSSNFGAISSVLNDILSRLDKVEAEVQIDRLITGRLQSLQTYVTQQLIRAAEIRASANLAATKMSECVLGQSKRVDFCGKGYHLMSFPQSAPHGVVFLHVTYVPAQEKNFTCAPAICHDGKAHFPREGVFVSNGTHWFVTQRNFYEPQIITTDNTFVSGNCDVVIGIVNNTVYDPLQPELDSFKEELDKYFKNHTSPDVDLGDISGINASVVNIQKEIDRLNEVAKNLNESLIDLQELGKYEQYIKWPWYIWLGFIAGLIAIVMVTIMLCCMTSCCSCLKGCCSCGSCCKFDEDDSEPVLKGVKLHYT

SEQ ID NO: 631 - protein, 1273 aa, Artificial Sequence
  SARS-CoV-2/Belgium/BA-02291/2020__EPI_ISL_415159 spike protein (1-1273)(I712C_T1077C)
MFVFLVLLPLVSSQCVNLTTRTQLPPAYTNSFTRGVYYPDKVFRSSVLHSTQDLFLPFFSNVTWFHAIHVSGTNGTKRFDNPVLPFNDGVYFASTEKSNIIRGWIFGTTLDSKTQSLLIVNNATNVVIKVCEFQFCNDPFLGVYYHKNNKSWMESEFRVYSSANNCTFEYVSQPFLMDLEGKQGNFKNLREFVFKNIDGYFKIYSKHTPINLVRDLPQGFSALEPLVDLPIGINITRFQTLLALHRSYLTPGDSSSGWTAGAAAYYVGYLQPRTFLLKYNENGTITDAVDCALDPLSETKCTLKSFTVEKGIYQTSNFRVQPTESIVRFPNITNLCPFGEVFNATRFASVYAWNRKRISNCVADYSVLYNSASFSTFKCYGVSPTKLNDLCFTNVYADSFVIRGDEVRQIAPGQTGKIADYNYKLPDDFTGCVIAWNSNNLDSKVGGNYNYLYRLFRRSNLKPFERDISTEIYQAGSTPCNGVEGFNCYFPLQSYGFQPTNGVGYQPYRVVVLSFELLPAPATVCGPKKSTNLVKNKCVNFNFNGLTGTGVLTESNKKFLPFQQFGRDIADTTDAVRDPQTLEILDITPCSFGGVSVITPGTNTSNQVAVLYQGVNCTEVPVAIHADQLTPTWRVYSTGSNVFQTRAGCLIGAEHVNNSYECDIPIGAGICASYQTQTNSPRRARSVASQSIIAYTMSLGAENSVAYSNNSCAIPTNFTISVTTEILPVSMTKTSVDCTMYICGDSTECSNLLLQYGSFCTQLNRALTGIAVEQDKNTQEVFAQVKQIYKTPPIKDFGGFNFSQILPDPSKPSKRSFIEDLLFNKVTLADAGFIKQYGDCLGDIAARDLICAQKFNGLTVLPPLLTDEMIAQYTSALLAGTITSGWTFGAGAALQIPFAMQMAYRFNGIGVTQNVLYENQKLIANQFNSAIGKIQDSLSSAAPALGKLQDVVNQNAQALNTLVKQLSSNFGAISSVLNDILSRLDKVEAEVQIDRLITGRLQSLQTYVTQQLIRAAEIRASANLAATKMSECVLGQSKRVDFCGKGYHLMSFPQSAPHGVVFLHVTYVPAQEKNFTCAPAICHDGKAHFPREGVFVSNGTHWFVTQRNFYEPQIITTDNTFVSGNCDVVIGIVNNTVYDPLQPELDSFKEELDKYFKNHTSPDVDLGDISGINASVVNIQKEIDRLNEVAKNLNESLIDLQELGKYEQYIKWPWYIWLGFIAGLIAIVMVTIMLCCMTSCCSCLKGCCSCGSCCKFDEDDSEPVLKGVKLHYT

SEQ ID NO: 632 - protein, 1273 aa, Artificial Sequence
  SARS-CoV-2/USA/WA8-UW5/2020__EPI_ISL_413486 spike protein (1-1273)(I712C_T1077C)
MFVFLVLLPLVSSQCVNLTTRTQLPPAYTNSFTRGVYYPDKVFRSSVLHSTQDLFLPFFSNVTWFHAIHVSGTNGTKRFDNPVLPFNDGVYFASTEKSNIIRGWIFGTTLDSKTQSLLIVNNATNVVIKVCEFQFCNDPFLGVYYHKNNKSWMESEFRVYSSANNCTFEYVSQPFLMDLEGKQGNFKNLREFVFKNIDGYFKIYSKHTPINLVRDLPQGFSALEPLVDLPIGINITRFQTLLALHRSYLTPGDSSSGWTAGAAAYYVGYLQPRTFLLKYNENGTITDAVDCALDPLSETKCTLKSFTVEKGIYQTSNFRVQPTESIVRFPNITNLCPFGEVFNATRFASVYAWNRKRISNCVADYSVLYNSASFSTFKCYGVSPTKLNDLCFTNVYADSFVIRGDEVRQIAPGQTGKIADYNYKLPDDFTGCVIAWNSNNLDSKVGGNYNYLYRLFRKSNLKPFERDISTEIYQAGSTPCNGVEGFNCYFPLQSYGFQPTNGVGYQPYRVVVLSFELLHAPATVCGPKKSTNLVKNKCVNFNFNGLTGTGVLTESNKKFLPFQQFGRDIADTTDAVRDPQTLEILDITPCSFGGVSVITPGTNTSNQVAVLYQDVNCTEVPVAIHADQLTPTWRVYSTGSNVFQTRAGCLIGAEYVNNSYECDIPIGAGICASYQTQTNSPRRARSVASQSIIAYTMSLGAENSVAYSNNSCAIPTNFTISVTTEILPVSMTKTSVDCTMYICGDSTECSNLLLQYGSFCTQLNRALTGIAVEQDKNTQEVFAQVKQIYKTPPIKDFGGFNFSQILPDPSKPSKRSFIEDLLFNKVTLADAGFIKQYGDCLGDIAARDLICAQKFNGLTVLPPLLTDEMIAQYTSALLAGTITSGWTFGAGAALQIPFAMQMAYRFNGIGVTQNVLYENQKLIANQFNSAIGKIQDSLSSTASALGKLQDVVNQNAQALNTLVKQLSSNFGAISSVLNDILSRLDKVEAEVQIDRLITGRLQSLQTYVTQQLIRAAEIRASANLAATKMSECVLGQSKRVDFCGKGYHLMSFPQSAPHGVVFLHVTYVPAQEKNFTCAPAICHDGKAHFPREGVFVSNGTHWFVTQRNFYEPQIITTDNTFVSGNCDVVIGIVNNTVYDPLQPELDSFKEELDKYFKNHTSPDVDLGDISGINASVVNIQKEIDRLNEVAKNLNESLIDLQELGKYEQYIKWPWYIWLGFIAGLIAIVMVTIMLCCMTSCCSCLKGCCSCGSCCKFDEDDSEPVLKGVKLHYT

SEQ ID NO: 633 - protein, 1273 aa, Artificial Sequence
  SARS-CoV-2/England/20102000506/2020__EPI_ISL_415147 spike protein (1-1273)(I712C_T1077C)
MFVFLVLLPLVSSQCVNLTTRTQLPPAYTNSFTRGVYYPDKVFRSSVLHSTQDLFLPFFSNVTWFHAIHVSGTNGTKRFDNPVLPFNDGVYFASTEKSNIIRGWIFGTTLDSKTQSLLIVNNATNVVIKVCEFQFCNDPFLGVYYHKNNKSWMESEFRVYSSANNCTFEYVSQPFLMDLEGKQGNFKNLREFVFKNIDGYFKIYSKHTPINLVRDLPQGFSALEPLVDLPIGINITRFQTLLALHRSYLTPGDSSSGWTAGAAAYYVGYLQPRTFLLKYNENGTITDAVDCALDPLSETKCTLKSFTVEKGIYQTSNFRVQPTESIVRFPNITNLCPFGEVFNATRFASVYAWNRKRISNCVADYSVLYNSASFSTFKCYGVSPTKLNDLCFTNVYADSFVIRGDEVRQIAPGQTGKIADYNYKLPDDFTGCVIAWNSNNLDSKVGGNYNYLYRLFRKSNLKPFERDISTEIYQAGSTPCNGVEGFNCYFPLQSYGFQPTNGVGYQPYRVVVLSFELLHAPATVCGPKKSTNLVKNKCVNFNFNGLTGTGVLTESNKKFLPFQQFGRDIADTTDAVRDPQTLEILDITPCSFGGVSVITPGTNTSNQVAVLYQGVNCTEVPVAIHADQLTPTWRVYSTGSNVFQTRAGCLIGAEHVNNSYECDIPIGAGICASYQTQTNSPRRARSVASQSIIAYTMSLGAENSVAYSNNSCAIPTNFTISVTTEILPVSMTKTSVDCTMYICGDSTECSNLLLQYGSFCTQLNRALTGIAVEQDKNTQEVFAQVKQIYKTPPIKDFGGFNFSQILPDPSKPSKRSFIEDLLFNKVTLADAGFIKQYGYCLGDIAARDLICAQKFNGLTVLPPLLTDEMIAQYTSALLAGTITSGWTFGAGAALQIPFAMQMAYRFNGIGVTQNVLYENQKLIANQFNSAIGKIQDSLSSTASALGKLQDVVNQNAQALNTLVKQLSSNFGAISSVLNDILSRLDKVEAEVQIDRLITGRLQSLQTYVTQQLIRAAEIRASANLAATKMSECVLGQSKRVDFCGKGYHLMSFPQSAPHGVVFLHVTYVPAQEKNFTCAPAICHDGKAHFPREGVFVSNGTHWFVTQRNFYEPQIITTDNTFVSGNCDVVIGIVNNTVYDPLQPELDSFKEELDKYFKNHTSPDVDLGDISGINASVVNIQKEIDRLNEVAKNLNESLIDLQELGKYEQYIKWPWYIWLGFIAGLIAIVMVTIMLCCMTSCCSCLKGCCSCGSCCKFDEDDSEPVLKGVKLHYT

SEQ ID NO: 634 - protein, 1273 aa, Artificial Sequence
  SARS-CoV-2/Belgium/VAG-03013/2020__EPI_ISL_415155 spike protein (1-1273)(I712C_T1077C)
MFVFLVLLPLVSSQCVNLTTRTQLPPAYTNSFTRGVYYPDKVFRSSVLHSTQDLFLPFFSNVTWFHAIHVSGTNGTKRFDNPVLPFNDGVYFASTEKSNIIRGWIFGTTLDSKTQSLLIVNNATNVVIKVCEFQFCNDPFLGVYYHKNNKSWMESEFRVYSSANNCTFEYVSQPFLMDLEGKQGNFKNLREFVFKNIDGYFKIYSKHTPINLVRDLPQGFSALEPLVDLPIGINITRFQTLLALHRSYLTPGDSSSGWTAGAAAYYVGYLQPRTFLLKYNENGTITDAVDCALDPLSETKCTLKSFTVEKGIYQTSNFRVQPTESIVRFPNITNLCPFGEVFNATRFASVYAWNRKRISNCVADYSVLYNSASFSTFKCYGVSPTKLNDLCFTNVYADSFVIRGDEVRQIAPGQTGKIADYNYKLPDDFTGCVIAWNSNNLDSKVGGNYNYLYRLFRKSNLKPFERDISTEIYQAGSTPCNGVEGFNCYFPLQSYGFQPTNGVGYQPYRVVVLSFELLHAPATVCGPKKSTNLVKNKCVNFNFNGLTGTGVLTESNKKFLPFQQFGRDIADTTDAVRDPQTLEILDITPCSFGGVSVITPGTNTSNQVAVLYQGVNCTEVPVAIHADQLTPTWRVYSTGSNVFQTRAGCLIGAEHVNNSYECDIPIGAGICASYQTQTNSPRRARSVASQSIIAYTMSLGAENSVAYSNNSCAIPTNFTISVTTEILPVSMTKTSVDCTMYICGDSTECSNLLLQYGSFCTQLNRALTGIAVEQDKNTQEVFAQVKQIYKTPPIKDFGGFNFSQILPDPSKPSKRSFIEDLLFNKVTLADAGFIKQYGDCLGDIAARDLICAQKFNGLTVLPPLLTDEMIAQYTSALLAGTITSGWTFGAGAALQIPFAMQMAYRFNGIGVTQNVLYENQKLIANQFNSAIGKIQDSLSSTATALGKLQDVVNQNAQALNTLVKQLSSNFGAISSVLNDILSRLDKVEAEVQIDRLITGRLQSLQTYVTQQLIRAAEIRASANLAATKMSECVLGQSKRVDFCGKGYHLMSFPQSAPHGVVFLHVTYVPAQEKNFTCAPAICHDGKAHFPREGVFVSNGTHWFVTQRNFYEPQIITTDNTFVSGNCDVVIGIVNNTVYDPLQPELDSFKEELDKYFKNHTSPDVDLGDISGINASVVNIQKEIDRLNEVAKNLNESLIDLQELGKYEQYIKWPWYIWLGFIAGLIAIVMVTIMLCCMTSCCSCLKGCCSCGSCCKFDEDDSEPVLKGVKLHYT

SEQ ID NO: 635 - protein, 1273 aa, Artificial Sequence
  SARS-CoV-2/Belgium/BC-03016/2020__EPI_ISL_415157 spike protein (1-1273)(I712C_T1077C)
MFVFLVLLPLVSSQCVNLTTRTQLPPAYTNSFTRGVYYPDKVFRSSVLHSTQDLFLPFFSNVTWFHAIHVSGTNGTKRFDNPVLPFNDGVYFASTEKSNIIRGWIFGTTLDSKTQSLLIVNNATNVVIKVCEFQFCNDPFLGVYYHKNNKSWMESEFRVYSSANNCTFEYVSQPFLMDLEGKQGNFKNLREFVFKNIDGYFKIYSKHTPINLVRDLPQGFSALEPLVDLPIGINITRFQTLLALHRSYLTPGDSSSGWTAGAAAYYVGYLQPRTFLLKYNENGTITDAVDCALDPLSETKCTLKSFTVEKGIYQTSNFRVQPTESIVRFPNITNLCPFGEVFNATRFASVYAWNRKRISNCVADYSVLYNSASFSTFKCYGVSPTKLNDLCFTNVYADSFVIRGDEVRQIAPGQTGKIADYNYKLPDDFTGCVIAWNSNNLDSKVGGNYNYLYRLFRKSNLKPFERDISTEIYQAGSTPCNGVEGFNCYFPLQSYGFQPTNGVGYQPYRVVVLSFELLHAPATVCGPKKSTNLVKNKCVNFNFNGLTGTGVLTESNKKFLPFQQFGRDIADTTDAVRDPQTLEILDITPCSFGGVSVITPGTNTSNQVAVLYQGVNCTEVPVAIHADQLTPTWRVYSTGSNVFQTRAGCLIGAEHVNNSYECDIPIGAGICASYQTQTNSPRRARSVASQSIIAYTMSLGAENSVAYSNNSCAIPTNFTISVTTEILPVSMTKTSVDCTMYICGDSTECSNLLLQYGSFCTQLNRALTGIAVEQDKNTQEVFAQVKQIYKTPPIKDFGGFNFSQILPDPSKPSKRSFIEDLLFNKVTLADAGFIKQYGDCLGDIAARDLICAQKFNGLTVLPPLLTDEMIAQYTSALLAGTITSGWTFGAGAALQIPFAMQMAYRFNGIGVTQNVLYENQKLIANQFNSAIGKIQDSLSSTAPALGKLQDVVNQNAQALNTLVKQLSSNFGAISSVLNDILSRLDKVEAEVQIDRLITGRLQSLQTYVTQQLIRAAEIRASANLAATKMSECVLGQSKRVDFCGKGYHLMSFPQSAPHGVVFLHVTYVPAQEKNFTCAPAICHDGKAHFPREGVFVSNGTHWFVTQRNFYEPQIITTDNTFVSGNCDVVIGIVNNTVYDPLQPELDSFKEELDKYFKNHTSPDVDLGDISGINASVVNIQKEIDRLNEVAKNLNESLIDLQELGKYEQYIKWPWYIWLGFIAGLIAIVMVTIMLCCMTSCCSCLKGCCSCGSCCKFDEDDSEPVLKGVKLHYT

SEQ ID NO: 636 - protein, 1273 aa, Artificial Sequence
  SARS-CoV-2/Germany/BavPat3/2020__EPI_ISL_414521 spike protein (1-1273)(I712C_T1077C)
MFVFLVLLPLVSSQCVNLTTRTQLPPAYTNSFTRGVYYPDKVFRSSVLHSTQDLFLPFFSNVTWFHAIHVSGTNGTKRFDNPVLPFNDGVYFASTEKSNIIRGWIFGTTLDSKTQSLLIVNNATNVVIKVCEFQFCNDPFLGVYYHKNNKSWMESEFRVYSSANNCTFEYVSQPFLMDLEGKQGNFKNLREFVFKNIDGYFKIYSKHTPINLVRDLPQGFSALEPLVDLPIGINITRFQTLLALHRSYLTPGDSSSGWTAGAAAYYVGYLQPRTFLLKYNENGTITDAVDCALDPLSETKCTLKSFTVEKGIYQTSNFRVQPTESIVRFPNITNLCPFGEVFNATRFASVYAWNRKRISNCVADYSVLYNSASFSTFKCYGVSPTKLNDLCFTNVYADSFVIRGDEVRQIAPGQTGKIADYNYKLPDDFTGCVIAWNSNNLDSKVGGNYNYLYRLFRKSNLKPFERDISTEIYQAGSTPCNGVEGFNCYFPLQSYGFQPTNGVGYQPYRVVVLSFELLHAPATVCGPKKSTNLVKNKCVNFNFNGLTGTGVLTESNKKFLPFQQFGRDIADTTDAVRDPQTLEILDITPCSFGGVSVITPGTNTSNQVAVLYQDVNCTEVPVAIHADQLTPTWRVYSTGSNVFQTRAGCLIGAEHVNNSYECDIPIGAGICASYQTQTNSPRRARSVASQSIIAYTMSLGAENSVAYSNNSCAIPTNFTISVTTEILPVSMTKTSVDCTMYICGDSTECSNLLLQYGSFCTQLNRALTGIAVEQDKNTQQVFAQVKQIYKTPPIKDFGGFNFSQILPDPSKPSKRSFIEDLLFNKVTLADAGFIKQYGDCLGDIAARDLICAQKFNGLTVLPPLLTDEMIAQYTSALLAGTITSGWTFGAGAALQIPFAMQMAYRFNGIGVTQNVLYENQKLIANQFNSAIGKIQDSLSSTASALGKLQDVVNQNAQALNTLVKQLSSNFGAISSVLNDILSRLDKVEAEVQIDRLITGRLQSLQTYVTQQLIRAAEIRASANLAATKMSECVLGQSKRVDFCGKGYHLMSFPQSAPHGVVFLHVTYVPAQEKNFTCAPAICHDGKAHFPREGVFVSNGTHWFVTQRNFYEPQIITTDNTFVSGNCDVVIGIVNNTVYDPLQPELDSFKEELDKYFKNHTSPDVDLGDISGINASVVNIQKEIDRLNEVAKNLNESLIDLQELGKYEQYIKWPWYIWLGFIAGLIAIVMVTIMLCCMTSCCSCLKGCCSCGSCCKFDEDDSEPVLKGVKLHYT

SEQ ID NO: 637 - protein, 1273 aa, Artificial Sequence
  SARS-CoV-2/France/HF1805/2020__EPI_ISL_414628 spike protein (1-1273)(I712C_T1077C)
MFVFLVLLPLVSSQCVNLTTRTQLPPAYTNSFTRGVYYPDKVFRSSVLHSTQDLFLPFFSNVTWFHAIHVSGTNGTKRFDNPVLPFNDGVYFASTEKSNIIRGWIFGTTLDSKTQSLLIVNNATNVVIKVCEFQFCNDPFLGVYYHKNNKSWMESEFRVYSSANNCTFEYVSQPFLMDLEGKQGNFKNLREFVFKNIDGYFKIYSKHTPINLVRDLPQGFSALEPLVDLPIGINITRFQTLLALHRSYLTPGDSSSGWTAGAAAYYVGYLQPRTFLLKYNENGTITDAVDCALDPLSETKCTLKSFTVEKGIYQTSNFRVQPTESIVRFPNITNLCPFGEVFNATRFASVYAWNRKRISNCVADYSVLYNSASFSTFKCYGVSPTKLNDLCFTNVYADSFVIRGDEVRQIAPGQTGKIADYNYKLPDDFTGCVIAWNSNNLDSKVGGNYNYLYRLFRKSNLKPFERDISTEIYQAGSTPCNGVEGFNCYFPLQSYGFQPTNGVGYQPYRVVVLSFELLHAPATVCGPKKSTNLVKNKCVNFNFNGLTGTGVLTESNKKFLPFQQFGRDIADTTDAVRDPQTLEILDITPCSFGGVSVITPGTNTSNQVAVLYQGVNCTEVPVAIHADQLTPTWRVYSTGSNVFQTRAGCLIGAEHVNNSYECDIPIGAGICASYQTQTNSPRRARSVASQSIIAYTMSLGAENSVAYSNNSCAIPTNFTISVTTEILPVSMTKTSVDCTMYICGDSTECSNLLLQYGSFCTQLNRALTGIAVEQDKNTQEVFAQVKQIYKTPPIKDFGGFNFSQILPDPSKPSKRSFIEDLLFNKVTLADAGFIKQYGDCLGDIAARDLICAQKFNGLTVLPPLLTDEMIAQYTSALLAGTITSGWTFGAGAALQIPFAMQMAYRFNGIGVTQNVLYENQKLIANQFNSAIGKIQDSLSSTASALGKLQDVVNQNAQALNTLVKQLSSNFGAISSVLNDILSRLDKVEAEVQIDRLITGRLQSLQTYVTQQLIRAAEIRASANLAATKMSECVLGQSKRVDFCGKGYHLMSFPQSAPHGVVFLHVTYVPAQEKNFTCAPAICHDGKAHFPREGVFVSNGTHWFVTQRNFYEPQIITTDNTFVSGNCDVVIGVVNNTVYDPLQPELDSFKEELDKYFKNHTSPDVDLGDISGINASVVNIQKEIDRLNEVAKNLNESLIDLQELGKYEQYIKWPWYIWLGFIAGLIAIVMVTIMLCCMTSCCSCLKGCCSCGSCCKFDEDDSEPVLKGVKLHYT

SEQ ID NO: 638 - protein, 1273 aa, Artificial Sequence
  SARS-CoV-2/Netherlands/ZuidHolland_9/2020__EPI_ISL_414445 spike protein (1-1273)(I712C_T1077C)
MFVFLVLLPLVSSQCVNLTTRTQLPPAYTNSFTRGVYYPDKVFRSSVLHSTQDLFLPFFSNVTWFHAIHVSGTNGTKRFDNPVLPFNDGVYFASTEKSNIIRGWIFGTTLDSKTQSLLIVNNATNVVIKVCEFQFCNDPFLGVYYHKNNKSWMESEFRVYSSANNCTFEYVSQPFLMDLEGKQGNFKNLREFVFKNIDGYFKIYSKHTPINLVRDLPQGFSALEPLVDLPIGINITRFQTLLALHRSYLTPGDSSSGWTAGAAAYYVGYLQPRTFLLKYNENGTITDAVDCALDPLSETKCTLKSFTVEKGIYQTSNFRVQPTESIVRFPNITNLCPFGEVFNATRFASVYAWNRKRISNCVADYSVLYNSASFSTFKCYGVSPTKLNDLCFTNVYADSFVIRGDEVRQIAPGQTGKIADYNYKLPDDFTGCVIAWNSNNLDSKVGGNYNYLYRLFRKSNLKPFERDISTEIYQAGSTPCNGVEGFNCYFPLQSYGFQPTNGVGYQPYRVVVLSFELLHAPATVCGPKKSTNLVKNKCVNFNFNGLTGTGVLTESNKKFLPFQQFGRDIADTTDAVRDPQTLEILDITPCSFGGVSVITPGTNTSNQVAVLYQGVNCTEVPVAIHADQLTPTWRVYSTGSNVFQTRAGCLIGAEHVNNSYECDIPIGAGICASYQTQTNSPRRARSVASQSIIAYTMSLGAENSVAYSNNSCAIPTNFTISVTTEILPVSMTKTSVDCTMYICGDSTECSNLLLQYGSFCTQLNRALTGIAVEQDKNTQEVFAQVKQIYKTPPIKDFGGFNFSQILPDPSKPSKRSFIEDLLFNKVTLADAGFIKQYGDCLGDIAARDLICVQKFNGLTVLPPLLTDEMIAQYTSALLAGTITSGWTFGAGAALQIPFAMQMAYRFNGIGVTQNVLYENQKLIANQFNSAIGKIQDSLSSTASALGKLQDVVNQNAQALNTLVKQLSSNFGAISSVLNDILSRLDKVEAEVQIDRLITGRLQSLQTYVTQQLIRAAEIRASANLAATKMSECVLGQSKRVDFCGKGYHLMSFPQSAPHGVVFLHVTYVPAQEKNFTCAPAICHDGKAHFPREGVFVSNGTHWFVTQRNFYEPQIITTDNTFVSGNCDVVIGIVNNTVYDPLQPELDSFKEELDKYFKNHTSPDVDLGDISGINASVVNIQKEIDRLNEVAKNLNESLIDLQELGKYEQYIKWPWYIWLGFIAGLIAIVMVTIMLCCMTSCCSCLKGCCSCGSCCKFDEDDSEPVLKGVKLHYT

SEQ ID NO: 639 - protein, 1273 aa, Artificial Sequence
  SARS-CoV-2/Finland/FIN03032020A/2020__EPI_ISL_413602 spike protein (1-1273)(I712C_T1077C)
MFVFLVLLPLVSSQCVNLTTRTQLPPAYTNSFTRGVYYPDKVFRSSVLHSTQDLFLPFFSNVTWFHAIHVSGTNGTKRFDNPVLPFNDGVYFASTEKSNIIRGWIFGTTLDSKTQSLLIVNNATNVVIKVCEFQFCNDPFLGVYYHKNNKSWMESEFRVYSSANNCTFEYVSQPFLMDLEGKQGNFKNLREFVFKNIDGYFKIYSKHTPINLVRDLPQGFSALEPLVDLPIGINITRFQTLLALHRSYLTPGDSSSGWTAGAAAYYVGYLQPRTFLLKYNENGTITDAVDCALDPLSETKCTLKSFTVEKGIYQTSNFRVQPTESIVRFPNITNLCPFGEVFNATRFASVYAWNRKRISNCVADYSVLYNSASFSTFKCYGVSPTKLNDLCFTNVYADSFVIRGDEVRQIAPGQTGKIADYNYKLPDDFTGCVISWNSNNLDSKVGGNYNYLYRLFRKSNLKPFERDISTEIYQAGSTPCNGVEGFNCYFPLQSYGFQPTNGVGYQPYRVVVLSFELLHAPATVCGPKKSTNLVKNKCVNFNFNGLTGTGVLTESNKKFLPFQQFGRDIADTTDAVRDPQTLEILDITPCSFGGVSVITPGTNTSNQVAVLYQGVNCTEVPVAIHADQLTPTWRVYSTGSNVFQTRAGCLIGAEHVNNSYECDIPIGAGICASYQTQTNSPRRARSVASQSIIAYTMSLGAENSVAYSNNSCAIPTNFTISVTTEILPVSMTKTSVDCTMYICGDSTECSNLLLQYGSFCTQLNRALTGIAVEQDKNTQEVFAQVKQIYKTPPIKDFGGFNFSQILPDPSKPSKRSFIEDLLFNKVTLADAGFIKQYGDCLGDIAARDLICAQKFNGLTVLPPLLTDEMIAQYTSALLAGTITSGWTFGAGAALQIPFAMQMAYRFNGIGVTQNVLYENQKLIANQFNSAIGKIQDSLSSTASALGKLQDVVNQNAQALNTLVKQLSSNFGAISSVLNDILSRLDKVEAEVQIDRLITGRLQSLQTYVTQQLIRAAEIRASANLAATKMSECVLGQSKRVDFCGKGYHLMSFPQSAPHGVVFLHVTYVPAQEKNFTCAPAICHDGKAHFPREGVFVSNGTHWFVTQRNFYEPQIITTDNTFVSGNCDVVIGIVNNTVYDPLQPELDSFKEELDKYFKNHTSPDVDLGDISGINASVVNIQKEIDRLNEVAKNLNESLIDLQELGKYEQYIKWPWYIWLGFIAGLIAIVMVTIMLCCMTSCCSCLKGCCSCGSCCKFDEDDSEPVLKGVKLHYT

SEQ ID NO: 640 - protein, 1273 aa, Artificial Sequence
  SARS-CoV-2/France/GE1977/2020__EPI_ISL_414632 spike protein (1-1273)(I712C_T1077C)
MFVFLVLLPLVSSQCVNLTTRTQLPPAYTNSFTRGVYYPDKVFRSSVLHSTQDLFLPFFSNVTWFHAIHVSGTNGTKRFDNPVLPFNDGVYFASTEKSNIIRGWIFGTTLDSKTQSLLIVNNATNVVIKVCEFQFCNDPFLGVYYHKNNKSWMESEFRVYSSANNCTFEYVSQPFLMDLEGKQGNFKNLREFVFKNIDGYFKIYSKHTPINLVRDLPQGFSALEPLVDLPIGINITRFQTLLALHRSYLTPGDSSSGWTAGAAAYYVGYLQPRTFLLKYNENGTITDAVDCALDPLSETKCTLKSFTVEKGIYQTSNFRVQPTESIVRFPNITNLCPFGEVFNATRFASVYAWNRKRISNCVADYSVLYNSASFSTFKCYGVSPTKLNDLCFTNVYADSFVIRGDEVRQIAPGQTGKIADYNYKLPDDFTGCVIAWNSNNLDSKVGGNYNYLYRLFRKSNLKPFERDISTEIYQAGSTPCNGVEGFNCYFPLQSYGFQPTNGVGYQPYRVVVLSFELLHAPATVCGPKKSTNLVKNKCVNFNFNGLTGTGVLTESNKKFLPFQQFGRDIADTTDAVRDPQTLEILDITPCSFGGVSVITPGTNTSNQVAVLYQGVNCTEVPVAIHADQLTPTWRVYSTGSNVFQTRAGCLIGAEHVNNSYECDIPIGAGICASYQTQTNSPRRARSVASQSIIAYTMSLGAENSVAYSNNSCAIPTNFTISVTTEILPVSMTKTSVDCTMYICGDSTECSNLLLQYGSFCTQLNRALTGIAVEQDKNTQEVFAQVKQIYKTPPIKDFGGFNFSQILPDPSKPSKRSFIEDLLFNKVTLADAGFIKQYGDCLGDIAARDLICAQKFNGLTVLPPLLTDEMIAQYTSALLAGTITSGWTFGAGAALQIPFAMQMAYRFNGIGVTQNVLYENQKLIANQFNSAIGKIQDSLFSTASALGKLQDVVNQNAQALNTLVKQLSSNFGAISSVLNDILSRLDKVEAEVQIDRLITGRLQSLQTYVTQQLIRAAEIRASANLAATKMSECVLGQSKRVDFCGKGYHLMSFPQSAPHGVVFLHVTYVPAQEKNFTCAPAICHDGKAHFPREGVFVSNGTHWFVTQRNFYEPQIITTDNTFVSGNCDVVIGIVNNTVYDPLQPELDSFKEELDKYFKNHTSPDVDLGDISGINASVVNIQKEIDRLNEVAKNLNESLIDLQELGKYEQYIKWPWYIWLGFIAGLIAIVMVTIMLCCMTSCCSCLKGCCSCGSCCKFDEDDSEPVLKGVKLHYT

SEQ ID NO: 641 - protein, 1273 aa, Artificial Sequence
  SARS-CoV-2/Finland/FIN-313/2020__EPI_ISL_414641 spike protein (1-1273)(I712C_T1077C)
MFVFLVLLPLVSSQCVNLTTRTQLPPAYTNSFTRGVYYPDKVFRSSVLHSTQDLFLPFFSNVTWFHAIHVSGTNGTKRFDNPVLPFNDGVYFASTEKSNIIRGWIFGTTLDSKTQSLLIVNNATNVVIKVCEFQFCNDPFLGVYYHKNNKSWMESEFRVYSSANNCTFEYVSQPFLMDLEGKQGNFKNLREFVFKNIDGYFKIYSKHTPINLVRDLPQGFSALEPLVDLPIGINITRFKTLLALHRSYLTPGDSSSGWTAGAAAYYVGYLQPRTFLLKYNENGTITDAVDCALDPLSETKCTLKSFTVEKGIYQTSNFRVQPTESIVRFPNITNLCPFGEVFNATRFASVYAWNRKRISNCVADYSVLYNSASFSTFKCYGVSPTKLNDLCFTNVYADSFVIRGDEVRQIAPGQTGKIADYNYKLPDDFTGCVIAWNSNNLDSKVGGNYNYLYRLFRKSNLKPFERDISTEIYQAGSTPCNGVEGFNCYFPLQSYGFQPTNGVGYQPYRVVVLSFELLHAPATVCGPKKSTNLVKNKCVNFNFNGLTGTGVLTESNKKFLPFQQFGRDIADTTDAVRDPQTLEILDITPCSFGGVSVITPGTNTSNQVAVLYQGVNCTEVPVAIHADQLTPTWRVYSTGSNVFQTRAGCLIGAEHVNNSYECDIPIGAGICASYQTQTNSPRRARSVASQSIIAYTMSLGAENSVAYSNNSCAIPTNFTISVTTEILPVSMTKTSVDCTMYICGDSTECSNLLLQYGSFCTQLNRALTGIAVEQDKNTQEVFAQVKQIYKTPPIKDFGGFNFSQILPDPSKPSKRSFIEDLLFNKVTLADAGFIKQYGDCLGDIAARDLICAQKFNGLTVLPPLLTDEMIAQYTSALLAGTITSGWTFGAGAALQIPFAMQMAYRFNGIGVTQNVLYENQKLIANQFNSAIGKIQDSLSSTASALGKLQDVVNQNAQALNTLVKQLSSNFGAISSVLNDILSRLDKVEAEVQIDRLITGRLQSLQTYVTQQLIRAAEIRASANLAATKMSECVLGQSKRVDFCGKGYHLMSFPQSAPHGVVFLHVTYVPAQEKNFTCAPAICHDGKAHFPREGVFVSNGTHWFVTQRNFYEPQIITTDNTFVSGNCDVVIGIVNNTVYDPLQPELDSFKEELDKYFKNHTSPDVDLGDISGINASVVNIQKEIDRLNEVAKNLNESLIDLQELGKYEQYIKWPWYIWLGFIAGLIAIVMVTIMLCCMTSCCSCLKGCCSCGSCCKFDEDDSEPVLKGVKLHYT

SEQ ID NO: 642 - protein, 1273 aa, Artificial Sequence
  SARS-CoV-2/Netherlands/ZuidHolland_2/2020__EPI_ISL_414556 spike protein (1-1273)(I712C_T1077C)
MFVFLVLLPLVSSQCVNLTTRTQLPPAYTNSFTRGVYYPDKVFRSSVLHSTQDLFLPFFSNVTWFHAIHVSGTNGTKRFDNPVLPFNDGVYFASTEKSNIIRGWIFGTTLDSKTQSLLIVNNATNVVIKVCEFQFCNDPFLGVYYHKNNKSWMESEFRVYSSANNCTFEYVSQPFLMDLEGKQGNFKNLREFVFKNIDGYFKIYSKHTPINLVRDLPQGFSALEPLVDLPIGINITRFQTLLALHRSYLTPGDSSSGWTAGAAAYYVGYLQPRTFLLKYNENGTITDAVDCALDPLSETKCTLKSFTVEKGIYQTSNFRVQPTESIVRFPNITNLCPFGEVFNATRFASVYAWNRKRISNCVADYSVLYNSASFSTFKCYGVSPTKLNDLCFTNVYADSFVIRGDEVRQIAPGQTGKIADYNYKLPDDFTGCVIAWNSNNLDSKVGGNYNYLYRLFRKSNLKPFERDISTEIYQAGSTPCNGVEGFNCYFPLQSYGFQPTNGVGYQPYRVVVLSFELLHAPATVCGPKKSTNLVKNKCVNFNFNGLTGTGVLTESNKKFLPFQQFGRDIADTTDAVRDPQTLEILDITPCSFGGVSVITPGTNTSNQVAVLYQGVNCTEVPVAIHADQLTPTWRVYSTGSNVFQTRAGCLIGAEHVNNSYECDIPIGAGICASYQTQTNSPRRARSVASQSIIAYTMSLGAENSVAYSNNSCAIPTNFTISVTTEILPVSMTKTSVDCTMYICGDSTECSNLLLQYGSFCTQLNRALTGIALEQDKNTQEVFAQVKQIYKTPPIKDFGGFNFSQILPDPSKPSKRSFIEDLLFNKVTLADAGFIKQYGDCLGDIAARDLICAQKFNGLTVLPPLLTDEMIAQYTSALLAGTITSGWTFGAGAALQIPFAMQMAYRFNGIGVTQNVLYENQKLIANQFNSAIGKIQDSLSSTASALGKLQDVVNQNAQALNTLVKQLSSNFGAISSVLNDILSRLDKVEAEVQIDRLITGRLQSLQTYVTQQLIRAAEIRASANLAATKMSECVLGQSKRVDFCGKGYHLMSFPQSAPHGVVFLHVTYVPAQEKNFTCAPAICHDGKAHFPREGVFVSNGTHWFVTQRNFYEPQIITTDNTFVSGNCDVVIGIVNNTVYDPLQPELDSFKEELDKYFKNHTSPDVDLGDISGINASVVNIQKEIDRLNEVAKNLNESLIDLQELGKYEQYIKWPWYIWLGFIAGLIAIVMVTIMLCCMTSCCSCLKGCCSCGSCCKFDEDDSEPVLKGVKLHYT

SEQ ID NO: 643 - protein, 1273 aa, Artificial Sequence
  SARS-CoV-2/USA/WA-UW31/2020__EPI_ISL_414618 spike protein (1-1273)(I712C_T1077C)
MFVFLVLLPLVSSQCVNLTTRTQLPPAYTNSFTRGVYYPDKVFRSSVLHSTQDLFLPFFSNVTWFHAIHVSGTNGTKRFDNPVLPFNDGVYFASTEKSNIIRGWIFGTTLDSKTQSLLIVNNATNVVIKVCEFQFCNDPFLGVYYHKNNKSWMESEFRVYSSANNCTFEYVSQPFLMDLEGKQGNFKNLREFVFKNIDGYFKIYSKHTPINLVRDLPQGFSALEPLVDLPIGINITRFQTLLALHRSYLTPGDSSSGWTAGAAAYYVGYLQPRTFLLKYNENGTITDAVDCALDPLSETKCTLKSFTVEKGIYQTSNFRVQPTESIVRFPNITNLCPFGEVFNATRFASVYAWNRKRISNCVADYSVLYNSASFSTFKCYGVSPTKLNDLCFTNVYADSFVIRGDEVRQIAPGQTGKIADYNYKLPDDFTGCVIAWNSNNLDSKVGGNYNYLYRLFRKSNLKPFERDISTEIYQAGSTPCNGAEGFNCYFPLQSYGFQPTNGVGYQPYRVVVLSFELLHAPATVCGPKKSTNLVKNKCVNFNFNGLTGTGVLTESNKKFLPFQQFGRDIADTTDAVRDPQTLEILDITPCSFGGVSVITPGTNTSNQVAVLYQDVNCTEVPVAIHADQLTPTWRVYSTGSNVFQTRAGCLIGAEHVNNSYECDIPIGAGICASYQTQTNSPRRARSVASQSIIAYTMSLGAENSVAYSNNSCAIPTNFTISVTTEILPVSMTKTSVDCTMYICGDSTECSNLLLQYGSFCTQLNRALTGIAVEQDKNTQEVFAQVKQIYKTPPIKDFGGFNFSQILPDPSKPSKRSFIEDLLFNKVTLADAGFIKQYGDCLGDIAARDLICAQKFNGLTVLPPLLTDEMIAQYTSALLAGTITSGWTFGAGAALQIPFAMQMAYRFNGIGVTQNVLYENQKLIANQFNSAIGKIQDSLSSTASALGKLQDVVNQNAQALNTLVKQLSSNFGAISSVLNDILSRLDKVEAEVQIDRLITGRLQSLQTYVTQQLIRAAEIRASANLAATKMSECVLGQSKRVDFCGKGYHLMSFPQSAPHGVVFLHVTYVPAQEKNFTCAPAICHDGKAHFPREGVFVSNGTHWFVTQRNFYEPQIITTDNTFVSGNCDVVIGIVNNTVYDPLQPELDSFKEELDKYFKNHTSPDVDLGDISGINASVVNIQKEIDRLNEVAKNLNESLIDLQELGKYEQYIKWPWYIWLGFIAGLIAIVMVTIMLCCMTSCCSCLKGCCSCGSCCKFDEDDSEPVLKGVKLHYT

SEQ ID NO: 644 - protein, 1273 aa, Artificial Sequence
  SARS-CoV-2/South Korea/SNU01/2020__EPI_ISL_411929 spike protein (1-1273)(I712C_T1077C)
MFVFLVLLPLVSSQCVNLTTRTQLPPAYTNSFTRGVYYPDKVFRSSVLHSTQDLFLPFFSNVTWFHAIHVSGTNGTKRFDNPVLPFNDGVYFASTEKSNIIRGWIFGTTLDSKTQSLLIVNNATNVVIKVCEFQFCNDPFLGVYYHKNNKSWMESEFRVYSSANNCTFEYVSQPFLMDLEGKQGNFKNLREFVFKNIDGYFKIYSKHTPINLVRDLPQGFWALEPLVDLPIGINITRFQTLLALHRSYLTPGDSSSGWTAGAAAYYVGYLQPRTFLLKYNENGTITDAVDCALDPLSETKCTLKSFTVEKGIYQTSNFRVQPTESIVRFPNITNLCPFGEVFNATRFASVYAWNRKRISNCVADYSVLYNSASFSTFKCYGVSPTKLNDLCFTNVYADSFVIRGDEVRQIAPGQTGKIADYNYKLPDDFTGCVIAWNSNNLDSKVGGNYNYLYRLFRKSNLKPFERDISTEIYQAGSTPCNGVEGFNCYFPLQSYGFQPTNGVGYQPYRVVVLSFELLHAPATVCGPKKSTNLVKNKCVNFNFNGLTGTGVLTESNKKFLPFQQFGRDIADTTDAVRDPQTLEILDITPCSFGGVSVITPGTNTSNQVAVLYQDVNCTEVPVAIHADQLTPTWRVYSTGSNVFQTRAGCLIGAEHVNNSYECDIPIGAGICASYQTQTNSPRRARSVASQSIIAYTMSLGAENSVAYSNNSCAIPTNFTISVTTEILPVSMTKTSVDCTMYICGDSTECSNLLLQYGSFCTQLNRALTGIAVEQDKNTQEVFAQVKQIYKTPPIKDFGGFNFSQILPDPSKPSKRSFIEDLLFNKVTLADAGFIKQYGDCLGDIAARDLICAQKFNGLTVLPPLLTDEMIAQYTSALLAGTITSGWTFGAGAALQIPFAMQMAYRFNGIGVTQNVLYENQKLIANQFNSAIGKIQDSLSSTASALGKLQDVVNQNAQALNTLVKQLSSNFGAISSVLNDILSRLDKVEAEVQIDRLITGRLQSLQTYVTQQLIRAAEIRASANLAATKMSECVLGQSKRVDFCGKGYHLMSFPQSAPHGVVFLHVTYVPAQEKNFTCAPAICHDGKAHFPREGVFVSNGTHWFVTQRNFYEPQIITTDNTFVSGNCDVVIGIVNNTVYDPLQPELDSFKEELDKYFKNHTSPDVDLGDISGINASVVNIQKEIDRLNEVAKNLNESLIDLQELGKYEQYIKWPWYIWLGFIAGLIAIVMVTIMLCCMTSCCSCLKGCCSCGSCCKFDEDDSEPVLKGVKLHYT

SEQ ID NO: 645 - protein, 1273 aa, Artificial Sequence
  SARS-CoV-2/China/WF0004/2020__EPI_ISL_413694 spike protein (1-1273)(I712C_T1077C)
MFVFLVLLPLVSSQCVNLTTRTQLPPAYTNSFTRGVYYPDKVFRSSVLHSTQDLFLPFFSNVTWFHAIHVSGTNGTKRFDNPVLPFNDGVYFASTEKSNIIRGWIFGTTLDSKTQSLLIVNNATNVVIKVCEFQFCNDPFLGVYYHKNNKSWTESEFRVYSSANNCTFEYVSQPFLMDLEGKQGNFKNLREFVFKNIDGYFKIYSKHTPINLVRDLPQGFSALEPLVDLPIGINITRFQTLLALHRSYLTPGDSSSGWTAGAAAYYVGYLQPRTFLLKYNENGTITDAVDCALDPLSETKCTLKSFTVEKGIYQTSNFRVQPTESIVRFPNITNLCPFGEVFNATRFASVYAWNRKRISNCVADYSVLYNSASFSTFKCYGVSPTKLNDLCFTNVYADSFVIRGDEVRQIAPGQTGKIADYNYKLPDDFTGCVIAWNSNNLDSKVGGNYNYLYRLFRKSNLKPFERDISTEIYQAGSTPCNGVEGFNCYFPLQSYGFQPTNGVGYQPYRVVVLSFELLHAPATVCGPKKSTNLVKNKCVNFNFNGLTGTGVLTESNKKFLPFQQFGRDIADTTDAVRDPQTLEILDITPCSFGGVSVITPGTNTSNQVAVLYQDVNCTEVPVAIHADQLTPTWRVYSTGSNVFQTRAGCLIGAEHVNNSYECDIPIGAGICASYQTQTNSPRRARSVASQSIIAYTMSLGAENSVAYSNNSCAIPTNFTISVTTEILPVSMTKTSVDCTMYICGDSTECSNLLLQYGSFCTQLNRALTGIAVEQDKNTQEVFAQVKQIYKTPPIKDFGGFNFSQILPDPSKPSKRSFIEDLLFNKVTLADAGFIKQYGDCLGDIAARDLICAQKFNGLTVLPPLLTDEMIAQYTSALLAGTITSGWTFGAGAALQIPFAMQMAYRFNGIGVTQNVLYENQKLIANQFNSAIGKIQDSLSSTASALGKLQDVVNQNAQALNTLVKQLSSNFGAISSVLNDILSRLDKVEAEVQIDRLITGRLQSLQTYVTQQLIRAAEIRASANLAATKMSECVLGQSKRFDFCGKGYHLMSFPQSAPHGVVFLHVTYVPAQEKNFTCAPAICHDGKAHFPREGVFVSNGTHWFVTQRNFYEPQIITTDNTFVSGNCDVVIGIVNNTVYDPLQPELDSFKEELDKYFKNHTSPDVDLGDISGINASVVNIQKEIDRLNEVAKNLNESLIDLQELGKYEQYIKWPWYIWLGFIAGLIAIVMVTIMLCCMTSCCSCLKGCCSCGSCCKFDEDDSEPVLKGVKLHYT

SEQ ID NO: 646 - protein, 1273 aa, Artificial Sequence
  SARS-CoV-2/China/WF0028/2020__EPI_ISL_413791 spike protein (1-1273)(I712C_T1077C)
MFVFLVLLPLVSSQCVNLTTRTQLPPAYTNSFTRGVYYPDKVFRSSVLHSTQDLFLPFFSNVTWFHAIHVSGTNGTKRFDNPVLPFNDGVYFASTEKSNIIRGWIFGTTLDSKTQSLLIVNNATNVVIKVCEFQFCNDPFLGVYYHKNNKSWMESEFRVYSSANNCTFEYVSQPFLMDLEGKQGNFKNLREFVFKNIDGYFKIYSKHTPINLVRDLPQGFSALEPLVDLPIGINITRFQTLLALHRSYLTPGDSSSGWTAGAAAYYVGYLQPRTFLLKYNENGTITDAVDCALDPLSETKCTLKSFTVEKGIYQTSNFRVQPTESIVRFPNITNLCPFGEVFNATRFASVYAWNRKRISNCVADYSVLYNSASFSTFKCYGVSPTKLNDLCFTNVYADSFVIRGDEVRQIAPGQTGKIADYNYKLPDDFTGCVIAWNSNNLDSKVGGNYNYLYRLFRKSNLKPFERDISTEIYQAGSTPCNGVEGFNCYFPLQSYGFQPTNGVGYQPYRVVVLSFELLHAPATVCGPKKSTNLVKNKCVNFNFNGLTGTGVLTESNKKFLPFQQFGRDIADTTDAVRDPQTLEILDITPCSFGGVSVITPGTNTSNQVAVLYQDVNCTEVPVAIHADQLTPTWRVYSTGSNVFQTRAGCLIGAEHVNNSYECDIPIGAGICASYQTQTNSPRRARSVASQSIIAYTMSLGAENSVAYSNNSCAIPTNFTISVTTEILPVSMTKTSVDCTMYICGDSTECSNLLLQYGSFCTQLNRALTGIAVEQDKNTQEVFAQVKQIYKTPPIKDFGGFNFSQILPDPSKPSKRSFIEDLLFNKVTLADAGFIKQYGDCLGDIAARDLICAQKFNGLTVLPPLLTDEMIAQYTSALLAGTITSGWTFGAGAALQIPFAMQMAYRFNGIGVTQNVLYENQKLIANQFNSAIGKIQDSLSSTASALGKLQDVVNQNAQALNTLVKQLSSNFGAISSVLNDILSRLDKVEAEVQIDRLITGRLQSLQTYVTQQLIRAAEIRASANLAATKMSECVLGQSKRVDFCGKGYHLMSFPQSAPHGVVFLHVTYVPAQEKNFTCAPAICHDGKAHFPREGVFVSNGTHWFVTQRNFYEPQIITTDNTFVSGNCDVVIGIVNNTVYDPLQPELESFKEELDKYFKNHTSPDVDLGDISGINASVVNIQKEIDRLNEVAKNLNESLIDLQELGKYEQYIKWPWYIWLGFIAGLIAIVMVTIMLCCMTSCCSCLKGCCSCGSCCKFDEDDSEPVLKGVKLHYT

SEQ ID NO: 647 - protein, 1273 aa, Artificial Sequence
  SARS-CoV-2/2019-nCoV/USA-CruiseA-18/2020__MT159716.1 spike protein (1-1273)(I712C_T1077C)
MFVFLVLLPLVSSQCVNLTTRTQLPPAYTNSFTRGVYYPDKVFRSSVLHSTQDLFLPFFSNVTWFHAIHVSGTNGTKRFDNPVLPFNDGVYFASTEKSNIIRGWIFGTTLDSKTQSLLIVNNATNVVIKVCEFQFCNDPFLGVYYHKNNKSWMESELRVYSSANNCTFEYVSQPFLMDLEGKQGNFKNLREFVFKNIDGYFKIYSKHTPINLVRDLPQGFSALEPLVDLPIGINITRFQTLLALHRSYLTPGDSSSGWTAGAAAYYVGYLQPRTFLLKYNENGTITDAVDCALDPLSETKCTLKSFTVEKGIYQTSNFRVQPTESIVRFPNITNLCPFGEVFNATRFASVYAWNRKRISNCVADYSVLYNSASFSTFKCYGVSPTKLNDLCFTNVYADSFVIRGDEVRQIAPGQTGKIADYNYKLPDDFTGCVIAWNSNNLDSKVGGNYNYLYRLFRKSNLKPFERDISTEIYQAGSTPCNGVEGFNCYFPLQSYGFQPTNGVGYQPYRVVVLSFELLHAPATVCGPKKSTNLVKNKCVNFNFNGLTGTGVLTESNKKFLPFQQFGRDIADTTDAVRDPQTLEILDITPCSFGGVSVITPGTNTSNQVAVLYQDVNCTEVPVAIHADQLTPTWRVYSTGSNVFQTRAGCLIGAEHVNNSYECDIPIGAGICASYQTQTNSPRRARSVASQSIIAYTMSLGAENSVAYSNNSCAIPTNFTISVTTEILPVSMTKTSVDCTMYICGDSTECSNLLLQYGSFCTQLNRALTGIAVEQDKNTQEVFAQVKQIYKTPPIKDFGGFNFSQILPDPSKPSKRSFIEDLLFNKVTLADAGFIKQYGDCLGDIAARDLICAQKFNGLTVLPPLLTDEMIAQYTSALLAGTITSGWTFGAGAALQIPFAMQMAYRFNGIGVTQNVLYENQKLIANQFNSAIGKIQDSLSSTASALGKLQDVVNQNAQALNTLVKQLSSNFGAISSVLNDILSRLDKVEAEVQIDRLITGRLQSLQTYVTQQLIRAAEIRASANLAATKMSECVLGQSKRVDFCGKGYHLMSFPQSAPHGVVFLHVTYVPAQEKNFTCAPAICHDGKAHFPREGVFVSNGTHWFVTQRNFYEPQIITTDNTFVSGNCDVVIGIVNNTVYDPLQPELDSFKEELDKYFKNHTSPDVDLGDISGINASVVNIQKEIDRLNEVAKNLNESLIDLQELGKYEQYIKWPWYIWLGFIAGLIAIVMVTIMLCCMTSCCSCLKGCCSCGSCCKFDEDDSEPVLKGVKLHYT

SEQ ID NO: 648 - protein, 1273 aa, Artificial Sequence
  SARS-CoV-2/SARS-CoV-2/Yunnan-01/human/2020/CHN__MT049951.1 spike protein (1-1273)(I712C_T1077C)
MFVFLVLLPLVSSQCVNLTTRTQLPPANTNSFTRGVYYPDKVFRSSVLHSTQDLFLPFFSNVTWFHAIHVSGTNGTKRFDNPVLPFNDGVYFASTEKSNIIRGWIFGTTLDSKTQSLLIVNNATNVVIKVCEFQFCNDPFLGVYYHKNNKSWMESEFRVYSSANNCTFEYVSQPFLMDLEGKQGNFKNLREFVFKNIDGYFKIYSKHTPINLVRDLPQGFSALEPLVDLPIGINITRFQTLLALHRSYLTPGDSSSGWTAGAAAYYVGYLQPRTFLLKYNENGTITDAVDCALDPLSETKCTLKSFTVEKGIYQTSNFRVQPTESIVRFPNITNLCPFGEVFNATRFASVYAWNRKRISNCVADYSVLYNSASFSTFKCYGVSPTKLNDLCFTNVYADSFVIRGDEVRQIAPGQTGKIADYNYKLPDDFTGCVIAWNSNNLDSKVGGNYNYLYRLFRKSNLKPFERDISTEIYQAGSTPCNGVEGFNCYFPLQSYGFQPTNGVGYQPYRVVVLSFELLHAPATVCGPKKSTNLVKNKCVNFNFNGLTGTGVLTESNKKFLPFQQFGRDIADTTDAVRDPQTLEILDITPCSFGGVSVITPGTNTSNQVAVLYQDVNCTEVPVAIHADQLTPTWRVYSTGSNVFQTRAGCLIGAEHVNNSYECDIPIGAGICASYQTQTNSPRRARSVASQSIIAYTMSLGAENSVAYSNNSCAIPTNFTISVTTEILPVSMTKTSVDCTMYICGDSTECSNLLLQYGSFCTQLNRALTGIAVEQDKNTQEVFAQVKQIYKTPPIKDFGGFNFSQILPDPSKPSKRSFIEDLLFNKVTLADAGFIKQYGDCLGDIAARDLICAQKFNGLTVLPPLLTDEMIAQYTSALLAGTITSGWTFGAGAALQIPFAMQMAYRFNGIGVTQNVLYENQKLIANQFNSAIGKIQDSLSSTASALGKLQDVVNQNAQALNTLVKQLSSNFGAISSVLNDILSRLDKVEAEVQIDRLITGRLQSLQTYVTQQLIRAAEIRASANLAATKMSECVLGQSKRVDFCGKGYHLMSFPQSAPHGVVFLHVTYVPAQEKNFTCAPAICHDGKAHFPREGVFVSNGTHWFVTQRNFYEPQIITTDNTFVSGNCDVVIGIVNNTVYDPLQPELDSFKEELDKYFKNHTSPDVDLGDISGINASVVNIQKEIDRLNEVAKNLNESLIDLQELGKYEQYIKWPWYIWLGFIAGLIAIVMVTIMLCCMTSCCSCLKGCCSCGSCCKFDEDDSEPVLKGVKLHYT

SEQ ID NO: 649 - protein, 1273 aa, Artificial Sequence
  SARS-CoV-2/USA/WA-UW292/2020__EPI_ISL_418077 spike protein (1-1273)(I712C_T1077C)
MFVFLVLLPLVSSQCVNLTTRTQLPPAYTNSFTRGVYYPDKVFRSSVLHSTQDLFLPFFSNVTWFHAIHVSGTNGTKRFDNPVLPFNDGVYFASTEKSNIIRGWIFGTTLDSKTQSLLIVNNATNVVIKVCEFQFCNDPFLGVYYHKNNKSWMESEFRVYSSANNCTFEYVSQPFLMDLEGKQGNFKNLREFVFKNIDGYFKIYSKHTPINLVRDLPQGFSALEPLVDLPIGINITRFQTLLALHRSYLTPGDSSSGWTAGAAAYYVGYLQPRTFLLKYNENGTITDAVDCALDPLSETKCTLKSFTVEKGIYQTSNFRVQPTESIVRFPNITNLCPFGEVFNATRFASVYAWNRKRISNCVADYSVLYNSASFSTFKCYGVSPTKLNDLCFTNVYADSFVIRGDEVRQIAPGQTGKIADYNYKLPDDFTGCVIAWNSNNLDSKVGGNYNYLYRLFRKSNLKPFERDISTEIYQASSTPCNGVEGFNCYFPLQSYGFQPTNGVGYQPYRVVVLSFELLHAPATVCGPKKSTNLVKNKCVNFNFNGLTGTGVLTESNKKFLPFQQFGRDIADTTDAVRDPQTLEILDITPCSFGGVSVITPGTNTSNQVAVLYQDVNCTEVPVAIHADQLTPTWRVYSTGSNVFQTRAGCLIGAEHVNNSYECDIPIGAGICASYQTQTNSPRRARSVASQSIIAYTMSLGAENSVAYSNNSCAIPTNFTISVTTEILPVSMTKTSVDCTMYICGDSTECSNLLLQYGSFCTQLNRALTGIAVEQDKNTQEVFAQVKQIYKTPPIKDFGGFNFSQILPDPSKPSKRSFIEDLLFNKVTLADAGFIKQYGDCLGDIAARDLICAQKFNGLTVLPPLLTDEMIAQYTSALLAGTITSGWTFGAGAALQIPFAMQMAYRFNGIGVTQNVLYENQKLIANQFNSAIGKIQDSLSSTASALGKLQDVVNQNAQALNTLVKQLSSNFGAISSVLNDILSRLDKVEAEVQIDRLITGRLQSLQTYVTQQLIRAAEIRASANLAATKMSECVLGQSKRVDFCGKGYHLMSFPQSAPHGVVFLHVTYVPAQEKNFTCAPAICHDGKAHFPREGVFVSNGTHWFVTQRNFYEPQIITTDNTFVSGNCDVVIGIVNNTVYDPLQPELDSFKEELDKYFKNHTSPDVDLGDISGINASVVNIQKEIDRLNEVAKNLNESLIDLQELGKYEQYIKWPWYIWLGFIAGLIAIVMVTIMLCCMTSCCSCLKGCCSCGSCCKFDEDDSEPVLKGVKLHYT

SEQ ID NO: 650 - protein, 1273 aa, Artificial Sequence
  SARS-CoV-2/Iceland/192/2020__EPI_ISL_417819 spike protein (1-1273)(I712C_T1077C)
MFVFFVLLPLVSSQCVNLTTRTQLPPAYTNSFTRGVYYPDKVFRSSVLHSTQDLFLPFFSNVTWFHAIHVSGTNGTKRFDNPVLPFNDGVYFASTEKSNIIRGWIFGTTLDSKTQSLLIVNNATNVVIKVCEFQFCNDPFLGVYYHKNNKSWMESEFRVYSSANNCTFEYVSQPFLMDLEGKQGNFKNLREFVFKNIDGYFKIYSKHTPINLVRDLPQGFSALEPLVDLPIGINITRFQTLLALHRSYLTPGDSSSGWTAGAAAYYVGYLQPRTFLLKYNENGTITDAVDCALDPLSETKCTLKSFTVEKGIYQTSNFRVQPTESIVRFPNITNLCPFGEVFNATRFASVYAWNRKRISNCVADYSVLYNSASFSTFKCYGVSPTKLNDLCFTNVYADSFVIRGDEVRQIAPGQTGKIADYNYKLPDDFTGCVIAWNSNNLDSKVGGNYNYLYRLFRKSNLKPFERDISTEIYQAGSTPCNGVEGFNCYFPLQSYGFQPTNGVGYQPYRVVVLSFELLHAPATVCGPKKSTNLVKNKCVNFNFNGLTGTGVLTESNKKFLPFQQFGRDIADTTDAVRDPQTLEILDITPCSFGGVSVITPGTNTSNQVAVLYQGVNCTEVPVAIHADQLTPTWRVYSTGSNVFQTRAGCLIGAEHVNNSYECDIPIGAGICASYQTQTNSPRRARSVASQSIIAYTMSLGAENSVAYSNNSCAIPTNFTISVTTEILPVSMTKTSVDCTMYICGDSTECSNLLLQYGSFCTQLNRALTGIAVEQDKNTQEVFAQVKQIYKTPPIKDFGGFNFSQILPDPSKPSKRSFIEDLLFNKVTLADAGFIKQYGDCLGDIAARDLICAQKFNGLTVLPPLLTDEMIAQYTSALLAGTITSGWTFGAGAALQIPFAMQMAYRFNGIGVTQNVLYENQKLIANQFNSAIGKIQDSLSSTASALGKLQDVVNQNAQALNTLVKQLSSNFGAISSVLNDILSRLDKVEAEVQIDRLITGRLQSLQTYVTQQLIRAAEIRASANLAATKMSECVLGQSKRVDFCGKGYHLMSFPQSAPHGVVFLHVTYVPAQEKNFTCAPAICHDGKAHFPREGVFVSNGTHWFVTQRNFYEPQIITTDNTFVSGNCDVVIGIVNNTVYDPLQPELDSFKEELDKYFKNHTSPDVDLGDISGINASVVNIQKEIDRLNEVAKNLNESLIDLQELGKYEQYIKWPWYIWLGFIAGLIAIVMVTIMLCCMTSCCSCLKGCCSCGSCCKFDEDDSEPVLKGVKLHYT

SEQ ID NO: 651 - protein, 1273 aa, Artificial Sequence
  SARS-CoV-2/Belgium/ULG-6939/2020__EPI_ISL_417020 spike protein (1-1273)(I712C_T1077C)
MFVFLVLLPLVSSQCVNLTTRTQLPPAYTNSFTRGVYYPDKVFRSSVLHSTQDLFLPFFSNVTWFHAIHVSGTNGTKRFDNPVLPFNDGVYFASTEKSNIIRGWIFGTTLDSKTQSLLIVNNATNVVIKVCEFQFCNDPFLGVYYHKNNKSWMESEFRVYSSANNCTFEYVSQPFLMDLEGKQGNFKNLREFVFKNIDGYFKIYSKHTPINLVRDLPQGFSALEPLVDLPIGINITRFQTLLALHRSYLTPGDSSSGWTAGAAAYYVGYLQPRTFLLKYNENGTITDAVDCALDPLSETKCTLKSFTVEKGIYQTSNFRVQPTESIVRFPNITNLCPFGEVFNATRFASVYAWNRKRISNCVADYSVLYNSASFSTFKCYGVSPTKLNDLCFTNVYADSFVIRGDEVRQIAPGQTGKIADYNYKLPDDFTGCVIAWNSNNLDSKVGGNYNYLYRLFRKSNLKPFERDISTEIYQAGSTPCNGVEGFNCYFPLQSYGFQPTNGVGYQPYRVVVLSFELLHAPATVCGPKKSTNLVKNKCVNFNFNGLTGTGVLTESNKKFLPFQQFGRDIADTTDAVRDPQTLEILDITPCSFGGVSVITPGTNTSNQVAVLYQGVNCTEVPVAIHADQLTPTWRVYSTGSNVFQTRAGCLIGAEHVNNSYECDIPIGAGICASYQTQTNSPRRARSVASQSIIAYTMSLGAENSVVYSNNSCAIPTNFTISVTTEILPVSMTKTSVDCTMYICGDSTECSNLLLQYGSFCTQLNRALTGIAVEQDKNTQEVFAQVKQIYKTPPIKDFGGFNFSQILPDPSKPSKRSFIEDLLFNKVTLADAGFIKQYGDCLGDIAARDLICAQKFNGLTVLPPLLTDEMIAQYTSALLAGTITSGWTFGAGAALQIPFAMQMAYRFNGIGVTQNVLYENQKLIANQFNSAIGKIQDSLSSTASALGKLQDVVNQNAQALNTLVKQLSSNFGAISSVLNDILSRLDKVEAEVQIDRLITGRLQSLQTYVTQQLIRAAEIRASANLAATKMSECVLGQSKRVDFCGKGYHLMSFPQSAPHGVVFLHVTYVPAQEKNFTCAPAICHDGKAHFPREGVFVSNGTHWFVTQRNFYEPQIITTDNTFVSGNCDVVIGIVNNTVYDPLQPELDSFKEELDKYFKNHTSPDVDLGDISGINASVVNIQKEIDRLNEVAKNLNESLIDLQELGKYEQYIKWPWYIWLGFIAGLIAIVMVTIMLCCMTSCCSCLKGCCSCGSCCKFDEDDSEPVLKGVKLHYT

SEQ ID NO: 652 - protein, 1273 aa, Artificial Sequence
  SARS-CoV-2/France/HF2496/2020__EPI_ISL_418231 spike protein (1-1273)(I712C_T1077C)
MFVFLVLLPLVSSQCVNLTTRTQLPPAYTNSFTRGVYYPDKVFRSSVLHSTQDLFLPFFSNVTWFHAIHVSGTNGTKRFDNPVLPFNDGVYFASTEKSNIIRGWIFGTTLDSKTQSLLIVNNATNVVIKVCEFQFCNDPFLGVYYHKNNKSWMESEFRVYSSANNCTFEYVSQPFLMDLEGKQGNFKNLREFVFKNIDGYFKIYSKHTPINLVRDLPQGFSALEPLVDLPIGINITRFQTLLALHRSYLTPGDSSSGWTAGAAAYYVGYLQPRTFLLKYNENGTITDAVDCALDPLSETKCTLKSFTVEKGIYQTSNFRVQPTESIVRFPNITNLCPFGEVFNATRFASVYAWNRKRISNCVADYSVLYNSASFSTFKCYGVSPTKLNDLCFTNVYADSFVIRGDEVRQIAPGQTGKIADYNYKLPDDFTGCVIAWNSNNLDSKVGGNYNYLYRLFRKSNLKPFERDISTEIYQAGSTPCNGVEGFNCYFPLQSYGFQPTNGVGYQPYRVVVLSFELLHAPATVCGPKKSTNLVKNKCVNFNFNGLTGTGVLTESNKKFLPFQQFGRDIADTTDAVRDPQTLEILDITPCSFGGVSVITPGTNTSNQVAVLYQGVNCTEVPVAIHADQLTPTWRVYSTGSNVFQTRAGCLIGAEHVNNSYECDIPIGAGICASYQTQTNSPRRARSVASQSIIAYTMSLGAENSVAYSNNSCAIPTNFTISVTTEILPVSMTKTSVDCTMYICGDSTECSNLLLQYGSFCTQLNRALTGIAVEQDKNTQEVFAQVKQIYKTPPIKDFGGFNFSQILPDPSKPSKRSFIEDLLFNKVTLADAGFIKQYGDCLGDIVARDLICAQKFNGLTVLPPLLTDEMIAQYTSALLAGTITSGWTFGAGAALQIPFAMQMAYRFNGIGVTQNVLYENQKLIANQFNSAIGKIQDSLSSTASALGKLQDVVNQNAQALNTLVKQLSSNFGAISSVLNDILSRLDKVEAEVQIDRLITGRLQSLQTYVTQQLIRAAEIRASANLAATKMSECVLGQSKRVDFCGKGYHLMSFPQSAPHGVVFLHVTYVPAQEKNFTCAPAICHDGKAHFPREGVFVSNGTHWFVTQRNFYEPQIITTDNTFVSGNCDVVIGIVNNTVYDPLQPELDSFKEELDKYFKNHTSPDVDLGDISGINASVVNIQKEIDRLNEVAKNLNESLIDLQELGKYEQYIKWPWYIWLGFIAGLIAIVMVTIMLCCMTSCCSCLKGCCSCGSCCKFDEDDSEPVLKGVKLHYT

SEQ ID NO: 653 - protein, 1273 aa, Artificial Sequence
  SARS-CoV-2/USA/WA-UW291/2020__EPI_ISL_418076 spike protein (1-1273)(I712C_T1077C)
MFVFLVLLPLVSSQCVNLTTRTQLPPAYTNSFTRGVYYPDKVFRSSVLHSTQDLFLPFFSNVTWFHAIHVSGTNGTKRFDNPVLPFNDGVYFASTEKSNIIRGWIFGTTLDSKTQSLLIVNNATNVVIKVCEFQFCNDPFLGVYYHKNNKSWMESEFRVYSSANNCTFEYVSQPFLMDLEGKQGNFKNLREFVFKNIDGYFKIYSKHTPINLVRDLPQGFSALEPLVDLPIGINITRFQTLLALHRSYLTPGDSSSGWTAGAAAYYVGYLQPRTFLLKYNENGTITDAVDCALDPLSETKCTLKSFTVEKGIYQTSNFRVQPTESIVRFPNITNLCPFGEVFNATRFASVYAWNRKRISNCVADYSVLYNSASFSTFKCYGVSPTKLNDLCFTNVYADSFVIRGDEVRQIAPGQTGKIADYNYKLPDDFTGCVIAWNSNNLDSKVGGNYNYLYRLFRKSNLKPFERDISTEIYQAGSTPCNGVEGFNCYFPLQSYGFQPTNGVGYQPYRVVVLSFELLHAPATVCGPKKSTNLVKNKCVNFNFNGLTGTGVLTESNKKFLPFQQFGRDIADTTDAVRDPQTLEILDITPCSFGGVSVITPGTNTSNQVAVLYQGVNCTEVPVAIHADQLTPTWRVYSTGSNVFQTRAGCLIGAEHVNNSYECDIPIGAGICASYQTQTNSPRRARSVASQSIIAYTMSLGAENSVAYSNNSCAIPTNFTISVTTEILPVSMTKTSVDCTMYICGDSTECSNLLLQYGSFCTQLNRALTGIAVEQDKNTQEVFAQVKQIYKTPPIKDFGGFNFSQILPDPSKPSKRSFIEDLLFNKVTLADAGFIKQYGDCLGDIAARDLICAQKFNGLTVLPPLLTDEMIAQYTSALLAGTITSGWTFGAGAALQIPFAMQMAYRFNGIGVTQNVLYENQKLIANQFNSAIGKIQYSLSSTASALGKLQDVVNQNAQALNTLVKQLSSNFGAISSVLNDILSRLDKVEAEVQIDRLITGRLQSLQTYVTQQLIRAAEIRASANLAATKMSECVLGQSKRVDFCGKGYHLMSFPQSAPHGVVFLHVTYVPAQEKNFTCAPAICHDGKAHFPREGVFVSNGTHWFVTQRNFYEPQIITTDNTFVSGNCDVVIGIVNNTVYDPLQPELDSFKEELDKYFKNHTSPDVDLGDISGINASVVNIQKEIDRLNEVAKNLNESLIDLQELGKYEQYIKWPWYIWLGFIAGLIAIVMVTIMLCCMTSCCSCLKGCCSCGSCCKFDEDDSEPVLKGVKLHYT

SEQ ID NO: 654 - protein, 1273 aa, Artificial Sequence
  SARS-CoV-2/Portugal/PT0034/2020__EPI_ISL_418019 spike protein (1-1273)(I712C_T1077C)
MFVFLVLLPLVSSQCVNLTTRTQLPPAYTNSFTRGVYYPDKVFRSSVLHSTQDLFLPFFSNVTWFHAIHVSGTNGTKRFDNPVLPFNDGVYFASTEKSNIIRGWIFGTTLDSKTQSLLIVNNATNVVIKVCEFQFCNDPFLGVYYHKNNKSWMESEFRVYSSANNCTFEYVSQPFLMDLEGKQGNFKNLREFVFKNIDGYFKIYSKHTPINLVRDLPQGFSALEPLVDLPIGINITRFQTLLALHRSYLTPGDSSSGWTAGAAAYYVGYLQPRTFLLKYNENGTITDAVDCALDPLSETKCTLKSFTVEKGIYQTSNFRVQPTESIVRFPNITNLCPFGEVFNATRFASVYAWNRKRISNCVADYSVLYNSASFSTFKCYGVSPTKLNDLCFTNVYADSFVIRGDEVRQIAPGQTGKIADYNYKLPDDFTGCVIAWNSNNLDSKVGGNYNYLYRLFRKSNLKPFERDISTEIYQAGSTPCNGVEGFNCYFPLQSYGFQPTNGVGYQPYRVVVLSFELLHAPATVCGPKKSTNLVKNKCVNFNFNGLTGTGVLTESNKKFLPFQQFGRDIADTTDAVRDPQTLEILDITPCSFGGVSVITPGTNTSNQVAVLYQGVNCTEVPVAIHADQLTPTWRVYSTGSNVFQTRAGCLIGAEHVNNSYECDIPIGAGICASYQTQTNSPRRARSVASQSIIAYTMSLGAENSVAYSNNSCAIPTNFTISVTTEILPVSMTKTSVDCTMYICGDSTECSNLLLQYGSFCTQLNRALTGIAVEQDKNTQEVFAQVKQIYKTPPIKDFGGFNFSQILPDPSKPSKRSFIEDLLFNKVTLADAGFIKQYGDCLGDIAARDLICAQKFNGLTVLPPLLTDEMIAQYTSALLAGTITSGWTFGAGAALQIPFAMQMAYRFNGIGVTQNVLYENQKLIANQFNSAIGKIQDSLSSTASALGKLQDVVNQNAQALNTLVKQLSSNFGAISSVLNDILSRLDKVEAEVQIDRLITGRLQSLQTYVTQQLIRAAEIRASANLAATKMSECVLGQSKRVDFCGKGYHLMSFPQSAPHGVVFLHVTYVPAQEKNFTCAPAICHDGKAHFPREGVFVSNGTHWFVTQRNFYEPQIITTDNTFVSGNCDVVIGIVNNTVYDPLQPELDSFKEELDKYFKNHTSPDVDLGDISGINASVVNIQKEIDRLNEVAKNLNESLIDLQELGKYEQYIKWPWYIWLGFIAGLIAIVMVTIMLCCITSCCSCLKGCCSCGSCCKFDEDDSEPVLKGVKLHYT

SEQ ID NO: 655 - protein, 1273 aa, Artificial Sequence
  SARS-CoV-2/Iceland/202/2020__EPI_ISL_417750 spike protein (1-1273)(I712C_T1077C)
MFVFLVLLPLVSSQCVNLTTRTQLPPAYTNSFTRGVYYPDKVFRSSVLHSTQDLFLPFFSNVTWFHAIHVSGTNGTKRFDNPVLPFNDGVYFASTEKSNIIRGWIFGTTLDSKTQSLLIVNNATNVVIKVCEFQFCNDPFLGVYYHKNNKSWMESEFRVYSSANNCTFEYVSQPFLMDLEGKQGNFKNLREFVFKNIDGYFKIYSKHTPINLVRDLPQGFSALEPLVDLPIGINITRFQTLLALHRSYLTPGDSSSGWTAGAAAYYVGYLQPRTFLLKYNENGTITDAVDCALDPLSETKCTLKSFTVEKGIYQTSNFRVQPTESIVRFPNITNLCPFGEVFNATRFASVYAWNRKRISNCVADYSVLYNSASFSTFKCYGVSPTKLNDLCFTNVYADSFVIRGDEVRQIAPGQTGKIADYNYKLPDDFTGCVIAWNSNNLDSKVGGNYNYLYRLFRKSNLKPFERDISTEIYQAGSTPCNGVEGFNCYFPLQSYGFQPTNGVGYQPYRVVVLSFELLHAPATVCGPKKSTNLVKNKCVNFNFNGLTGTGVLTESNKKFLPFQQFGRDIADTTDAVRDPQTLEILDITPCSFGGVSVITPGTNTSNQVAVLYQDVNCTEVPVAIHADQLTPTWRVYSTGSNVFQTRAGCLIGAEHVNNSYECDIPIGAGICASYQTQTNSPRRARSVASQSIIAYTMSLGAENSVAYSNNSCAIPTNFTISVTTEILPVSMTKTSVDCTMYICGDSTECSNLLLQYGSFCTQLNRALTGIAVEQDKNTQEVFAQVKQIYKTPPIKDFGGFNFSQILPDPSKPSKRSFIEDLLFNKVTLADAGFIKQYGDCLGDIAARDLICAQKFNGLTVLPPLLTDEMIAQYTSALLAGTITSGWTFGAGAALQIPFAMQMAYRFNGIGVTQNVLYENQKLIANQFNSAIGKIQDSLSSTASALGKLQDVVNQNAQALNTLVKQLSSNFGAISSVLNDILSRLDKVEAEVQIDRLITGRLQSLQTYVTQQLIRAAEIRASANLAATKMSECVLGQSKRVDFCGKGYHLMSFPQSAPHGVVFLHVTYVPAQEKNFTCAPAICHDGKAHFPREGVFVSNGTHWFVTQRNFYEPQIITTDNTFVSGNCDVVIGIVNNTVYDPLQPELDSFKEELDKYFKNHTSPDVDLGDIPGINASVVNIQKEIDRLNEVAKNLNESLIDLQELGKYEQYIKWPWYIWLGFIAGLIAIVMVTIMLCCMTSCCSCLKGCCSCGSCCKFDEDDSEPVLKGVKLHYT

SEQ ID NO: 656 - protein, 1273 aa, Artificial Sequence
  SARS-CoV-2/USA/WA-UW261/2020__EPI_ISL_418046 spike protein (1-1273)(I712C_T1077C)
MFVFLVLLPLVSSQCVNLTTRTQLPPAYTNSFTRGVYYPDKVFRSSVLHSTQDLFLPFFSNVTWFHAIHVSGTNGTKRFDNPVLPFNDGVYFASTEKSNIIRGWIFGTTLDSKTQSLLIVNNATNVVIKVCEFQFCNDPFLGVYYHKNNKSWMESEFRVYSSANNCTFEYVSQPFLMDLEGKQGNFKNLREFVFKNIDGYFKIYSKHTPINLVRDLPQGFSALEPLVDLPIGINITRFQTLLALHRSYLTPGDSSSGWTAGAAAYYVGYLQPRTFLLKYNENGTITDAVDCALDPLSETKCTLKSFTVEKGIYQTSNFRVQPTESIVRFPNITNLCPFGEVFNATRFTSVYAWNRKRISNCVADYSVLYNSASFSTFKCYGVSPTKLNDLCFTNVYADSFVIRGDEVRQIAPGQTGKIADYNYKLPDDFTGCVIAWNSNNLDSKVGGNYNYLYRLFRKSNLKPFERDISTEIYQAGSTPCNGVEGFNCYFPLQSYGFQPTNGVGYQPYRVVVLSFELLHAPATVCGPKKSTNLVKNKCVNFNFNGLTGTGVLTESNKKFLPFQQFGRDIADTTDAVRDPQTLEILDITPCSFGGVSVITPGTNTSNQVAVLYQDVNCTEVPVAIHADQLTPTWRVYSTGSNVFQTRAGCLIGAEHVNNSYECDIPIGAGICASYQTQTNSPRRARSVASQSIIAYTMSLGAENSVAYSNNSCAIPTNFTISVTTEILPVSMTKTSVDCTMYICGDSTECSNLLLQYGSFCTQLNRALTGIAVEQDKNTQEVFAQVKQIYKTPPIKDFGGFNFSQILPDPSKPSKRSFIEDLLFNKVTLADAGFIKQYGDCLGDIAARDLICAQKFNGLTVLPPLLTDEMIAQYTSALLAGTITSGWTFGAGAALQIPFAMQMAYRFNGIGVTQNVLYENQKLIANQFNSAIGKIQDSLSSTASALGKLQDVVNQNAQALNTLVKQLSSNFGAISSVLNDILSRLDKVEAEVQIDRLITGRLQSLQTYVTQQLIRAAEIRASANLAATKMSECVLGQSKRVDFCGKGYHLMSFPQSAPHGVVFLHVTYVPAQEKNFTCAPAICHDGKAHFPREGVFVSNGTHWFVTQRNFYEPQIITTDNTFVSGNCDVVIGIVNNTVYDPLQPELDSFKEELDKYFKNHTSPDVDLGDISGINASVVNIQKEIDRLNEVAKNLNESLIDLQELGKYEQYIKWPWYIWLGFIAGLIAIVMVTIMLCCMTSCCSCLKGCCSCGSCCKFDEDDSEPVLKGVKLHYT

SEQ ID NO: 657 - protein, 1273 aa, Artificial Sequence
  SARS-CoV-2/Portugal/PT0035/2020__EPI_ISL_418020 spike protein (1-1273)(I712C_T1077C)
MFVFLVLLPLVSSQCVNLTTRTQLPPAYTNSFTRGVYYPDKVFRSSVLHSTQDLFLPFFSNVTWFHAIHVSGTNGTKRFDNPVLPFNDGVYFASTEKSNIIRGWIFGTTLDSKTQSLLIVNNATNVVIKVCEFQFCNDPFLGVYYHKNNKSWMESEFRVYSSANNCTFEYVSQPFLMDLEGKQGNFKNLREFVFKNIDGYFKIYSKHTPINLVRDLPQGFSALEPLVDLPIGINITRFQTLLALHRSYLTPGDSSSGWTAGAAAYYVGYLQPRTFLLKYNENGTITDAVDCALDPLSETKCTLKSFTVEKGIYQTSNFRVQPTESIVRFPNITNLCPFGEVFNATRFASVYAWNRKRISNCVADYSVLYNSASFSTFKCYGVSPTKLNDLCFTNVYADSFVIRGDEVRQIAPGQTGKIADYNYKLPDDFTGCVIAWNSNNLDSKVGGNYNYLYRLFRKSNLKPFERDISTEIYQAGSTPCNGVEGFNCYFPLQSYGFQPTNGVGYQPYRVVVLSFELLHAPATVCGPKKSTNLVKNKCVNFNFNGLTGTGVLTESNKKFLPFQQFGRDIADTTDAVRDPQTLEILDITPCSFGGVSVITPGTNTSNQVAVLYQDVNCTEVPVAIHADQLTPTWRVYSTGSNVFQTRAGCLIGAEHVNNSYECDIPIGAGICASYQTQTNSPRRARSVASQSIIAYTMSLGAENSVAYSNNSCAIPTNFTISVTTEILPVSMTKTSVDCTMYICGDSTECSNLLLQYGSFCTQLNRALTGIAVEQDKNTQEVFAQVKQIYKTPPIKDFGGFNFSQILPDPSKPSKRSFIEDLLFNKVTLADAGFIKQYGDCLGDISARDLICAQKFNGLTVLPPLLTDEMIAQYTSALLAGTITSGWTFGAGAALQIPFAMQMAYRFNGIGVTQNVLYENQKLIANQFNSAIGKIQDSLSSTASALGKLQDVVNQNAQALNTLVKQLSSNFGAISSVLNDILSRLDKVEAEVQIDRLITGRLQSLQTYVTQQLIRAAEIRASANLAATKMSECVLGQSKRVDFCGKGYHLMSFPQSAPHGVVFLHVTYVPAQEKNFTCAPAICHDGKAHFPREGVFVSNGTHWFVTQRNFYEPQIITTDNTFVSGNCDVVIGIVNNTVYDPLQPELDSFKEELDKYFKNHTSPDVDLGDISGINASVVNIQKEIDRLNEVAKNLNESLIDLQELGKYEQYIKWPWYIWLGFIAGLIAIVMVTIMLCCMTSCCSCLKGCCSCGSCCKFDEDDSEPVLKGVKLHYT

SEQ ID NO: 658 - protein, 1273 aa, Artificial Sequence
  SARS-CoV-2/USA/NY-NYUMC7/2020__EPI_ISL_418192 spike protein (1-1273)(I712C_T1077C)
MFVFLVLLPLVSSQCVNLTTRTQLPPAYTNSFTRGVYYPDKVFRSSVLHSTQDLFLPFFSNVTWFHAIHVSGTNGTKRFDNPVLPFNDGVYFASTEKSNIIRGWIFGTTLDSKTQSLLIVNNATNVVIKVCEFQFCNDPFLGVYHHKNNKSWMESEFRVYSSANNCTFEYVSQPFLMDLEGKQGNFKNLREFVFKNIDGYFKIYSKHTPINLVRDLPQGFSALEPLVDLPIGINITRFQTLLALHRSYLTPGDSSSGWTAGAAAYYVGYLQPRTFLLKYNENGTITDAVDCALDPLSETKCTLKSFTVEKGIYQTSNFRVQPTESIVRFPNITNLCPFGEVFNATRFASVYAWNRKRISNCVADYSVLYNSASFSTFKCYGVSPTKLNDLCFTNVYADSFVIRGDEVRQIAPGQTGKIADYNYKLPDDFTGCVIAWNSNNLDSKVGGNYNYLYRLFRKSNLKPFERDISTEIYQAGSTPCNGVEGFNCYFPLQSYGFQPTNGVGYQPYRVVVLSFELLHAPATVCGPKKSTNLVKNKCVNFNFNGLTGTGVLTESNKKFLPFQQFGRDIADTTDAVRDPQTLEILDITPCSFGGVSVITPGTNTSNQVAVLYQGVNCTEVPVAIHADQLTPTWRVYSTGSNVFQTRAGCLIGAEHVNNSYECDIPIGAGICASYQTQTNSPRRARSVASQSIIAYTMSLGAENSVAYSNNSCAIPTNFTISVTTEILPVSMTKTSVDCTMYICGDSTECSNLLLQYGSFCTQLNRALTGIAVEQDKNTQEVFAQVKQIYKTPPIKDFGGFNFSQILPDPSKPSKRSFIEDLLFNKVTLADAGFIKQYGDCLGDIAARDLICAQKFNGLTVLPPLLTDEMIAQYTSALLAGTITSGWTFGAGAALQIPFAMQMAYRFNGIGVTQNVLYENQKLIANQFNSAIGKIQDSLSSTASALGKLQDVVNQNAQALNTLVKQLSSNFGAISSVLNDILSRLDKVEAEVQIDRLITGRLQSLQTYVTQQLIRAAEIRASANLAATKMSECVLGQSKRVDFCGKGYHLMSFPQSAPHGVVFLHVTYVPAQEKNFTCAPAICHDGKAHFPREGVFVSNGTHWFVTQRNFYEPQIITTDNTFVSGNCDVVIGIVNNTVYDPLQPELDSFKEELDKYFKNHTSPDVDLGDISGINASVVNIQKEIDRLNEVAKNLNESLIDLQELGKYEQYIKWPWYIWLGFIAGLIAIVMVTIMLCCMTSCCSCLKGCCSCGSCCKFDEDDSEPVLKGVKLHYT

SEQ ID NO: 659 - protein, 1273 aa, Artificial Sequence
  SARS-CoV-2/Iceland/189/2020__EPI_ISL_417709 spike protein (1-1273)(I712C_T1077C)
MFVFLVLLPLVSSQCVNLTTRTQLPPAYTNSFTRGVYYPDKVFRSSVLHSTQDLFLPFFSNVTWFHAIHVSGTNGTKRFDNPVLPFNDGVYFASTEKSNIIRGWIFGTTLDSKTQSLLIVNNATNVVIKVCEFQFCNDPFLGVYYHKNNKSWMESEFRVYSSANNCTFEYVSQPFLMDLEGKQGNFKNLREFVFKNIDGYFKIYSKHTPINLVRDLPQGFSALEPLVDLPIGINITRFQTLLALHRSYLTPGDSSSGWTAGAAAYYVGYLQPRTFLLKYNENGTITDAVDCALDPLSETKCTLKSFTVEKGIYQTSNFRVQPTESIVRFPNITNLCPFGEVFNATRFASVYAWNRKRISNCVADYSVLYNSASFSTFKCYGVSPTKLNDLCFTNVYADSFVIRGDEVRQIAPGQTGKIADYNYKLPDDFTGCVIAWNSNNLDSKVGGNYNYLYRLFRKSNLKPFERDISTEIYQAGSTPCNGVEGFNCYFPLQSYGFQPTNGVGYQPYRVVVLSFELLHAPATVCGPKKSTNLVKNKCVNFNFNGLTGTGVLTESNKKFLPFQQFGRDIADTTDAVRDPQTLEILDITPCSFGGVSVITPGTNTSNQVAVLYQGVNCTEVPVAIHADQLTPTWRVYSTGSNVFQTRAGCLIGAEHVNNSYECDIPIGAGICASYQTQTNSPRRARSVASQSIIAYTMSLGAENSVAYSNNSCAIPTNFTISVTTEILPVSMTKTSVDCTMYICGDSTECSNLLLQYGSFCTQLNRALTGIAVEQDKNTQEVFAQVKQIYKTPPIKDFGGFNFSQILPDPSKPSKRSFIEDLLFNKVTLADAGFTKQYGDCLGDIAARDLICAQKFNGLTVLPPLLTDEMIAQYTSALLAGTITSGWTFGAGAALQIPFAMQMAYRFNGIGVTQNVLYENQKLIANQFNSAIGKIQDSLSSTASALGKLQDVVNQNAQALNTLVKQLSSNFGAISSVLNDILSRLDKVEAEVQIDRLITGRLQSLQTYVTQQLIRAAEIRASANLAATKMSECVLGQSKRVDFCGKGYHLMSFPQSAPHGVVFLHVTYVPAQEKNFTCAPAICHDGKAHFPREGVFVSNGTHWFVTQRNFYEPQIITTDNTFVSGNCDVVIGIVNNTVYDPLQPELDSFKEELDKYFKNHTSPDVDLGDISGINASVVNIQKEIDRLNEVAKNLNESLIDLQELGKYEQYIKWPWYIWLGFIAGLIAIVMVTIMLCCMTSCCSCLKGCCSCGSCCKFDEDDSEPVLKGVKLHYT

SEQ ID NO: 660 - protein, 1273 aa, Artificial Sequence
  SARS-CoV-2/Australia/NSW56/2020__EPI_ISL_417408 spike protein (1-1273)(I712C_T1077C)
MFVFLVLLPLVSSQCVNLTTRTQLPPAYTNSFTRGVYYPDKVFRSSVLHSTQDLFLPFFSNVTWFHAIHVSGTNGTKRFDNPVLPFNDGVYFASTEKSNIIRGWIFGTTLDSKTQSLLIVNNATNVVIKVCEFQFCNDPFLGVYYHKNNKSWMESEFRVYSSANNCTFEYVSQPFLMDLEGKQGNFKNLREFVFKNIDGYFKIYSKHTPINLVRDLPQGFSALEPLVDLPIGINITRFQTLLALHRSYLTPGDSSSGWTAGAAAYYVGYLQPRTFLLKYNENGTITDAVDCALDPLSETKCTLKSFTVEKGIYQTSNFRVQPTESIVRFPNITNLCPFGEVFNATRFASVYAWNRKRISNCVADYSVLYNSASFSTFKCYGVSPTKLNDLCFTNVYADSFVIRGDEVRQIAPGQTGKIADYNYKLPDDFTGCVIAWNSNNLDSKVGGNYNYLYRLFRKSNLKPFERDISTEIYQAGSTPCNGVEGFNCYFPLQSYGFQPTNGVGYQPYRVVVLSFELLHAPATVCGPKKSTNLVKNKCVNFNFNGLTGTGVLTESNKKFLPFQQFGRDIADTTDAVRDPQTLEILDITPCSFGGVSVITPGTNTSNQVAVLYQDVNCTEVPVAIHADQLTPTWRVYSTGSNVFQTRAGCLIGAEHVNNSYECDIPIGAGICASYQTQTNSPRRARSVASQSIIAYTMSLGAENSVAYSNNSCAIPTNFTISVTTEILPVSMTKTSVDCTMYICGDSTECSNLLLQYGSFCTQLNRALTGIAVEQDKNTQEVFAQVKQIYKTPPIKDFGGFNFSQILPDSSKPSKRSFIEDLLFNKVTLADAGFIKQYGDCLGDIAARDLICAQKFNGLTVLPPLLTDEMIAQYTSALLAGTITSGWTFGAGAALQIPFAMQMAYRFNGIGVTQNVLYENQKLIANQFNSAIGKIQDSLSSTASALGKLQDVVNQNAQALNTLVKQLSSNFGAISSVLNDILSRLDKVEAEVQIDRLITGRLQSLQTYVTQQLIRAAEIRASANLAATKMSECVLGQSKRVDFCGKGYHLMSFPQSAPHGVVFLHVTYVPAQEKNFTCAPAICHDGKAHFPREGVFVSNGTHWFVTQRNFYEPQIITTDNTFVSGNCDVVIGIVNNTVYDPLQPELDSFKEELDKYFKNHTSPDVDLGDISGINASVVNIQKEIDRLNEVAKNLNESLIDLQELGKYEQYIKWPWYIWLGFIAGLIAIVMVTIMLCCMTSCCSCLKGCCSCGSCCKFDEDDSEPVLKGVKLHYT

SEQ ID NO: 661 - protein, 1273 aa, Artificial Sequence
  SARS-CoV-2/Iceland/280/2020__EPI_ISL_417608 spike protein (1-1273)(I712C_T1077C)
MFVFLVLLPLVSSQCVNLTTRTQLPPAYTNSFTRGVYYPDKVFRSSVLHSTQDLFLPFFSNVTWFHAIHVSGTNGTKRFDNPVLPFNDGVYFASTEKSNIIRGWIFGTTLDSKTQSLLIVNNATNVVIKVCEFQFCNDPFLGVYYHKNNKSWMESEFRVYSSANNCTFEYVSQPFLMDLEGKQGNFKNLREFVFKNIDGYFKIYSKHTPINLVRDLPQGFSALEPLVDLPIGINITRFQTLLALHRSYLTPGDSSSGWTAGAAAYYVGYLQPRTFLLKYNENGTITDAVDCALDPLSETKCTLKSFTVEKGIYQTSNFRVQPTESIVRFPNITNLCPFGEVFNATRFASVYAWNRKRISNCVADYSVLYNSASFSTFKCYGVSPTKLNDLCFTNVYADSFVIRGDEVRQIAPGQTGKIADYNYKLPDDFTGCVIAWNSNNLDSKVGGNYNYLYRLFRKSNLKPFERDISTEIYQAGSTPCNGVEGFNCYFPLQSYGFQPTNGVGYQPYRVVVLSFELLHAPATVCGPKKSTNLVKNKCVNFNFNGLTGTGVLTESNKKFLPFQQFGRDIADTTDAVRDPQTLEILDITPCSFGGVSVITPGTNTSNQVAVLYQGVNCTEVPVAIHADQLTPTWRVYSTGSNVFQTRAGCLIGAEHVNNSYECDIPIGAGICASYHTQTNSPRRARSVASQSIIAYTMSLGAENSVAYSNNSCAIPTNFTISVTTEILPVSMTKTSVDCTMYICGDSTECSNLLLQYGSFCTQLNRALTGIAVEQDKNTQEVFAQVKQIYKTPPIKDFGGFNFSQILPDPSKPSKRSFIEDLLFNKVTLADAGFIKQYGDCLGDIAARDLICAQKFNGLTVLPPLLTDEMIAQYTSALLAGTITSGWTFGAGAALQIPFAMQMAYRFNGIGVTQNVLYENQKLIANQFNSAIGKIQDSLSSTASALGKLQDVVNQNAQALNTLVKQLSSNFGAISSVLNDILSRLDKVEAEVQIDRLITGRLQSLQTYVTQQLIRAAEIRASANLAATKMSECVLGQSKRVDFCGKGYHLMSFPQSAPHGVVFLHVTYVPAQEKNFTCAPAICHDGKAHFPREGVFVSNGTHWFVTQRNFYEPQIITTDNTFVSGNCDVVIGIVNNTVYDPLQPELDSFKEELDKYFKNHTSPDVDLGDISGINASVVNIQKEIDRLNEVAKNLNESLIDLQELGKYEQYIKWPWYIWLGFIAGLIAIVMVTIMLCCMTSCCSCLKGCCSCGSCCKFDEDDSEPVLKGVKLHYT

SEQ ID NO: 662 - protein, 1273 aa, Artificial Sequence
  SARS-CoV-2/Iceland/247/2020__EPI_ISL_417575 spike protein (1-1273)(I712C_T1077C)
MFVFLVLLPLVSSQCVNLTTRTQLPPAYTNSFTRGVYYPDKVFRSSVLHSTQDLFLPFFSNVTWFHAIHVSGTNGTKRFDNPVLPFNDGVYFASTEKSNIIRGWIFGTTLDSKTQSLLIVNNATNVVIKVCEFQFCNDPFLGVYYHKNNKSWMESEFRVYSSANNCTFEYVSQPFLMDLEGKQGNFKNLREFVFKNIDGYFKIYSKHTPINLVRDLPQGFSALEPLVDLPIGINITRFQTLLALHRSYLTPGDSSSGWTAGAAAYYVGYLQPRTFLLKYNENGTITDAVDCALDPLSETKCTLKSFTVEKGIYQTSNFRVQPTESIVRFPNITNLCPFGEVFNATRFASVYAWNRKRISNCVADYSVLYNSASFSTFKCYGVSPTKLNDLCFTNVYADSFVIRGDEVRQIAPGQTGKIADYNYKLPDDFTGCVIAWNSNNLDSKVGGNYNYLYRLFRKSNLKPFERDISTEIYQAGSTPCNGVEGFNCYFPLQSYGFQPTNGVGYQPYRVVVLSFELLHAPATVCGPKKSTNLVKNKCVNFNFNGLTGTGVLTESNKKFLPFQQFGRDIADTTDAVRDPQTLEILDITPCSFGGVSVITPGTNTSNQVAVLYQGVNCTEVPVAIHADQLTPTWRVYSTGSNVFQTRAGCLIGAEHVNNSYECDIPIGAGICASYQTQTNSPRRARSVASQSIIAYTMSLGAENSVAYSNNSCAIPTNFTISVTTEILPVSMTKTSVDCTMYICGDSTECSNLLLQYGSFCTQLNRALTGIAVEQDKNTQEVFAQVKQIYKTPPIKDFGGFNFSQILPDPSKPSKRSFIEDLLFNKVTLADAGFIKQYGDCLGDIAARDLICAQKFNGLTVLPPLLTDEMIAQYTSALLAGTITSGWTFGAGAALQIPFAMQMAYRFNGIGVTQNVLYENQKLIANQFNSAIGKIQDSLSSTASALGKLQDVVNQNAQALNTLVKQLSSNFGAISSVLNDILSRLDKVEAEVQIDRLITGRLQSLQTYVTQQLIRAAEIRASANLAATKMSECVLGQSKRVDFCGKGYHLMSFPQSAPHGVVFLHVTYVPAQEKNFTCAPAICHDGKAHFPREGVFVSNGTHWFVTQRNFYEPQIITTDNTFVSGNCDVVIGIVNNTVYDPLQPELDSFKEELDKYFKNHTSPDVDLGDISGINASVVNIQKEIDRLNEVAKNLNESLIDLQELGKYEQYIKWPWYIWLGFIAGLIAIVIVTIMLCCMTSCCSCLKGCCSCGSCCKFDEDDSEPVLKGVKLHYT

SEQ ID NO: 663 - protein, 1273 aa, Artificial Sequence
  SARS-CoV-2/Iceland/238/2020__EPI_ISL_417566 spike protein (1-1273)(I712C_T1077C)
MFVFLVLLPLVSSQCVNLTTRTQLPPAYTNSFTRGVYYPDKVFRSSVLHSTQDLFLPFFSNVTWFHAIHVSGTNGTKRFDNPVLPFNDGVYFASTEKSNIIRGWIFGTTLDSKTQSLLIVNNATNVVIKVCEFQFCNDPFLGVYYHKNNKSWMESEFRVYSSANNCTFEYVSQPFLMDLEGKQGNFKNLREFVFKNIDGYFKIYSKHTPINLVRDLPQGFSALEPLVDLPIGINITRFQTLLALHRSYLTPGDSSSGWTAGAAAYYVGYLQPRTFLLKYNENGTITDAVDCALDPLSETKCTLKSFTVEKGIYQTSNFRVQPTESIVRFPNITNLCPFGEVFNATRFASVYAWNRKRISNCVADYSVLYNSASFSTFKCYGVSPTKLNDLCFTNVYADSFVIRGDEVRQIAPGQTGKIADYNYKLPDDFTGCVIAWNSNNLDSKVGGNYNYLYRLFRKSNLKPFERDISTEIYQAGSTPCNGVEGFNCYFPLQSYGFQPTNGVGYQPYRVVVLSFELLHAPATVCGPKKSTNLVKNKCVNFNFNGLTGTGVLTESNKKFLPFQQFGRDIADTTDAVRDPQTLEILDITPCSFGGVSVITPGTNTSNQVAVLYQGVNCTEVPVAIHADQLTPTWRVYSTGSNVFQTRAGCLIGAEHVNNSYECDIPIGAGICASYQTQTNSPRRARSVASQSIIAYTMSLGAENSVAYSNNSCAIPTNFTISVTTEILPVSMTKTSVDCTMYICGDSTECSNLLLQYGSFCTQLNRALTGIAVEQDKNTQEVFAQVKQIYKTPPIKDFGGFNFSQILPDPSKPSKRSFIEDLLFNKVTLADVGFIKQYGDCLGDIAARDLICAQKFNGLTVLPPLLTDEMIAQYTSALLAGTITSGWTFGAGAALQIPFAMQMAYRFNGIGVTQNVLYENQKLIANQFNSAIGKIQDSLSSTASALGKLQDVVNQNAQALNTLVKQLSSNFGAISSVLNDILSRLDKVEAEVQIDRLITGRLQSLQTYVTQQLIRAAEIRASANLAATKMSECVLGQSKRVDFCGKGYHLMSFPQSAPHGVVFLHVTYVPAQEKNFTCAPAICHDGKAHFPREGVFVSNGTHWFVTQRNFYEPQIITTDNTFVSGNCDVVIGIVNNTVYDPLQPELDSFKEELDKYFKNHTSPDVDLGDISGINASVVNIQKEIDRLNEVAKNLNESLIDLQELGKYEQYIKWPWYIWLGFIAGLIAIVMVTIMLCCMTSCCSCLKGCCSCGSCCKFDEDDSEPVLKGVKLHYT

SEQ ID NO: 664 - protein, 1273 aa, Artificial Sequence
  SARS-CoV-2/Greece/16/2020__EPI_ISL_418265 spike protein (1-1273)(I712C_T1077C)
MFVFLVLLPLVSSQCVNLTTRTQLPPAYTNSFTRGVYYPDKVFRSSVLHSTQDLFLPFFSNVTWFHAIHVSGTNGTKRFDNPVLPFNDGVYFASTEKSNIIRGWIFGTTLDSKTQSLLIVNNATNVVIKVCEFQFCNDPFLGVYYHKNNKSWMESEFRVYSSANNCTFEYVSQPFLMDLEGKQGNFKNLREFVFKNVDGYFKIYSKHTPINLVRDLPQGFSALEPLVDLPIGINITRFQTLLALHRSYLTPGDSSSGWTAGAAAYYVGYLQPRTFLLKYNENGTITDAVDCALDPLSETKCTLKSFTVEKGIYQTSNFRVQPTESIVRFPNITNLCPFGEVFNATRFASVYAWNRKRISNCVADYSVLYNSASFSTFKCYGVSPTKLNDLCFTNVYADSFVIRGDEVRQIAPGQTGKIADYNYKLPDDFTGCVIAWNSNNLDSKVGGNYNYLYRLFRKSNLKPFERDISTEIYQAGSTPCNGVEGFNCYFPLQSYGFQPTNGVGYQPYRVVVLSFELLHAPATVCGPKKSTNLVKNKCVNFNFNGLTGTGVLTESNKKFLPFQQFGRDIADTTDAVRDPQTLEILDITPCSFGGVSVITPGTNTSNQVAVLYQDVNCTEVPVAIHADQLTPTWRVYSTGSNVFQTRAGCLIGAEHVNNSYECDIPIGAGICASYQTQTNSPRRARSVASQSIIAYTMSLGAENSVAYSNNSCAIPTNFTISVTTEILPVSMTKTSVDCTMYICGDSTECSNLLLQYGSFCTQLNRALTGIAVEQDKNTQEVFAQVKQIYKTPPIKDFGGFNFSQILPDPSKPSKRSFIEDLLFNKVTLADAGFIKQYGDCLGDIAARDLICAQKFNGLTVLPPLLTDEMIAQYTSALLAGTITSGWTFGAGAALQIPFAMQMAYRFNGIGVTQNVLYENQKLIANQFNSAIGKIQDSLSSTASALGKLQDVVNQNAQALNTLVKQLSSNFGAISSVLNDILSRLDKVEAEVQIDRLITGRLQSLQTYVTQQLIRAAEIRASANLAATKMSECVLGQSKRVDFCGKGYHLMSFPQSAPHGVVFLHVTYVPAQEKNFTCAPAICHDGKAHFPREGVFVSNGTHWFVTQRNFYEPQIITTDNTFVSGNCDVVIGIVNNTVYDPLQPELDSFKEELDKYFKNHTSPDVDLGDISGINASVVNIQKEIDRLNEVAKNLNESLIDLQELGKYEQYIKWPWYIWLGFIAGLIAIVMVTIMLCCMTSCCSCLKGCCSCGSCCKFDEDDSEPVLKGVKLHYT

SEQ ID NO: 665 - protein, 1273 aa, Artificial Sequence
  SARS-CoV-2/Iceland/319/2020__EPI_ISL_417648 spike protein (1-1273)(I712C_T1077C)
MFVFLVLLPLVSSQCVNLTTRTQLPPAYTNSFTRGVYYPDKVFRSSVLHSTQDLFLPFFSNVTWFHAIHVSGTNGTKRFDNPVLPFNDGVYFASTEKSNIIRGWIFGTTLDSKTQSLLIVNNATNVVIKVCEFQFCNDPFLGVYYHKNNKSWMESEFRVYSSANNCTFEYVSQPFLIDLEGKQGNFKNLREFVFKNIDGYFKIYSKHTPINLVRDLPQGFSALEPLVDLPIGINITRFQTLLALHRSYLTPGDSSSGWTAGAAAYYVGYLQPRTFLLKYNENGTITDAVDCALDPLSETKCTLKSFTVEKGIYQTSNFRVQPTESIVRFPNITNLCPFGEVFNATRFASVYAWNRKRISNCVADYSVLYNSASFSTFKCYGVSPTKLNDLCFTNVYADSFVIRGDEVRQIAPGQTGKIADYNYKLPDDFTGCVIAWNSNNLDSKVGGNYNYLYRLFRKSNLKPFERDISTEIYQAGSTPCNGVEGFNCYFPLQSYGFQPTNGVGYQPYRVVVLSFELLHAPATVCGPKKSTNLVKNKCVNFNFNGLTGTGVLTESNKKFLPFQQFGRDIADTTDAVRDPQTLEILDITPCSFGGVSVITPGTNTSNQVAVLYQGVNCTEVPVAIHADQLTPTWRVYSTGSNVFQTRAGCLIGAEHVNNSYECDIPIGAGICASYQTQTNSPRRARSVASQSIIAYTMSLGAENSVAYSNNSCAIPTNFTISVTTEILPVSMTKTSVDCTMYICGDSTECSNLLLQYGSFCTQLNRALTGIAVEQDKNTQEVFAQVKQIYKTPPIKDFGGFNFSQILPDPSKPSKRSFIEDLLFNKVTLADAGFIKQYGDCLGDIAARDLICAQKFNGLTVLPPLLTDEMIAQYTSALLAGTITSGWTFGAGAALQIPFAMQMAYRFNGIGVTQNVLYENQKLIANQFNSAIGKIQDSLSSTASALGKLQDVVNQNAQALNTLVKQLSSNFGAISSVLNDILSRLDKVEAEVQIDRLITGRLQSLQTYVTQQLIRAAEIRASANLAATKMSECVLGQSKRVDFCGKGYHLMSFPQSAPHGVVFLHVTYVPAQEKNFTCAPAICHDGKAHFPREGVFVSNGTHWFVTQRNFYEPQIITTDNTFVSGNCDVVIGIVNNTVYDPLQPELDSFKEELDKYFKNHTSPDVDLGDISGINASVVNIQKEIDRLNEVAKNLNESLIDLQELGKYEQYIKWPWYIWLGFIAGLIAIVMVTIMLCCMTSCCSCLKGCCSCGSCCKFDEDDSEPVLKGVKLHYT

SEQ ID NO: 666 - protein, 1273 aa, Artificial Sequence
  SARS-CoV-2/Congo/94/2020__EPI_ISL_417947 spike protein (1-1273)(I712C_T1077C)
MFVFLVLLPLVSSQCVNLTTRTQLPPAYTNSFTRGVYYPDKVFRSSVLHSTQDLFLPFFSNVTWFHAIHVSGTNGTKRFDNPVLPFNDGVYFASTEKSNIIRGWIFGTTLDSKTQSLLIVNNATNVVIKVCEFQFCNDPFLGVYYHKNNKSWMESEFRVYSSANNCTFEYVSQPFLMDLEGKQGNFKNLREFVFKNIDGYFKIYSKHTPINLVRDLPQGFSALEPLVDLPIGINITRFQTLLALHRSYLTPGDSSSGWTAGAAAYYVGYLQPRTFLLKYNENGTITDAVDCALDPLSETKCTLKSFTVEKGIYQTSNFRVQPTESIVRFPNITNLCPFGEVFNATRFASVYAWNRKRISNCVADYSVLYNSASFSTFKCYGVSPTKLNDLCFTNVYADSFVIRGDEVRQIAPGQTGKIADYNYKLPDDFTGCVIAWNSNNLDSKVGGNYNYLYRLFRKSNLKPFERDISTEIYQAGSTPCNGVEGFNCYFPLQSYGFQPTNGVGYQPYRVVVLSFELLHAPATVCGPKKSTNLVKNKCVNFNFNGLTGTGVLTESNKKFLPFQQFGRDIADTTDAVRDPQTLEILDITPCSFGGVSVITPGTNTSNQVAVLYQGVNCTEVPVAIHADQLTPTWRVYSTGSNVFQTRAGCLIGAEHVNNSYECDIPIGAGICASYQTQTNSPRRARSVASQSIIAYTMSLGAENSVAYSNNSCAIPTNFTISVTTEILPVSMTKTSVDCTMYICGDSTECSNLLLQYGSFCTQLNRALTGIAVEQDKNTQEVFAQVKQIYKTPPIKDFGGFNFSQILPDPSKPSKRSFIEDILFNKVTLADAGFIKQYGDCLGDIAARDLICAQKFNGLTVLPPLLTDEMIAQYTSALLAGTITSGWTFGAGAALQIPFAMQMAYRFNGIGVTQNVLYENQKLIANQFNSAIGKIQDSLSSTASALGKLQDVVNQNAQALNTLVKQLSSNFGAISSVLNDILSRLDKVEAEVQIDRLITGRLQSLQTYVTQQLIRAAEIRASANLAATKMSECVLGQSKRVDFCGKGYHLMSFPQSAPHGVVFLHVTYVPAQEKNFTCAPAICHDGKAHFPREGVFVSNGTHWFVTQRNFYEPQIITTDNTFVSGNCDVVIGIVNNTVYDPLQPELDSFKEELDKYFKNHTSPDVDLGDISGINASVVNIQKEIDRLNEVAKNLNESLIDLQELGKYEQYIKWPWYIWLGFIAGLIAIVMVTIMLCCMTSCCSCLKGCCSCGSCCKFDEDDSEPVLKGVKLHYT

SEQ ID NO: 667 - protein, 1273 aa, Artificial Sequence
  SARS-CoV-2/Congo/158/2020__EPI_ISL_417950 spike protein (1-1273)(I712C_T1077C)
MFVFLVLLPLVSSQCVNLTTRTQLPPAYTNSFTRGVYYPDKVFRSSVLHSTQDLFLPFFSNVTWFHAIHVSGTNGTKRFDNPVLPFNDGVYFASTEKSNIIRGWIFGTTLDSKTQSLLIVNNATNVVIKVCEFQFCNDPFLGVYYHKNNKSWMESEFRVYSSANNCTFEYVSQPFLMDLEGKQGNFKNLREFVFKNIDGYFKIYSKHTPINLVRDLPQGFSALEPLVDLPIGINITRFQTLLALHRSYLTPGDSSSGWTAGAAAYYVGYLQPRTFLLKYNENGTITDAVDCALDPLSETKCTLKSFTVEKGIYQTSNFRVQPTESIVRFPNITNLCPFGEVFNATRFASVYAWNRKRISNCVADYSVLYNSASFSTFKCYGVSPTKLNDLCFTNVYADSFVIRGDEVRQIAPGQTGKIADYNYKLPDDFTGCVIAWNSNNLDSKVGGNYNYLYRLFRKSNLKPFERDISTEIYQAGSTPCNGVEGFNCYFPLQSYGFQPTNGVGYQPYRVVVLSFELLHAPATVCGPKKSTNLVKNKCVNFNFNGLTGTGVLTESNKKFLPFQQFGRDIADTTDAVRDPQTLEILDITPCSFGGVSVITPGTNTSNQVAVLYQDVNCTEVPVAIHADQLTPTWRVYSTGSNVFQTRAGCLIGAEHVNNSYECDIPIGAGICASYQTQTNSPRRARSVASQSIIAYTMSLGAENSVAYSNNSCAIPTNFTISVTTEILPVSMTKTSVDCTMYICGDSTECSNLLLQYGSFCTQLNRALTGIAVEQDKNTQEVFAQVKQIYKTPPIKDFGGFNFSQILPDPSKPSKRSFIEDLLFNKVTLADAGFIKQYGDCLGDIAARDLICAQKFNGLTVLPPLLTDEMIAQYTSALLAGTITSGWTFGAGAALQIPFAMQMAYRFNGIGVTQNVLYENQKLIANQFNSAIGKIQDSLSSTASALGKLQDVVNQNAQALNTLVKQLSSNFGAISSVLNDILSRLDKVEAEVQIDRLITGRLQSLQTYVTQQLIRAAEIRASANLAATKMSECVLGQSKRVDFCGKGYHLMSFPQSAPHGVVFLHVTYVPAQEKNFTCAPAICHDGKAHFPREGVFVSNGTHWFVTQRNFYEPQIITTDNTFLSGNCDVVIGIVNNTVYDPLQPELDSFKEELDKYFKNHTSPDVDLGDISGINASVVNIQKEIDRLNEVAKNLNESLIDLQELGKYEQYIKWPWYIWLGFIAGLIAIVMVTIMLCCMTSCCSCLKGCCSCGSCCKFDEDDSEPVLKGVKLHYT

SEQ ID NO: 668 - protein, 1273 aa, Artificial Sequence
  SARS-CoV-2/USA/UT-00034/2020__EPI_ISL_417977 spike protein (1-1273)(I712C_T1077C)
MFVFLVLLPLVSSQCVNLTTRTQLPPAYTNSFTRGVYYPDKVFRSSVLHSTQDLFLPFFSNVTWFHAIHVSGTNGTKRFDNPVLPFNDGVYFASTEKSNIIRGWIFGTTLDSKTQSLLIVNNATNVVIKVCEFQFCNDPFLGVYYYKNNKSWMESEFRVYSSANNCTFEYVSQPFLMDLEGKQGNFKNLREFVFKNIDGYFKIYSKHTPINLVRDLPQGFSALEPLVDLPIGINITRFQTLLALHRSYLTPGDSSSGWTAGAAAYYVGYLQPRTFLLKYNENGTITDAVDCALDPLSETKCTLKSFTVEKGIYQTSNFRVQPTESIVRFPNITNLCPFGEVFNATRFASVYAWNRKRISNCVADYSVLYNSASFSTFKCYGVSPTKLNDLCFTNVYADSFVIRGDEVRQIAPGQTGKIADYNYKLPDDFTGCVIAWNSNNLDSKVGGNYNYLYRLFRKSNLKPFERDISTEIYQAGSTPCNGVEGFNCYFPLQSYGFQPTNGVGYQPYRVVVLSFELLHAPATVCGPKKSTNLVKNKCVNFNFNGLTGTGVLTESNKKFLPFQQFGRDIADTTDAVRDPQTLEILDITPCSFGGVSVITPGTNTSNQVAVLYQGVNCTEVPVAIHADQLTPTWRVYSTGSNVFQTRAGCLIGAEHVNNSYECDIPIGAGICASYQTQTNSPRRARSVASQSIIAYTMSLGAENSVAYSNNSCAIPTNFTISVTTEILPVSMTKTSVDCTMYICGDSTECSNLLLQYGSFCTQLNRALTGIAVEQDKNTQEVFAQVKQIYKTPPIKDFGGFNFSQILPDPSKPSKRSFIEDLLFNKVTLADAGFIKQYGDCLGDIAARDLICAQKFNGLTVLPPLLTDEMIAQYTSALLAGTITSGWTFGAGAALQIPFAMQMAYRFNGIGVTQNVLYENQKLIANQFNSAIGKIQDSLSSTASALGKLQDVVNQNAQALNTLVKQLSSNFGAISSVLNDILSRLDKVEAEVQIDRLITGRLQSLQTYVTQQLIRAAEIRASANLAATKMSECVLGQSKRVDFCGKGYHLMSFPQSAPHGVVFLHVTYVPAQEKNFTCAPAICHDGKAHFPREGVFVSNGTHWFVTQRNFYEPQIITTDNTFVSGNCDVVIGIVNNTVYDPLQPELDSFKEELDKYFKNHTSPDVDLGDISGINASVVNIQKEIDRLNEVAKNLNESLIDLQELGKYEQYIKWPWYIWLGFIAGLIAIVMVTIMLCCMTSCCSCLKGCCSCGSCCKFDEDDSEPVLKGVKLHYT

SEQ ID NO: 669 - protein, 1273 aa, Artificial Sequence
  SARS-CoV-2/USA/UT-00033/2020__EPI_ISL_417976 spike protein (1-1273)(I712C_T1077C)
MFVFLVLLPLVSSQCVNLTTRTQLPPAYTNSFTRGVYYPDKVFRSSVLHSTQDLFLPFFSNVTWFHAIHVSGTNGTKRFDNPVLPFNDGVYFASTEKSNIIRGWIFGTTLDSKTQSLLIVNNATNVVIKVCEFQFCNDPFLGVYYHKNNKSWMESEFRVYSSANNCTFEYVSQPFLMDLEGKQGNFKNLREFVFKNIDGYFKIYSKHTPINLVRDLPQGFSALEPLVDLPIGINITRFQTLLALHRSYLTPGDSSSGLTAGAAAYYVGYLQPRTFLLKYNENGTITDAVDCALDPLSETKCTLKSFTVEKGIYQTSNFRVQPTESIVRFPNITNLCPFGEVFNATRFASVYAWNRKRISNCVADYSVLYNSASFSTFKCYGVSPTKLNDLCFTNVYADSFVIRGDEVRQIAPGQTGKIADYNYKLPDDFTGCVIAWNSNNLDSKVGGNYNYLYRLFRKSNLKPFERDISTEIYQAGSTPCNGVEGFNCYFPLQSYGFQPTNGVGYQPYRVVVLSFELLHAPATVCGPKKSTNLVKNKCVNFNFNGLTGTGVLTESNKKFLPFQQFGRDIADTTDAVRDPQTLEILDITPCSFGGVSVITPGTNTSNQVAVLYQGVNCTEVPVAIHADQLTPTWRVYSTGSNVFQTRAGCLIGAEHVNNSYECDIPIGAGICASYQTQTNSPRRARSVASQSIIAYTMSLGAENSVAYSNNSCAIPTNFTISVTTEILPVSMTKTSVDCTMYICGDSTECSNLLLQYGSFCTQLNRALTGIAVEQDKNTQEVFAQVKQIYKTPPIKDFGGFNFSQILPDPSKPSKRSFIEDLLFNKVTLADAGFIKQYGDCLGDIAARDLICAQKFNGLTVLPPLLTDEMIAQYTSALLAGTITSGWTFGAGAALQIPFAMQMAYRFNGIGVTQNVLYENQKLIANQFNSAIGKIQDSLSSTASALGKLQDVVNQNAQALNTLVKQLSSNFGAISSVLNDILSRLDKVEAEVQIDRLITGRLQSLQTYVTQQLIRAAEIRASANLAATKMSECVLGQSKRVDFCGKGYHLMSFPQSAPHGVVFLHVTYVPAQEKNFTCAPAICHDGKAHFPREGVFVSNGTHWFVTQRNFYEPQIITTDNTFVSGNCDVVIGIVNNTVYDPLQPELDSFKEELDKYFKNHTSPDVDLGDISGINASVVNIQKEIDRLNEVAKNLNESLIDLQELGKYEQYIKWPWYIWLGFIAGLIAIVMVTIMLCCMTSCCSCLKGCCSCGSCCKFDEDDSEPVLKGVKLHYT

SEQ ID NO: 670 - protein, 1273 aa, Artificial Sequence
  SARS-CoV-2/USA/WI-13/2020__EPI_ISL_417516 spike protein (1-1273)(I712C_T1077C)
MFVFLVLLPLVSSQCVNLTTRTQLPPAYTNSFTRGVYYPDKVFRSSVLHSTQDLFLPFFSNVTWFHAIHVSGTNGTKRFDNPVLPFNDGVYFASTEKSNIIRGWIFGTTLDSKTQSLLIVNNATNVVIKVCEFQFCNDPFLGVYYHKNNKSWMESEFRVYSSANNCTFEYVSQPFLMDLEGKQGNFKNLREFVFKNIDGYFKIYSKHTPINLVRDLPQGFSALEPLVDLPIGINITRFQTLLALHRSYLTPGDSSSGWTAGAAAYYVGYLQPRTFLLKYNENGTITDAVDCALDPLSETKCTLKSFTVEKGIYQTSNFRVLPTESIVRFPNITNLCPFGEVFNATRFASVYAWNRKRISNCVADYSVLYNSASFSTFKCYGVSPTKLNDLCFTNVYADSFVIRGDEVRQIAPGQTGKIADYNYKLPDDFTGCVIAWNSNNLDSKVGGNYNYLYRLFRKSNLKPFERDISTEIYQAGSTPCNGVEGFNCYFPLQSYGFQPTNGVGYQPYRVVVLSFELLHAPATVCGPKKSTNLVKNKCVNFNFNGLTGTGVLTESNKKFLPFQQFGRDIADTTDAVRDPQTLEILDITPCSFGGVSVITPGTNTSNQVAVLYQGVNCTEVPVAIHADQLTPTWRVYSTGSNVFQTRAGCLIGAEHVNNSYECDIPIGAGICASYQTQTNSPRRARSVASQSIIAYTMSLGAENSVAYSNNSCAIPTNFTISVTTEILPVSMTKTSVDCTMYICGDSTECSNLLLQYGSFCTQLNRALTGIAVEQDKNTQEVFAQVKQIYKTPPIKDFGGFNFSQILPDPSKPSKRSFIEDLLFNKVTLADAGFIKQYGDCLGDIAARDLICAQKFNGLTVLPPLLTDEMIAQYTSALLAGTITSGWTFGAGAALQIPFAMQMAYRFNGIGVTQNVLYENQKLIANQFNSAIGKIQDSLSSTASALGKLQDVVNQNAQALNTLVKQLSSNFGAISSVLNDILSRLDKVEAEVQIDRLITGRLQSLQTYVTQQLIRAAEIRASANLAATKMSECVLGQSKRVDFCGKGYHLMSFPQSAPHGVVFLHVTYVPAQEKNFTCAPAICHDGKAHFPREGVFVSNGTHWFVTQRNFYEPQIITTDNTFVSGNCDVVIGIVNNTVYDPLQPELDSFKEELDKYFKNHTSPDVDLGDISGINASVVNIQKEIDRLNEVAKNLNESLIDLQELGKYEQYIKWPWYIWLGFIAGLIAIVMVTIMLCCMTSCCSCLKGCCSCGSCCKFDEDDSEPVLKGVKLHYT

SEQ ID NO: 671 - protein, 1272 aa, Artificial Sequence
  SARS-CoV-2/India/1-27/2020__EPI_ISL_413522 spike protein (1-1272)(I711C_T1076C)
MFVFLVLLPLVSSQCVNLTTRTQLPPAYTNSFTRGVYYPDKVFRSSVLHSTQDLFLPFFSNVTWFHAIHVSGTNGTKRFDNPVLPFNDGVYFASTEKSNIIRGWIFGTTLDSKTQSLLIVNNATNVVIKVCEFQFCNDPFLGVYHKNNKSWMESEFRVYSSANNCTFEYVSQPFLMDLEGKQGNFKNLREFVFKNIDGYFKIYSKHTPINLVRDLPQGFSALEPLVDLPIGINITRFQTLLALHRSYLTPGDSSSGWTAGAAAYYVGYLQPRTFLLKYNENGTITDAVDCALDPLSETKCTLKSFTVEKGIYQTSNFRVQPTESIVRFPNITNLCPFGEVFNATRFASVYAWNRKRISNCVADYSVLYNSASFSTFKCYGVSPTKLNDLCFTNVYADSFVIRGDEVIQIAPGQTGKIADYNYKLPDDFTGCVIAWNSNNLDSKVGGNYNYLYRLFRKSNLKPFERDISTEIYQAGSTPCNGVEGFNCYFPLQSYGFQPTNGVGYQPYRVVVLSFELLHAPATVCGPKKSTNLVKNKCVNFNFNGLTGTGVLTESNKKFLPFQQFGRDIADTTDAVRDPQTLEILDITPCSFGGVSVITPGTNTSNQVAVLYQDVNCTEVPVAIHADQLTPTWRVYSTGSNVFQTRAGCLIGAEHVNNSYECDIPIGAGICASYQTQTNSPRRARSVASQSIIAYTMSLGAENSVAYSNNSCAIPTNFTISVTTEILPVSMTKTSVDCTMYICGDSTECSNLLLQYGSFCTQLNRALTGIAVEQDKNTQEVFAQVKQIYKTPPIKDFGGFNFSQILPDPSKPSKRSFIEDLLFNKVTLADAGFIKQYGDCLGDIAARDLICAQKFNGLTVLPPLLTDEMIAQYTSALLAGTITSGWTFGAGAALQIPFAMQMAYRFNGIGVTQNVLYENQKLIANQFNSAIGKIQDSLSSTASALGKLQDVVNQNAQALNTLVKQLSSNFGAISSVLNDILSRLDKVEAEVQIDRLITGRLQSLQTYVTQQLIRAAEIRASANLAATKMSECVLGQSKRVDFCGKGYHLMSFPQSAPHGVVFLHVTYVPAQEKNFTCAPAICHDGKAHFPREGVFVSNGTHWFVTQRNFYEPQIITTDNTFVSGNCDVVIGIVNNTVYDPLQPELDSFKEELDKYFKNHTSPDVDLGDISGINASVVNIQKEIDRLNEVAKNLNESLIDLQELGKYEQYIKWPWYIWLGFIAGLIAIVMVTIMLCCMTSCCSCLKGCCSCGSCCKFDEDDSEPVLKGVKLHYT

SEQ ID NO: 672 - protein, 1267 aa, Artificial Sequence
  SARS-CoV-2/pangolin/Guangxi/P4L/2017__EPI_ISL_410538 spike protein (1-1267)(I706C_T1071C)
MFVFLFVLPLVSSQCVNLTTRTGIPPGYTNSSTRGVYYPDKVFRSSILHLTQDLFLPFFSNVTWFNTINYQGGFKKFDNPVLPFNDGVYFASTEKSNIIRGWIFGTTLDARTQSLLIVNNATNVVIKVCEFQFCTDPFLGVYYHNNNKTWVENEFRVYSSANNCTFEYISQPFLMDLEGKQGNFKNLREFVFKNVDGYFKIYSKHTPIDLVRDLPRGFAALEPLVDLPIGINITRFQTLLALHRSYLTPGNLESGWTTGAAAYYVGYLQQRTFLLSYNQNGTITDAVDCSLDPLSETKCTLKSLTVEKGIYQTSNFRVQPTISIVRFPNITNLCPFGEVFNASKFASVYAWNRKRISNCVADYSVLYNSTSFSTFKCYGVSPTKLNDLCFTNVYADSFVVKGDEVRQIAPGQTGVIADYNYKLPDDFTGCVIAWNSVKQDALTGGNYGYLYRLFRKSKLKPFERDISTEIYQAGSTPCNGQVGLNCYYPLERYGFHPTTGVNYQPFRVVVLSFELLNGPATVCGPKLSTTLVKDKCVNFNFNGLTGTGVLTTSKKQFLPFQQFGRDISDTTDAVRDPQTLEILDITPCSFGGVSVITPGTNTSNQVAVLYQDVNCTEVPMAIHAEQLTPAWRVYSAGANVFQTRAGCLVGAEHVNNSYECDIPVGAGICASYHSMSSLRSVNQRSIIAYTMSLGAENSVAYSNNSCAIPTNFTISVTTEILPVSMTKTSVDCTMYICGDSIECSNLLLQYGSFCTQLNRALTGIAVEQDKNTQEVFAQVKQIYKTPPIKDFGGFNFSQILPDPSKPSKRSFIEDLLFNKVTLADAGFIKQYGDCLGDIAARDLICAQKFNGLTVLPPLLTDEMIAQYTSALLAGTITSGWTFGAGAALQIPFAMQMAYRFNGIGVTQNVLYENQKLIANQFNSAIGKIQDSLSSTASALGKLQDVVNQNAQALNTLVKQLSSNFGAISSVLNDILSRLDKVEAEVQIDRLITGRLQSLQTYVTQQLIRAAEIRASANLAATKMSECVLGQSKRVDFCGKGYHLMSFPQSAPHGVVFLHVTYVPAQEKNFTCAPAICHEGKAHFPREGVFVSNGTHWFITQRNFYEPQIITTDNTFVSGSCDVVIGIVNNTVYDPLQPELDSFKEELDKYFKNHTSPDVDLGDISGINASVVNIQKEIDRLNEVAKNLNESPIDLQELGKYEQYIKWPWYIWLGFIAGLIAIIMVTIMLCCMTSCCSCLKGCCSCGSCCKFDEDDSEPVLKGVKLHYT

SEQ ID NO: 673 - protein, 1267 aa, Artificial Sequence
  SARS-CoV-2/pangolin/Guangxi/P5L/2017__EPI_ISL_410540 spike protein (1-1267)(I706C_T1071C)
MFVFLFVLPLVSSQCVNLTTRTGIPPGYTNSSTRGVYYPDKVFRSSILHLTQDLFLPFFSNVTWFNTINYQGGFKKFDNPVLPFNDGVYFASTEKSNIIRGWIFGTTLDARTQSLLIVNNATNVVIKVCEFQFCTDPFLGVYYHNNNKTWVENEFRVYSSANNCTFEYISQPFLMDLEGKQGNFKNLREFVFKNVDGYFKIYSKHTPIDLVRDLPRGFAALEPLVDLPIGINITRFQTLLALHRSYLTPGKLESGWTTGAAAYYVGYLQQRTFLLSYNQNGTITDAVDCSLDPLSETKCTLKSLTVEKGIYQTSNFRVQPTISIVRFPNITNLCPFGEVFNASKFASVYAWNRKRISNCVADYSVLYNSTSFSTFKCYGVSPTKLNDLCFTNVYADSFVVKGDEVRQIAPGQTGVIADYNYKLPDDFTGCVIAWNSVKQDALTGGNYGYLYRLFRKSKLKPFERDISTEIYQAGSTPCNGQVGLNCYYPLERYGFHPTTGVNYQPFRVVVLSFELLNGPATVCGPKLSTTLVKDKCVNFNFNGLTGTGVLTTSKKQFLPFQQFGRDISDTTDAVRDPQTLEILDITPCSFGGVSVITPGTNTSNQVAVLYQDVNCTEVPMAIHAEQLTPAWRVYSAGANVFQTRAGCLVGAEHVNNSYECDIPVGAGICASYHSMSSFRSVNQRSIIAYTMSLGAENSVAYSNNSCAIPTNFTISVTTEILPVSMTKTSVDCTMYICGDSIECSNLLLQYGSFCTQLNRALTGIAVEQDKNTQEVFAQVKQIYKTPPIKDFGGFNFSQILPDPSKPSKRSFIEDLLFNKVTLADAGFIKQYGDCLGDIAARDLICAQKFNGLTVLPPLLTDEMIAQYTSALLAGTITSGWTFGAGAALQIPFAMQMAYRFNGIGVTQNVLYENQKLIANQFNSAIGKIQDSLSSTASALGKLQDVVNQNAQALNTLVKQLSSNFGAISSVLNDILSRLDKVEAEVQIDRLITGRLQSLQTYVTQQLIRAAEIRASANLAATKMSECVLGQSKRVDFCGKGYHLMSFPQSAPHGVVFLHVTYVPAQEKNFTCAPAICHEGKAHFPREGVFVSNGTHWFITQRNFYEPQIITTDNTFVSGSCDVVIGIVNNTVYDPLQPELDSFKEELDKYFKNHTSPDVDLGDISGINASVVNIQKEIDRLNEVAKNLNESLIDLQELGKYEQYIKWPWYIWLGFIAGLIAIIMVTIMLCCMTSCCSCLKGCCSCGSCCKFDEDDSEPVLKGVKLHYT

SEQ ID NO: 674 - protein, 1267 aa, Artificial Sequence
  SARS-CoV-2/pangolin/Guangxi/P5E/2017__EPI_ISL_410541 spike protein (1-1267)(I706C_T1071C)
MFVFLFVLPLVSSQCVNLTTRTGIPPGYTNSSTRGVYYPDKVFRSSILHLTQDLFLPFFSNVTWFNTITYQGGSKKFDNPVLPFNDGVYFASTEKSNIIRGWIFGTTLDARTQSLLIVNNATNVVIKVCEFQFCTDPFLGVYYHNNNKTWVENEFRVYSSANNCTFEYISQPFLMDLEGKQGNFKNLREFVFKNVDGYFKIYSKHTPIDLVRDLPRGFAALEPLVDLPIGINITRFQTLLALHRSYLTPGKLESGWTTGAAAYYVGYLQQRTFLLSYNQNGTITDAVDCSLDPLSETKCTLKSLTVEKGIYQTSNFRVQPTISIVRFPNITNLCPFGEVFNASKFASVYAWNRKRISNCVADYSVLYNSTSFSTFKCYGVSPTKLNDLCFTNVYADSFVVKGDEVRQIAPGQTGVIADYNYKLPDDFTGCVIAWNSVKQDALTGDNYGYLYRLFRKSKLKPFERDISTEIYQAGSTPCNGQVGLNCYYPLERYGFHPTTGVNYQPFRVVVLSFELLNGPATVCGPKLSTTLVKDKCVNFNFNGLTGTGVLTTSKKQFLPFQQFGRDISDTTDAVRDPQTLEILDITPCSFGGVSVITPGTNTSNQVAVLYQDVNCTEVPMAIHAEQLTPAWRVYSAGANVFQTRAGCLVGAEHVNNSYECDIPVGAGICASYHSMSSFRSVNQRSIIAYTMSLGAENSVAYSNNSCAIPTNFTISVTTEILPVSMTKTSVDCTMYICGDSIECSNLLLQYGSFCTQLNRALTGIAVEQDKNTQEVFAQVKQIYKTPPIKDFGGFNFSQILPDPSKPSKRSFIEDLLFNKVTLADAGFIKQYGDCLGDIAARDLICAQKFNGLTVLPPLLTDEMIAQYTSALLAGTITSGWTFGAGAALQIPFAMQMAYRFNGIGVTQNVLYENQKLIANQFNSAIGKIQDSLSSTASALGKLQDVVNQNAQALNTLVKQLSSNFGAISSVLNDILSRLDKVEAEVQIDRLITGRLQSLQTYVTQQLIRAAEIRASANLAATKMSECVLGQSKRVDFCGKGYHLMSFPQSAPHGVVFLHVTYVPAQEKNFTCAPAICHEGKAHFPREGVFVSNGTHWFITQRNFYEPQIITTDNTFVSGSCDVVIGIVNNTVYDPLQPELDSFKEELDKYFKNHTSPDVDLGDISGINASVVNIQKEIDRLNEVAKNLNESLIDLQELGKYEQYIKWPWYIWLGFIAGLIAIIMVTIMLCCMTSCCSCLKGCCSCGSCCKFDEDDSEPVLKGVKLHYT

SEQ ID NO: 675 - protein, 1265 aa, Artificial Sequence
  SARS-CoV-2/pangolin/Guangxi/P1E/2017__EPI_ISL_410539 spike protein (1-1265)(I704C_T1069C)
MFVFLFVLPLVSSQCVNLTTRTGIQPGYTNSSTRGVYYPDKVFRSSILHLTQDLFLPFFSNVTWFNTINYQGGFKKFDNPVLPFNDGVYFASTEKSNIIRGWIFGTTLDARTQSLLIVNNATNVVIKVCEFQFCTDPFLGVYYHNNNKTWVENEFRVYSSANNCTFEYISQPFLMDLEGKQGNFKNLREFVFKNVDGYFKIYSKHTPIDLVRDLPRGFAALEPLVDLPIGINITRFQTLLALHRSYLTPGKLESGWTTGAAAYYVGYLQQRTFLLSYNQNGTITDAVDCSLDPLSETKCTLKSLTVEKGIYQTSNFRVQPTISIVRFPNITNLCPFGEVFNASKFASVYAWNRKRISNCVADYSVLYNSTSFSTFKCYGVSPTKLNDLCFTNVYADSFVVKGDEVRQIAPGQTGVIADYNYKLPDDFTGCVIAWNSVKQDALTGGNYLYRLFRKSKLKPFERDISTEIYQAGSTPCNGQVGLNCYYPLERYGFHPTTGVNYQPFRVVVLSFELLNGPATVCGPKLSTTLVKDKCVNFNFNGLTGTGVLTTSKKQFLPFQQFGRDISDTTDAVRDPQTLEILDITPCSFGGVSVITPGTNTSNQVAVLYQDVNCTEVPMAIHAEQLTPAWRVYSAGANVFQTRAGCLVGAEHVNNSYECDIPVGAGICASYHSMSSLRSVNQRSIIAYTMSLGAENSVAYSNNSCAIPTNFTISVTTEILPVSMTKTSVDCTMYICGDSIECSNLLLQYGSFCTQLNRALTGIAVEQDKNTQEVFAQVKQIYKTPPIKDFGGFNFSQILPDPSKPSKRSFIEDLLFNKVTLADAGFIKQYGDCLGDIAARDLICAQKFNGLTVLPPLLTDEMIAQYTSALLAGTITSGWTFGAGAALQIPFAMQMAYRFNGIGVTQNVLYENQKLIANQFNSAIGKIQDSLSSTASALGKLQDVVNQNAQALNTLVKQLSSNFGAISSVLNDILSRLDKVEAEVQIDRLITGRLQSLQTYVTQQLIRAAEIRASANLAATKMSECVLGQSKRVDFCGKGYHLMSFPQSAPHGVVFLHVTYVPAQEKNFTCAPAICHEGKAHFPREGVFVSNGTHWFITQRNFYEPQIITTDNTFVSGSCDVVIGIVNNTVYDPLQPELDSFKEELDKYFKNHTSPDVDLGDISGINASVVNIQKEIDRLNEVAKNLNESLIDLQELGKYEQYIKWPWYIWLGFIAGLIAIIMVTIMLCCMTSCCSCLKGCCSCGSCCKFDEDDSEPVLKGVKLHYT

SEQ ID NO: 676 - protein, 1273 aa, Artificial Sequence; identical to SEQ ID NO: 20
  SARS-CoV-2/Wuhan/WIV05/2019__EPI_ISL_402128 spike protein (1-1273)(I714C_Y1110C)

SEQ ID NO: 677 - protein, 1269 aa, Artificial Sequence
  SARS-CoV-2/bat/Yunnan/RaTG13/2013__EPI_ISL_402131 spike protein (1-1269)(I710C_Y1106C)
MFVFLVLLPLVSSQCVNLTTRTQLPPAYTNSSTRGVYYPDKVFRSSVLHLTQDLFLPFFSNVTWFHAIHVSGTNGIKRFDNPVLPFNDGVYFASTEKSNIIRGWIFGTTLDSKTQSLLIVNNATNVVIKVCEFQFCNDPFLGVYYHKNNKSWMESEFRVYSSANNCTFEYVSQPFLMDLEGKQGNFKNLREFVFKNIDGYFKIYSKHTPINLVRDLPPGFSALEPLVDLPIGINITRFQTLLALHRSYLTPGDSSSGWTAGAAAYYVGYLQPRTFLLKYNENGTITDAVDCALDPLSETKCTLKSFTVEKGIYQTSNFRVQPTDSIVRFPNITNLCPFGEVFNATTFASVYAWNRKRISNCVADYSVLYNSTSFSTFKCYGVSPTKLNDLCFTNVYADSFVITGDEVRQIAPGQTGKIADYNYKLPDDFTGCVIAWNSKHIDAKEGGNFNYLYRLFRKANLKPFERDISTEIYQAGSKPCNGQTGLNCYYPLYRYGFYPTDGVGHQPYRVVVLSFELLNAPATVCGPKKSTNLVKNKCVNFNFNGLTGTGVLTESNKKFLPFQQFGRDIADTTDAVRDPQTLEILDITPCSFGGVSVITPGTNASNQVAVLYQDVNCTEVPVAIHADQLTPTWRVYSTGSNVFQTRAGCLIGAEHVNNSYECDIPIGAGICASYQTQTNSRSVASQSIIAYTMSLGAENSVAYSNNSIACPTNFTISVTTEILPVSMTKTSVDCTMYICGDSTECSNLLLQYGSFCTQLNRALTGIAVEQDKNTQEVFAQVKQIYKTPPIKDFGGFNFSQILPDPSKPSKRSFIEDLLFNKVTLADAGFIKQYGDCLGDIAARDLICAQKFNGLTVLPPLLTDEMIAQYTSALLAGTITSGWTFGAGAALQIPFAMQMAYRFNGIGVTQNVLYENQKLIANQFNSAIGKIQDSLSSTASALGKLQDVVNQNAQALNTLVKQLSSNFGAISSVLNDILSRLDKVEAEVQIDRLITGRLQSLQTYVTQQLIRAAEIRASANLAATKMSECVLGQSKRVDFCGKGYHLMSFPQSAPHGVVFLHVTYVPAQEKNFTTAPAICHDGKAHFPREGVFVSNGTHWFVTQRNFCEPQIITTDNTFVSGSCDVVIGIVNNTVYDPLQPELDSFKEELDKYFKNHTSPDVDLGDISGINASVVNIQKEIDRLNEVAKNLNESLIDLQELGKYEQYIKWPWYIWLGFIAGLIAIIMVTIMLCCMTSCCSCLKGCCSCGSCCKFDEDDSEPVLKGVKLHYT

SEQ ID NO: 678 - protein, 1273 aa, Artificial Sequence
  SARS-CoV-2/Wuhan/HBCDC-HB-01/2019__EPI_ISL_402132 spike protein (1-1273)(I714C_Y1110C)
MFVFLVLLPLVSSQCVNLTTRTQLPPAYTNSITRGVYYPDKVFRSSVLHSTQDLFLPFFSNVTWFHAIHVSGTNGTKRFDNPVLPFNDGVYFASTEKSNIIRGWIFGTTLDSKTQSLLIVNNATNVVIKVCEFQFCNDPFLGVYYHKNNKSWMESEFRVYSSANNCTFEYVSQPFLMDLEGKQGNFKNLREFVFKNIDGYFKIYSKHTPINLVRDLPQGFSALEPLVDLPIGINITRFQTLLALHRSYLTPGDSSSGWTAGAAAYYVGYLQPRTFLLKYNENGTITDAVDCALDPLSETKCTLKSFTVEKGIYQTSNFRVQPTESIVRFPNITNLCPFGEVFNATRFASVYAWNRKRISNCVADYSVLYNSASFSTFKCYGVSPTKLNDLCFTNVYADSFVIRGDEVRQIAPGQTGKIADYNYKLPDDFTGCVIAWNSNNLDSKVGGNYNYLYRLFRKSNLKPFERDISTEIYQAGSTPCNGVEGFNCYFPLQSYGFQPTNGVGYQPYRVVVLSFELLHAPATVCGPKKSTNLVKNKCVNFNFNGLTGTGVLTESNKKFLPFQQFGRDIADTTDAVRDPQTLEILDITPCSFGGVSVITPGTNTSNQVAVLYQDVNCTEVPVAIHADQLTPTWRVYSTGSNVFQTRAGCLIGAEHVNNSYECDIPIGAGICASYQTQTNSPRRARSVASQSIIAYTMSLGAENSVAYSNNSIACPTNFTISVTTEILPVSMTKTSVDCTMYICGDSTECSNLLLQYGSFCTQLNRALTGIAVEQDKNTQEVFAQVKQIYKTPPIKDFGGFNFSQILPDPSKPSKRSFIEDLLFNKVTLADAGFIKQYGDCLGDIAARDLICAQKFNGLTVLPPLLTDEMIAQYTSALLAGTITSGWTFGAGAALQIPFAMQMAYRFNGIGVTQNVLYENQKLIANQFNSAIGKIQDSLSSTASALGKLQDVVNQNAQALNTLVKQLSSNFGAISSVLNDILSRLDKVEAEVQIDRLITGRLQSLQTYVTQQLIRAAEIRASANLAATKMSECVLGQSKRVDFCGKGYHLMSFPQSAPHGVVFLHVTYVPAQEKNFTTAPAICHDGKAHFPREGVFVSNGTHWFVTQRNFCEPQIITTDNTFVSGNCDVVIGIVNNTVYDPLQPELDSFKEELDKYFKNHTSPDVDLGDISGINASVVNIQKEIDRLNEVAKNLNESLIDLQELGKYEQYIKWPWYIWLGFIAGLIAIVMVTIMLCCMTSCCSCLKGCCSCGSCCKFDEDDSEPVLKGVKLHYT

SEQ ID NO: 679 - protein, 1273 aa, Artificial Sequence
  SARS-CoV-2/Guangdong/20SF028/2020__EPI_ISL_403936 spike protein (1-1273)(I714C_Y1110C)
MFVFLVLLPLVSSQCVNLTTRTQLPPAYTNSFTRGVYYPDKVFRSSVLYSTQDLFLPFFSNVTWFHAIHVSGTNGTKRFDNPVLPFNDGVYFASTEKSNIIRGWIFGTTLDSKTQSLLIVNNATNVVIKVCEFQFCNDPFLGVYYHKNNKSWMESEFRVYSSANNCTFEYVSQPFLMDLEGKQGNFKNLREFVFKNIDGYFKIYSKHTPINLVRDLPQGFSALEPLVDLPIGINITRFQTLLALHRSYLTPGDSSSGWTAGAAAYYVGYLQPRTFLLKYNENGTITDAVDCALDPLSETKCTLKSFTVEKGIYQTSNFRVQPTESIVRFPNITNLCPFGEVFNATRFASVYAWNRKRISNCVADYSVLYNSASFSTFKCYGVSPTKLNDLCFTNVYADSFVIRGDEVRQIAPGQTGKIADYNYKLPDDFTGCVIAWNSNNLDSKVGGNYNYLYRLFRKSNLKPFERDISTEIYQAGSTPCNGVEGFNCYFPLQSYGFQPTNGVGYQPYRVVVLSFELLHAPATVCGPKKSTNLVKNKCVNFNFNGLTGTGVLTESNKKFLPFQQFGRDIADTTDAVRDPQTLEILDITPCSFGGVSVITPGTNTSNQVAVLYQDVNCTEVPVAIHADQLTPTWRVYSTGSNVFQTRAGCLIGAEHVNNSYECDIPIGAGICASYQTQTNSPRRARSVASQSIIAYTMSLGAENSVAYSNNSIACPTNFTISVTTEILPVSMTKTSVDCTMYICGDSTECSNLLLQYGSFCTQLNRALTGIAVEQDKNTQEVFAQVKQIYKTPPIKDFGGFNFSQILPDPSKPSKRSFIEDLLFNKVTLADAGFIKQYGDCLGDIAARDLICAQKFNGLTVLPPLLTDEMIAQYTSALLAGTITSGWTFGAGAALQIPFAMQMAYRFNGIGVTQNVLYENQKLIANQFNSAIGKIQDSLSSTASALGKLQDVVNQNAQALNTLVKQLSSNFGAISSVLNDILSRLDKVEAEVQIDRLITGRLQSLQTYVTQQLIRAAEIRASANLAATKMSECVLGQSKRVDFCGKGYHLMSFPQSAPHGVVFLHVTYVPAQEKNFTTAPAICHDGKAHFPREGVFVSNGTHWFVTQRNFCEPQIITTDNTFVSGNCDVVIGIVNNTVYDPLQPELDSFKEELDKYFKNHTSPDVDLGDISGINASVVNIQKEIDRLNEVAKNLNESLIDLQELGKYEQYIKWPWYIWLGFIAGLIAIVMVTIMLCCMTSCCSCLKGCCSCGSCCKFDEDDSEPVLKGVKLHYT

SEQ ID NO: 680 - protein, 1273 aa, Artificial Sequence
  SARS-CoV-2/Shenzhen/SZTH-001/2020__EPI_ISL_406592 spike protein (1-1273)(I714C_Y1110C)
MFVFLVLLPLVSSQCVNLTTRTQLPPAYTNSFTRGVYYPDKVFRSSVLHSTQDLFLPFFSNVTWFHAIHVSGTNGTKRFDNPVLPFNDGVYFASTEKSNIIRGWIFGTTLDSKTQSLLIVNNATNVVIKVCEFQFCNDPFLGVYYHKNNKSWMESEFRVYSSANNCTFEYVSQPFLMDLEGKQGNFKNLREFVFKNIDGYFKIYSKHTPINLVRDLPQGFSALEPLVDLPIGINITRFQTLLALHRSYLTPGDSSSGWTAGAAAYYVGYLQPRTFLLKYNENGTITDAVDCALDPLSETKCTLKSFTVEKGIYQTSNFRVQPTESIVRFPNITNLCPFGEVFNATRFASVYAWNRKRISNCVADYSVLYNSASFSTFKCYGVSPTKLNDLCFTNVYADSFVIRGDEVRQIAPGQTGKIADYNYKLPDDFTGCVIAWNSNNLDSKVGGNYNYLYRLFRKSNLKPFERDISTEIYQAGSTPCNGVEGFNCYFPLQSYGFQPTNGVGYQPYRVVVLSFELLHAPATVCGPKKSTNLVKNKCVNFNFNGLTGTGVLTESNKKFLPFQQFGRDIADTTDAVRDPQTLEILDITPCSFGGVSVITPGTNTSNQVAVLYQDVNCTEVPVAIHADQLTPTWRVYSTGSNVFQTRAGCLIGAEHVNNSYECDIPIGAGICASYQTQTNSPRRARSVASQSIIAYTMSLGAENSVAYSNNSIACPTNFTISVTTEILPVSMTKTSVDCTMYICGDSTECSNLLLQYGSFCTQLNRALTGIAVEQDKNTQEVFAQVKQIYKTPPIKDFGGFNFSQILPDPSKPSKRSFIEDLLFNKVTLADAGFIKQYGDCLGDIAARDLICAQKFNGLTVLPPLLTDEMIAQYTSALLAGTITSGWTFGAGAALQIPFAMQMAYRFNGIGVTQNVLYENQKLIANQFNSAIGKIQDSLSSTASALGKLQDVVNQNAQALNTLVKQLSSNFGAISSVLNDILSRLDKVEAEVQIDRLITGRLQSLQTYVTQQLIRAAEIRASANLAATKMSECVLGQSKRVDFCGKGYHLMSFPQSAPHGVVFLHVTYVPAQEKNFTTAPAICHDGKAHFPREGVFVSNGTHWFVTQRNFCEPQIITTDNTFVSGNCDVLIGIVNNTVYDPLQPELDSFKEELDKYFKNHTSPDVDLGDISGINASVVNIQKEIDRLNEVAKNLNESLIDLQELGKYEQYIKWPWYIWLGFIAGLIAIVMVTIMLCCMTSCCSCLKGCCSCGSCCKFDEDDSGPVLKGVKLHYT

SEQ ID NO: 681 - protein, 1273 aa, Artificial Sequence
  SARS-CoV-2/Shenzhen/SZTH-004/2020__EPI_ISL_406595 spike protein (1-1273)(I714C_Y1110C)
MFVFLVLLPLVSSQCVNLTTRTQLPPAYTNSFTRGVYYPDKVFRSSVLHSTQDLFLPFFSNVTWFHAIHVSGTNGTKRFDNPVLPFNDGVYFASTEKSNIIRGWIFGTTLDSKTQSLLIVNNATNVVIKVCEFQFCNDPFLGVYYHKNNKSWMESEFRVYSSANNCTFEYVSQPFLMDLEGKQGNFKNLREFVFKNIDGYFKIYSKHTPINLVRDLPQGFSALEPLVDLPIGINITRFQTLLALHRSYLTPGDSSSGWTAGAAAYYVGYLQPRTFLLKYNENGTITDAVDCALDPLSETKCTLKSFTVEKGIYQTSNFRVQPTESIVRFPNITNLCPFGEVFNATRFASVYAWDRKRISNCVAYYSVLYNSASFSTFKCYGVSPTKLNDLCFTNVYADSFVIRGDEVRQIAPGQTGKIADYNYKLPDDFTGCVIAWNSNNLDSKVGGNYNYLYRLFRKSNLKPFERDISTEIYQAGSTPCNGVEGFNCYFPLQSYGFQPTNGVGYQPYRVVVLSFELLHAPATVCGPKKSTNLVKNKCVNFNFNGLTGTGVLTESNKKFLPFQQFGRDIADTTDAVRDPQTLEILDITPCSFGGVSVITPGTNTSNQVAVLYQDVNCTEVPVAIHADQLTPTWRVYSTGSNVFQTRAGCLIGAEHVNNSYECDIPIGAGICASYQTQTNSPRRARSVASQSIIAYTMSLGAENSVAYSNNSIACPTNFTISVTTEILPVSMTKTSVDCTMYICGDSTECSNLLLQYGSFCTQLNRALTGIAVEQDKNTQEVFAQVKQIYKTPPIKDFGGFNFSQILPDPSKPSKRSFIEDLLFNKVTLADAGFIKQYGDCLGDIAARDLICAQKFNGLTVLPPLLTDEMIAQYTSALLAGTITSGWTFGAGAALQIPFAMQMAYRFNGIGVTQNVLYENQKLIANQFNSAIGKIQDSLSSTASALGKLQDVVNQNAQALNTLVKQLSSNFGAISSVLNDILSRLDKVEAEVQIDRLITGRLQSLQTYVTQQLIRAAEIRASANLAATKMSECVLGQSKRVDFCGKGYHLMSFPQSAPHGVVFLHVTYVPAQEKNFTTAPAICHDGKAHFPREGVFVSNGTHWFVTQRNFCEPQIITTDNTFVSGNCDVVIGIVNNTVYDPLQPELDSFKEELDKYFKNHTSPDVDLGDISGINASVVNIQKEIDRLNEVAKNLNESLIDLQELGKYEQYIKWPWYIWLGFIAGLIAIVMVTIMLCCMTSCCSCLKGCCSCGSCCKFDEDDSEPVLKGVKLHYT

SEQ ID NO: 682 - protein, 1273 aa, Artificial Sequence
  SARS-CoV-2/France/IDF0372/2020__EPI_ISL_406596 spike protein (1-1273)(I714C_Y1110C)
MFVFLVLLPLVSSQCVNLTTRTQLPPAYTNSFTRGVYYPDKVFRSSVLHSTQDLFLPFFSNVTWFHAIHVSGTNGTKRFDNPVLPFNDGVYFASTEKSNIIRGWIFGTTLDSKTQSLLIVNNATNVVIKVCEFQFCNDPFLGVYYHKNNKSWMESEFRVYSSANNCTFEYVSQPFLMDLEGKQGNFKNLREFVFKNIDGYFKIYSKHTPINLVRDLPQGFSALEPLVDLPIGINITRFQTLLALHRSYLTPGDSSSGWTAGAAAYYVGYLQPRTFLLKYNENGTITDAVDCALDPLSETKCTLKSFTVEKGIYQTSNFRVQPTESIVRFPNITNLCPFGEVFNATRFASVYAWNRKRISNCVADYSFLYNSASFSTFKCYGVSPTKLNDLCFTNVYADSFVIRGDEVRQIAPGQTGKIADYNYKLPDDFTGCVIAWNSNNLDSKVGGNYNYLYRLFRKSNLKPFERDISTEIYQAGSTPCNGVEGFNCYFPLQSYGFQPTNGVGYQPYRVVVLSFELLHAPATVCGPKKSTNLVKNKCVNFNFNGLTGTGVLTESNKKFLPFQQFGRDIADTTDAVRDPQTLEILDITPCSFGGVSVITPGTNTSNQVAVLYQDVNCTEVPVAIHADQLTPTWRVYSTGSNVFQTRAGCLIGAEHVNNSYECDIPIGAGICASYQTQTNSPRRARSVASQSIIAYTMSLGAENSVAYSNNSIACPTNFTISVTTEILPVSMTKTSVDCTMYICGDSTECSNLLLQYGSFCTQLNRALTGIAVEQDKNTQEVFAQVKQIYKTPPIKDFGGFNFSQILPDPSKPSKRSFIEDLLFNKVTLADAGFIKQYGDCLGDIAARDLICAQKFNGLTVLPPLLTDEMIAQYTSALLAGTITSGWTFGAGAALQIPFAMQMAYRFNGIGVTQNVLYENQKLIANQFNSAIGKIQDSLSSTASALGKLQDVVNQNAQALNTLVKQLSSNFGAISSVLNDILSRLDKVEAEVQIDRLITGRLQSLQTYVTQQLIRAAEIRASANLAATKMSECVLGQSKRVDFCGKGYHLMSFPQSAPHGVVFLHVTYVPAQEKNFTTAPAICHDGKAHFPREGVFVSNGTHWFVTQRNFCEPQIITTDNTFVSGNCDVVIGIVNNTVYDPLQPELDSFKEELDKYFKNHTSPDVDLGDISGINASVVNIQKEIDRLNEVAKNLNESLIDLQELGKYEQYIKWPWYIWLGFIAGLIAIVMVTIMLCCMTSCCSCLKGCCSCGSCCKFDEDDSEPVLKGVKLHYT

SEQ ID NO: 683 - protein, 1273 aa, Artificial Sequence
  SARS-CoV-2/Australia/VIC01/2020__EPI_ISL_406844 spike protein (1-1273)(I714C_Y1110C)
MFVFLVLLPLVSSQCVNLTTRTQLPPAYTNSFTRGVYYPDKVFRSSVLHSTQDLFLPFFSNVTWFHAIHVSGTNGTKRFDNPVLPFNDGVYFASTEKSNIIRGWIFGTTLDSKTQSLLIVNNATNVVIKVCEFQFCNDPFLGVYYHKNNKSWMESEFRVYSSANNCTFEYVSQPFLMDLEGKQGNFKNLREFVFKNIDGYFKIYSKHTPINLVRDLPQGFSALEPLVDLPIGINITRFQTLLALHRRYLTPGDSSSGWTAGAAAYYVGYLQPRTFLLKYNENGTITDAVDCALDPLSETKCTLKSFTVEKGIYQTSNFRVQPTESIVRFPNITNLCPFGEVFNATRFASVYAWNRKRISNCVADYSVLYNSASFSTFKCYGVSPTKLNDLCFTNVYADSFVIRGDEVRQIAPGQTGKIADYNYKLPDDFTGCVIAWNSNNLDSKVGGNYNYLYRLFRKSNLKPFERDISTEIYQAGSTPCNGVEGFNCYFPLQSYGFQPTNGVGYQPYRVVVLSFELLHAPATVCGPKKSTNLVKNKCVNFNFNGLTGTGVLTESNKKFLPFQQFGRDIADTTDAVRDPQTLEILDITPCSFGGVSVITPGTNTSNQVAVLYQDVNCTEVPVAIHADQLTPTWRVYSTGSNVFQTRAGCLIGAEHVNNSYECDIPIGAGICASYQTQTNSPRRARSVASQSIIAYTMSLGAENSVAYSNNSIACPTNFTISVTTEILPVSMTKTSVDCTMYICGDSTECSNLLLQYGSFCTQLNRALTGIAVEQDKNTQEVFAQVKQIYKTPPIKDFGGFNFSQILPDPSKPSKRSFIEDLLFNKVTLADAGFIKQYGDCLGDIAARDLICAQKFNGLTVLPPLLTDEMIAQYTSALLAGTITSGWTFGAGAALQIPFAMQMAYRFNGIGVTQNVLYENQKLIANQFNSAIGKIQDSLSSTASALGKLQDVVNQNAQALNTLVKQLSSNFGAISSVLNDILSRLDKVEAEVQIDRLITGRLQSLQTYVTQQLIRAAEIRASANLAATKMSECVLGQSKRVDFCGKGYHLMSFPQSAPHGVVFLHVTYVPAQEKNFTTAPAICHDGKAHFPREGVFVSNGTHWFVTQRNFCEPQIITTDNTFVSGNCDVVIGIVNNTVYDPLQPELDSFKEELDKYFKNHTSPDVDLGDISGINASVVNIQKEIDRLNEVAKNLNESLIDLQELGKYEQYIKWPWYIWLGFIAGLIAIVMVTIMLCCMTSCCSCLKGCCSCGSCCKFDEDDSEPVLKGVKLHYT

SEQ ID NO: 684 - protein, 1273 aa, Artificial Sequence
  SARS-CoV-2/Germany/BavPat1/2020__EPI_ISL_406862 spike protein (1-1273)(I714C_Y1110C)
MFVFLVLLPLVSSQCVNLTTRTQLPPAYTNSFTRGVYYPDKVFRSSVLHSTQDLFLPFFSNVTWFHAIHVSGTNGTKRFDNPVLPFNDGVYFASTEKSNIIRGWIFGTTLDSKTQSLLIVNNATNVVIKVCEFQFCNDPFLGVYYHKNNKSWMESEFRVYSSANNCTFEYVSQPFLMDLEGKQGNFKNLREFVFKNIDGYFKIYSKHTPINLVRDLPQGFSALEPLVDLPIGINITRFQTLLALHRSYLTPGDSSSGWTAGAAAYYVGYLQPRTFLLKYNENGTITDAVDCALDPLSETKCTLKSFTVEKGIYQTSNFRVQPTESIVRFPNITNLCPFGEVFNATRFASVYAWNRKRISNCVADYSVLYNSASFSTFKCYGVSPTKLNDLCFTNVYADSFVIRGDEVRQIAPGQTGKIADYNYKLPDDFTGCVIAWNSNNLDSKVGGNYNYLYRLFRKSNLKPFERDISTEIYQAGSTPCNGVEGFNCYFPLQSYGFQPTNGVGYQPYRVVVLSFELLHAPATVCGPKKSTNLVKNKCVNFNFNGLTGTGVLTESNKKFLPFQQFGRDIADTTDAVRDPQTLEILDITPCSFGGVSVITPGTNTSNQVAVLYQGVNCTEVPVAIHADQLTPTWRVYSTGSNVFQTRAGCLIGAEHVNNSYECDIPIGAGICASYQTQTNSPRRARSVASQSIIAYTMSLGAENSVAYSNNSIACPTNFTISVTTEILPVSMTKTSVDCTMYICGDSTECSNLLLQYGSFCTQLNRALTGIAVEQDKNTQEVFAQVKQIYKTPPIKDFGGFNFSQILPDPSKPSKRSFIEDLLFNKVTLADAGFIKQYGDCLGDIAARDLICAQKFNGLTVLPPLLTDEMIAQYTSALLAGTITSGWTFGAGAALQIPFAMQMAYRFNGIGVTQNVLYENQKLIANQFNSAIGKIQDSLSSTASALGKLQDVVNQNAQALNTLVKQLSSNFGAISSVLNDILSRLDKVEAEVQIDRLITGRLQSLQTYVTQQLIRAAEIRASANLAATKMSECVLGQSKRVDFCGKGYHLMSFPQSAPHGVVFLHVTYVPAQEKNFTTAPAICHDGKAHFPREGVFVSNGTHWFVTQRNFCEPQIITTDNTFVSGNCDVVIGIVNNTVYDPLQPELDSFKEELDKYFKNHTSPDVDLGDISGINASVVNIQKEIDRLNEVAKNLNESLIDLQELGKYEQYIKWPWYIWLGFIAGLIAIVMVTIMLCCMTSCCSCLKGCCSCGSCCKFDEDDSEPVLKGVKLHYT

SEQ ID NO: 685 - protein, 1273 aa, Artificial Sequence
  SARS-CoV-2/Wuhan/HBCDC-HB-02/2020__EPI_ISL_412978 spike protein (1-1273)(I714C_Y1110C)
MFVFLVLLPLVSSQCVNLTTRTQLPPAYTNSFTRGVYYPDKVFRSSVLHSTQDLFLPFFSNVTWFHAIHVSGTNGTKRFDNPVLPFNDGVYFASTEKSNIIRGWIFGTTLDSKTQSLLIVNNATNVVIKVCEFQFCNDPFLGVYYHKNNKSWMESEFRVYSSANNCTFEYVSQPFLMDLEGKQGNFKNLREFVFKNIDGYFKIYSKHTPINLVRDLPQGFSALEPLVDLPIGINITRFQTLLALHRSYLTPGDSSSGWTAGAAAYYVGYLQPRTFLLKYNENGTITDAVDCALDPLSETKCTLKSFTVEKGIYQTSNFRVQPTESIVRFPNITNLCPFGEVFNATRFASVYAWNRKRISNCVADYSVLYNSASFSTFKCYGVSPTKLNDLCFTNVYADSFVIRGDEVRQIAPGQTGKIADYNYKLPDDFTGCVIAWNSNNLDSKVGGNYNYLYRLFRKSNLKPFERDISTEIYQAGSTPCNGVEGFNCYFPLQSYGFQPTNGVGYQPYRVVVLSFELLHAPATVCGPKKSTNLVKNKCVNFNFNGLTGTGVLTESNKKFLPFQQFGRDIADTTDAVRDPQTLEILDITPCSFGGVSVITPGTNTSNQVAVLYQDVNCTEVPVAIHADQLTPTWRVYSTGSNVFQTRAGCLIGAEHVNNSYECDIPIGAGICASYQTQTNSPRRARSVASQSIIAYTMSLGAENSVAYSNNSIACPTNFTISVTTEILPVSMTKTSVDCTMYICGDSTECSNFLLQYGSFCTQLNRALTGIAVEQDKNTQEVFAQVKQIYKTPPIKDFGGFNFSQILPDPSKPSKRSFIEDLLFNKVTLADAGFIKQYGDCLGDIAARDLICAQKFNGLTVLPPLLTDEMIAQYTSALLAGTITSGWTFGAGAALQIPFAMQMAYRFNGIGVTQNVLYENQKLIANQFNSAIGKIQDSLSSTASALGKLQDVVNQNAQALNTLVKQLSSNFGAISSVLNDILSRLDKVEAEVQIDRLITGRLQSLQTYVTQQLIRAAEIRASANLAATKMSECVLGQSKRVDFCGKGYHLMSFPQSAPHGVVFLHVTYVPAQEKNFTTAPAICHDGKAHFPREGVFVSNGTHWFVTQRNFCEPQIITTDNTFVSGNCDVVIGIVNNTVYDPLQPELDSFKEELDKYFKNHTSPDVDLGDISGINASVVNIQKEIDRLNEVAKNLNESLIDLQELGKYEQYIKWPWYIWLGFIAGLIAIVMVTIMLCCMTSCCSCLKGCCSCGSCCKFDEDDSEPVLKGVKLHYT

SEQ ID NO: 686 - protein, 1273 aa, Artificial Sequence
  SARS-CoV-2/Australia/QLD02/2020__EPI_ISL_407896 spike protein (1-1273)(I714C_Y1110C)
MFVFLVLLPLVSSQCVNLTTRTQLPPAYTNSFTRGVYYPDKVFRSSVLHSTQDLFLPFFSNVTWFHAIHVSGTNGTKRFDNPVLPFNDGVYFASTEKSNIIRGWIFGTTLDSKTQSLLIVNNATNVVIKVCEFQFCNDPFLGVYYHKNNKSWMESEFRVYSSANNCTFEYVSQPFLMDLEGKQGNFKNLREFVFKNIDGYFKIYSKHTPINLVRDLPQGFSALEPLVDLPIGINITRFQTLLALHRSYLTPGDSSSGWTAGAAAYYVGYLQPRTFLLKYNENGTITDAVDCALDPLSETKCTLKSFTVEKGIYQTSNFRVQPTESIVRFPNITNLCPFGEVFNATRFASVYAWNRKRISNCVADYSVLYNSASFSTFKCYGVSPTKLNDLCFTNVYADSFVIRGDEVRQIAPGQTGKIADYNYKLPDDFTGCVIAWNSNNLDSKVGGNYNYLYRLFRKSNLKPFERDISTEIYQAGSTPCNGVEGFNCYFPLQSYGFQPTNGVGYQPYRVVVLSFELLHAPATVCGPKKSTNLVKNKCVNFNFNGLTGTGVLTESNKKFLPFQQFGRDIADTTDAVRDPQTLEILDITPCSFGGVSVITPGTNTSNQVAVLYQDVNCTEVPVAIHADQLTPTWRVYSTGSNVFQTRAGCLIGAEHVNNSYECDIPIGAGICASYQTQTNSPRRARSVASQSIIAYTMSLGAENSVAYSNNSIACPTNFTISVTTEILPVSMTKTSVDCTMYICGDSTECSNLLLQYGSFCTQLNRALTGIAVEQDKNTQEVFAQVKQIYKTPPIKDFGGFNFSQILPDPSKPSKRSFIEDLLFNKVTLADAGFIKQYGDCLGDIAARDLICAQKFNGLTVLPPLLTDEMIAQYTSALLAGTITSGWTFGAGAALQIPFAMQMAYRFNGIGVTQNVLYENQKLIANQFNSAIGKIQDSLSSTASALGKLQDVVNQNAQALNTLVKQLSSNFGAISSVLNDILSRLDKVEAEVQIDRLITGRLQSLQTYVTQQLIRAAEIRASANLAATKMSECVLGQSKRVDFCGKGYHLMSFPQSAPHGVVFLHVTYVPAQEKNFTTAPAICHDGKAHFPREGVFVSNGTHWFVTQRNFCEPQIITTDNTFVSGNCDVVIGIVNNTVYDPLQLELDSFKEELDKYFKNHTSPDVDLGDISGINASVVNIQKEIDRLNEVAKNLNESLIDLQELGKYEQYIKWPWYIWLGFIAGLIAIVMVTIMLCCMTSCCSCLKGCCSCGSCCKFDEDDSEPVLKGVKLHYT

SEQ ID NO: 687 - protein, 1273 aa, Artificial Sequence
  SARS-CoV-2/India/1-31/2020__EPI_ISL_413523 spike protein (1-1273)(I714C_Y1110C)
MFVFLVLLPLVSSQCVNLTTRTQLPPAYTNSFTRGVYYPDKVFRSSVLHSTQDLFLPFFSNVTWFHAIHVSGTNGTKRFDNPVLPFNDGVYFASTEKSNIIRGWIFGTTLDSKTQSLLIVNNATNVVIKVCEFQFCNDPFLGVYYHKNNKSWMESEFRVYSSANNCTFEYVSQPFLMDLEGKQGNFKNLREFVFKNIDGYFKIYSKHTPINLVRDLPQGFSALEPLVDLPIGINITRFQTLLALHRSYLTPGDSSSGWTAGAAAYYVGYLQPRTFLLKYNENGTITDAVDCALDPLSETKCTLKSFTVEKGIYQTSNFRVQPTESIVRFPNITNLCPFGEVFNATRFASVYAWNRKRISNCVADYSVLYNSASFSTFKCYGVSPTKLNDLCFTNVYADSFVIRGDEVRQIAPGQTGKIADYNYKLPDDFTGCVIAWNSNNLDSKVGGNYNYLYRLFRKSNLKPFERDISTEIYQAGSTPCNGVEGFNCYFPLQSYGFQPTNGVGYQPYRVVVLSFELLHAPATVCGPKKSTNLVKNKCVNFNFNGLTGTGVLTESNKKFLPFQQFGRDIADTTDAVRDPQTLEILDITPCSFGGVSVITPGTNTSNQVAVLYQDVNCTEVPVAIHADQLTPTWRVYSTGSNVFQTRAGCLIGAEHVNNSYECDIPIGAGICASYQTQTNSPRRARSVASQSIIAYTMSLGAENSVAYSNNSIACPTNFTISVTTEILPVSMTKTSVDCTMYICGDSTECSNLLLQYGSFCTQLNRALTGIAVEQDKNTQEVFAQVKQIYKTPPIKDFGGFNFSQILPDPSKPSKRSFIEDLLFNKVTLADAGFIKQYGDCLGDIAARDLICAQKFNGLTVLPPLLTDEMIAQYTSALLAGTITSGWTFGAGAALQIPFAMQMAYRFNGIGVTQNVLYENQKLIANQFNSVIGKIQDSLSSTASALGKLQDVVNQNAQALNTLVKQLSSNFGAISSVLNDILSRLDKVEAEVQIDRLITGRLQSLQTYVTQQLIRAAEIRASANLAATKMSECVLGQSKRVDFCGKGYHLMSFPQSAPHGVVFLHVTYVPAQEKNFTTAPAICHDGKAHFPREGVFVSNGTHWFVTQRNFCEPQIITTDNTFVSGNCDVVIGIVNNTVYDPLQPELDSFKEELDKYFKNHTSPDVDLGDISGINASVVNIQKEIDRLNEVAKNLNESLIDLQELGKYEQYIKWPWYIWLGFIAGLIAIVMVTIMLCCMTSCCSCLKGCCSCGSCCKFDEDDSEPVLKGVKLHYT

SEQ ID NO: 688 - protein, 1273 aa, Artificial Sequence
  SARS-CoV-2/Guangdong/GD2020087-P0008/2020__EPI_ISL_413863 spike protein (1-1273)(I714C_Y1110C)
MFVFLVLLPLVSSQCVNLTTRTQLPPAYTNSFTRGVYYPDKVFRSSVLHSTQDLFLPFFSNVTWFHAIHVSGTNGTKRFDNPVLPFNDGVYFASTEKSNIIRGWIFGTTLDSKTQSLLIVNNATNVVIKVCEFQFCNDPFLGVYYHKNNKSWMESEFRVYSSANNCTFEYVSQPFLMDLEGKQGNFKNLREFVFKNIDGYFKIYSKHTPINLVRDLPQGFSALEPLVDLPIGINITRFQTLLALHRSYLTPGDSSSGWTAGAAAYYVGYLQPRTFLLKYNENGTITDAVDCALDPLSETKCTLKSFTVEKGIYQTSNFRVQPTESIVRFPNITNLCPFGEVFNATRFASVYAWNRKRISNCVADYSVLYNSASFSTFKCYGVSPTKLNDLCFTNVYADSFVIRGDEVREIAPGQTGKIADYNYKLPDDFTGCVIAWNSNNLDSKVGGNYNYLYRLFRKSNLKPFERDISTEIYQAGSTPCNGVEGFNCYFPLQSYGFQPTNGVGYQPYRVVVLSFELLHAPATVCGPKKSTNLVKNKCVNFNFNGLTGTGVLTESNKKFLPFQQFGRDIADTTDAVRDPQTLEILDITPCSFGGVSVITPGTNTSNQVAVLYQDVNCTEVPVAIHADQLTPTWRVYSTGSNVFQTRAGCLIGAEHVNNSYECDIPIGAGICASYQTQTNSPRRARSVASQSIIAYTMSLGAENSVAYSNNSIACPTNFTISVTTEILPVSMTKTSVDCTMYICGDSTECSNLLLQYGSFCTQLNRALTGIAVEQDKNTQEVFAQVKQIYKTPPIKDFGGFNFSQILPDPSKPSKRSFIEDLLFNKVTLADAGFIKQYGDCLGDIAARDLICAQKFNGLTVLPPLLTDEMIAQYTSALLAGTITSGWTFGAGAALQIPFAMQMAYRFNGIGVTQNVLYENQKLIANQFNSAIGKIQDSLSSTASALGKLQDVVNQNAQALNTLVKQLSSNFGAISSVLNDILSRLDKVEAEVQIDRLITGRLQSLQTYVTQQLIRAAEIRASANLAATKMSECVLGQSKRVDFCGKGYHLMSFPQSAPHGVVFLHVTYVPAQEKNFTTAPAICHDGKAHFPREGVFVSNGTHWFVTQRNFCEPQIITTDNTFVSGNCDVVIGIVNNTVYDPLQPELDSFKEELDKYFKNHTSPDVDLGDISGINASVVNIQKEIDRLNEVAKNLNESLIDLQELGKYEQYIKWPWYIWLGFIAGLIAIVMVTIMLCCMTSCCSCLKGCCSCGSCCKFDEDDSEPVLKGVKLHYT

SEQ ID NO: 689 - protein, 1273 aa, Artificial Sequence
  SARS-CoV-2/Sweden/01/2020__EPI_ISL_411951 spike protein (1-1273)(I714C_Y1110C)
MFVFLVLLPLVSSQCVNLTTRTQLPPAYTNSFTRGVYYPDKVFRSSVLHSTQDLFLPFFSNVTWFHAIHVSGTNGTKRFDNPVLPFNDGVYFASTEKSNIIRGWIFGTTLDSKTQSLLIVNNATNVVIKVCEFQFCNDPFLGVYYHKNNKSWMESEFRVYSSANNCTFEYVSQPFLMDLEGKQGNFKNLREFVFKNIDGYFKIYSKHTPINLVRDLPQGFSALEPLVDLPIGINITRFQTLLALHRSYLTPGDSSSGWTAGAAAYYVGYLQPRTFLLKYNENGTITDAVDCALDPLSETKCTLKSFTVEKGIYQTSNFRVQPTESIVRFPNITNLCPFGEVFNATRFASVYAWNRKRISNCVADYSVLYNSASFSTFKCYGVSPTKLNDLCFTNVYADSFVIRGDEVRQIAPGQTGKIADYNYKLPDDFTGCVIAWNSNNLDSKVGGNYNYLYRLFRKSNLKPFERDISTEIYQAGSTPCNGVEGFNCYFPLQSYGFQPTNGVGYQPYRVVVLSFELLHAPATVCGPKKSTNLVKNKCVNFNFNGLTGTGVLTESNKKFLPFQQFGRDIADTTDAVRDPQTLEILDITPCSFGGVSVITPGTNTSNQVAVLYQDVNCTEVPVAIHADQLTPTWRVYSTGSNVFQTRAGCLIGAEHVNNSYECDIPIGAGICASYQTQTNSPRRARSVASQSIIAYTMSLGAENSVAYSNNSIACPTNFTISVTTEILPVSMTKTSVDCTMYICGDSTECSNLLLQYGSFCTQLNRALTGIAVEQDKNTQEVFAQVKQIYKTPPIKDCGGFNFSQILPDPSKPSKRSFIEDLLFNKVTLADAGFIKQYGDCLGDIAARDLICAQKFNGLTVLPPLLTDEMIAQYTSALLAGTITSGWTFGAGAALQIPFAMQMAYRFNGIGVTQNVLYENQKLIANQFNSAIGKIQDSLSSTASALGKLQDVVNQNAQALNTLVKQLSSNFGAISSVLNDILSRLDKVEAEVQIDRLITGRLQSLQTYVTQQLIRAAEIRASANLAATKMSECVLGQSKRVDFCGKGYHLMSFPQSAPHGVVFLHVTYVPAQEKNFTTAPAICHDGKAHFPREGVFVSNGTHWFVTQRNFCEPQIITTDNTFVSGNCDVVIGIVNNTVYDPLQPELDSFKEELDKYFKNHTSPDVDLGDISGINASVVNIQKEIDRLNEVAKNLNESLIDLQELGKYEQYIKWPWYIWLGFIAGLIAIVMVTIMLCCMTSCCSCLKGCCSCGSCCKFDEDDSEPVLKGVKLHYT

SEQ ID NO: 690 - protein, 1273 aa, Artificial Sequence
  SARS-CoV-2/Tianmen/HBCDC-HB-07/2020__EPI_ISL_412983 spike protein (1-1273)(I714C_Y1110C)
MFVFLVLLPLVSSQCVNLTTRTQLPPAYTNSFTRGVYYPDKVFRSSVLHSTQDLFLPFFSNVTWFHAIHVSGTNGTKRFDNPVLPFNDGVYFASTEKSNIIRGWIFGTTLDSKTQSLLIVNNATNVVIKVCEFQFCNDPFLGVYYHKNNKSWMESEFRVYSSANNCTFEYVSQPFLMDLEGKQGNFKNLREFVFKNIDGYFKIYSKHTPINLVRDLPQGFSALEPLVDLPIGINITRFQTLLALHRSYLTPGDSSSGWTAGAAAYYVGYLQPRTFLLKYNENGTITDAVDCALDPLSETKCTLKSFTVEKGIYQTSNFRVQPTESIVRFPNITNLCPFGEVFNATRFASVYAWNRKRISNCVADYSVLYNSASFSTFKCYGVSPTKLNDLCFTNVYADSFVIRGDEVRQIAPGQTGKIADYNYKLPDDFTGCVIAWNSNNLDSKVGGNYNYLYRLFRKSNLKPFERDISTEIYQAGSTPCNGVEGFNCYFPLQSYGFQPTNGVGYQPYRVVVLSFELLHAPATVCGPKKSTNLVKNKCVNFNFNGLTGTGVLTESNKKFLPFQQFGRDIADTTDAVRDPQTLEILDITPCSFGGVSVITPGTNTSNQVAVLYQDLNCTEVPVAIHADQLTPTWRVYSTGSNVFQTRAGCLIGAEHVNNSYECDIPIGAGICASYQTQTNSPRRARSVASQSIIAYTMSLGAENSVAYSNNSIACPTNFTISVTTEILPVSMTKTSVDCTMYICGDSTECSNLLLQYGSFCTQLNRALTGIAVEQDKNTQEVFAQVKQIYKTPPIKDFGGFNFSQILPDPSKPSKRSFIEDLLFNKVTLADAGFIKQYGDCLGDIAARDLICAQKFNGLTVLPPLLTDEMIAQYTSALLAGTITSGWTFGAGAALQIPFAMQMAYRFNGIGVTQNVLYENQKLIANQFNSAIGKIQDSLSSTASALGKLQDVVNQNAQALNTLVKQLSSNFGAISSVLNDILSRLDKVEAEVQIDRLITGRLQSLQTYVTQQLIRAAEIRASANLAATKMSECVLGQSKRVDFCGKGYHLMSFPQSAPHGVVFLHVTYVPAQEKNFTTAPAICHDGKAHFPREGVFVSNGTHWFVTQRNFCEPQIITTDNTFVSGNCDVVIGIVNNTVYDPLQPELDSFKEELDKYFKNHTSPDVDLGDISGINASVVNIQKEIDRLNEVAKNLNESLIDLQELGKYEQYIKWPWYIWLGFIAGLIAIVMVTIMLCCMTSCCSCLKGCCSCGSCCKFDEDDSEPVLKGVKLHYT

SEQ ID NO: 691 - protein, 1273 aa, Artificial Sequence
  SARS-CoV-2/Hong Kong/case42_VM20002493/2020__EPI_ISL_414527 spike protein (1-1273)(I714C_Y1110C)
MFVFLVLLPLVSSQCVNLTTRTQLPPAYTNSFTRGVYYPDKVFRSSVLHSTQDLFLPFFSNVTWFHAIHVSGTNGTKRFDNPVLPFNDGVYFASTEKSNIIRGWIFGTTLDSKTQSLLIVNNATNVVIKVCEFQFCNDPFLGVYYHKNNKSWMESEFRVYSSANNCTFEYVSQPFLMDLEGKQGNFKNLREFVFKNIDGYFKIYSKHTPINLVRDLPQGFSALEPLVDLPIGINITRFQTLLALHRSYLTPGDSSSGWTAGAAAYYVGYLQPRTFLLKYNENGTITDAVDCALDPLSETKCTLKSFTVEKGIYQTSNFRVQPTESIVRFPNITNLCPFGEVFNATRFASVYAWNRKRISNCVADYSVLYNSASFSTFKCYGVSPTKLNDLCFTNVYADSFVIRGDEVRQIAPGQTGKIADYNYKLPDDFTGCVIAWNSNNLDSKVGGNYNYLYRLFRKSNLKPFERDISTEIYQAGSTPCNGVEGFNCYFPLQSYGFQPTNGVGYQPYRVVVLSFELLHAPATVCGPKKSTNLVKNKCVNFNFNGLTGTGVLTESNKKFLPFQQFGRDIADTTDAVRDPQTLEILDITPCSFGGVSVITPGTNTSNQVAVLYQDVNCTEVPVAIHADQLTPTWRVYSTGSNVFQTRAGCLIGAEHVNNSYECDIPIGAGICASYQTQTNSPRRARSVASQSIIAYTMSLGAENSVAYSNNSIACPTNFAISVTTEILPVSMTKTSVDCTMYICGDSTECSNLLLQYGSFCTQLNRALTGIAVEQDKNTQEVFAQVKQIYKTPPIKDFGGFNFSQILPDPSKPSKRSFIEDLLFNKVTLADAGFIKQYGDCLGDIAARDLICAQKFNGLTVLPPLLTDEMIAQYTSALLAGTITSGWTFGAGAALQIPFAMQMAYRFNGIGVTQNVLYENQKLIANQFNSAIGKIQDSLSSTASALGKLQDVVNQNAQALNTLVKQLSSNFGAISSVLNDILSRLDKVEAEVQIDRLITGRLQSLQTYVTQQLIRAAEIRASANLAATKMSECVLGQSKRVDFCGKGYHLMSFPQSAPHGVVFLHVTYVPAQEKNFTTAPAICHDGKAHFPREGVFVSNGTHWFVTQRNFCEPQIITTDNTFVSGNCDVVIGIVNNTVYDPLQPELDSFKEELDKYFKNHTSPDVDLGDISGINASVVNIQKEIDRLNEVAKNLNESLIDLQELGKYEQYIKWPWYIWLGFIAGLIAIVMVTIMLCCMTSCCSCLKGCCSCGSCCKFDEDDSEPVLKGVKLHYT

SEQ ID NO: 692 - protein, 1273 aa, Artificial Sequence
  SARS-CoV-2/USA/CruiseA-23/2020__EPI_ISL_414482 spike protein (1-1273)(I714C_Y1110C)
MFVFLVLLPLVSSQCVNLTTRTQLPPAYTNSFTRGVYYPDKVFRSSVLHSTQDLFLPFFSNVTWFHAIHVSGTNGTKRFDNPVLPFNDGVYFASTEKSNIIRGWIFGTTLDSKTQSLLIVNNATNVVIKVCEFQFCNDPFLGVYYHKNNKSWMESEFRVYSSANNCTFEYVSQPFLMDLEVKQGNFKNLREFVFKNIDGYFKIYSKHTPINLVRDLPQGFSALEPLVDLPIGINITRFQTLLALHRSYLTPGDSSSGWTAGAAAYYVGYLQPRTFLLKYNENGTITDAVDCALDPLSETKCTLKSFTVEKGIYQTSNFRVQPTESIVRFPNITNLCPFGEVFNATRFASVYAWNRKRISNCVADYSVLYNSASFSTFKCYGVSPTKLNDLCFTNVYADSFVIRGDEVRQIAPGQTGKIADYNYKLPDDFTGCVIAWNSNNLDSKVGGNYNYLYRLFRKSNLKPFERDISTEIYQAGSTPCNGVEGFNCYFPLQSYGFQPTNGVGYQPYRVVVLSFELLHAPATVCGPKKSTNLVKNKCVNFNFNGLTGTGVLTESNKKFLPFQQFGRDIADTTDAVRDPQTLEILDITPCSFGGVSVITPGTNTSNQVAVLYQDVNCTEVPVAIHADQLTPTWRVYSTGSNVFQTRAGCLIGAEHVNNSYECDIPIGAGICASYQTQTNSPRRARSVASQSIIAYTMSLGAENSVAYSNNSIACPTNFTISVTTEILPVSMTKTSVDCTMYICGDSTECSNLLLQYGSFCTQLNRALTGIAVEQDKNTQEVFAQVKQIYKTPPIKDFGGFNFSQILPDPSKPSKRSFIEDLLFNKVTLADAGFIKQYGDCLGDIAARDLICAQKFNGLTVLPPLLTDEMIAQYTSALLAGTITSGWTFGAGAALQIPFAMQMAYRFNGIGVTQNVLYENQKLIANQFNSAIGKIQDSLSSTASALGKLQDVVNQNAQALNTLVKQLSSNFGAISSVLNDILSRLDKVEAEVQIDRLITGRLQSLQTYVTQQLIRAAEIRASANLAATKMSECVLGQSKRVDFCGKGYHLMSFPQSAPHGVVFLHVTYVPAQEKNFTTAPAICHDGKAHFPREGVFVSNGTHWFVTQRNFCEPQIITTDNTFVSGNCDVVIGIVNNTVYDPLQPELDSFKEELDKYFKNHTSPDVDLGDISGINASVVNIQKEIDRLNEVAKNLNESLIDLQELGKYEQYIKWPWYIWLGFIAGLIAIVMVTIMLCCMTSCCSCLKGCCSCGSCCKFDEDDSEPVLKGVKLHYT

SEQ ID NO: 693 - protein, 1273 aa, Artificial Sequence
  SARS-CoV-2/Hong Kong/case85_VM20002868/2020__EPI_ISL_414519 spike protein (1-1273)(I714C_Y1110C)
MFVFLVLVPLVSSQCVNLTTRTQLPPAYTNSFTRGVYYPDKVFRSSVLHSTQDLFLPFFSNVTWFHAIHVSGTNGTKRFDNPVLPFNDGVYFASTEKSNIIRGWIFGTTLDSKTQSLLIVNNATNVVIKVCEFQFCNDPFLGVYYHKNNKSWMESEFRVYSSANNCTFEYVSQPFLMDLEGKQGNFKNLREFVFKNIDGYFKIYSKHTPINLVRDLPQGFSALEPLVDLPIGINITRFQTLLALHRSYLTPGDSSSGWTAGAAAYYVGYLQPRTFLLKYNENGTITDAVDCALDPLSETKCTLKSFTVEKGIYQTSNFRVQPTESIVRFPNITNLCPFGEVFNATRFASVYAWNRKRISNCVADYSVLYNSASFSTFKCYGVSPTKLNDLCFTNVYADSFVIRGDEVRQIAPGQTGKIADYNYKLPDDFTGCVIAWNSNNLDSKVGGNYNYLYRLFRKSNLKPFERDISTEIYQAGSTPCNGVEGFNCYFPLQSYGFQPTNGVGYQPYRVVVLSFELLHAPATVCGPKKSTNLVKNKCVNFNFNGLTGTGVLTESNKKFLPFQQFGRDIADTTDAVRDPQTLEILDITPCSFGGVSVITPGTNTSNQVAVLYQDVNCTEVPVAIHADQLTPTWRVYSTGSNVFQTRAGCLIGAEHVNNSYECDIPIGAGICASYQTQTNSPRRARSVASQSIIAYTMSLGAENSVAYSNNSIACPTNFTISVTTEILPVSMTKTSVDCTMYICGDSTECSNLLLQYGSFCTQLNRALTGIAVEQDKNTQEVFAQVKQIYKTPPIKDFGGFNFSQILPDPSKPSKRSFIEDLLFNKVTLADAGFIKQYGDCLGDIAARDLICAQKFNGLTVLPPLLTDEMIAQYTSALLAGTITSGWTFGAGAALQIPFAMQMAYRFNGIGVTQNVLYENQKLIANQFNSAIGKIQDSLSSTASALGKLQDVVNQNAQALNTLVKQLSSNFGAISSVLNDILSRLDKVEAEVQIDRLITGRLQSLQTYVTQQLIRAAEIRASANLAATKMSECVLGQSKRVDFCGKGYHLMSFPQSAPHGVVFLHVTYVPAQEKNFTTAPAICHDGKAHFPREGVFVSNGTHWFVTQRNFCEPQIITTDNTFVSGNCDVVIGIVNNTVYDPLQPELDSFKEELDKYFKNHTSPDVDLGDISGINASVVNIQKEIDRLNEVAKNLNESLIDLQELGKYEQYIKWPWYIWLGFIAGLIAIVMVTIMLCCMTSCCSCLKGCCSCGSCCKFDEDDSEPVLKGVKLHYT

SEQ ID NO: 694 - protein, 1273 aa, Artificial Sequence
  SARS-CoV-2/England/200990660/2020__EPI_ISL_414523 spike protein (1-1273)(I714C_Y1110C)
MFVFLVLLPLVSSQCVNLTTRTQLPPAYTNSFTRGVYYPDKVFRSSVLHSTQDLFLPFFSNVTWFHAIHVSGTNGTKRFDNPVLPFNDGVYFASTEKSNIIRGWIFGTTLDSKTQSLLIVNNATNVVIKVCEFQFCNDPFLGVYYHKNNKSWMESEFRVYSSANNCTFEYVSQPFLMDLEGKQGNFKNLREFVFKNIDGYFKIYSKHTPINLVRDLPQGFSALEPLVDLPIGINITRFQTLLALHRSYLTPGDSSSGWTAGAAAYYVGYLQPRTFLLKYNENGTITDAVDCALDPLSETKCTLKSFTVEKGIYQTSNFRVQPTESIVRFPNITNLCPFGEVFNATRFASVYAWNRKRISNCVADYSVLYNSASFSTFKCYGVSPTKLNDLCFTNVYADSFVIRGDEVRQIAPGQTGKIADYNYKLPDDFTGCVIAWNSNNLDSKVGGNYNYLYRLFRKSNLKPFERDISTEIYQAGSTPCNGVEGFNCYFPLQSYGFQPTNGVGYQPYRVVVLSFELLHAPATVCGPKKSTNLVKNKCVNFNFNGLTGTGVLTESNKKFLPFQQFGRDIADTTDAVRDPQTLEILDITPCSFGGVSVITPGTNTSNQVAVLYQGVNCTEVPVAIHADQLTPTWRVYSTGSNVFQTRAGCLIGAEHVNNSYECDIPIGAGICASYQTQTNSPRRARSVASQSIIAYTMSLGAENSVAYSNNSIACPTNFTISVTTEILPVSMTKTSVDCTMYICGDSTECSNLLLQYGSFCTQLNRALTGIAVEQDKNTQEVFAQVKQIYKTPPIKDFGGFNFSQILPDPSKPSKRSFIEDLLFNKVTLADAGFIKQYGDCLGDIAARDLICAQKFNGLTVLPPLLTDEMIAQYTSALLAGTITSGWTFGAGAALQIPFAMQMAYRFNGIGVTQNVLYENQKLIANQFNSAIGKIQDSLSSTASALGKLQDVVNQNAQALNTLVKQLSSNFGAISSVLNDILSRLDKVEAEVQIDRLITGRLQSLQTYVTQQLIRAAEIRASANLAATKMSECVLGQSKRVDFCGKGYHLMSFPQSAPHGVVFLHVTYVPAQEKNFTTAPAICHDGKAHFPREGVFVSNGTHWFVTQRNFCEPQIITTDNTFVSGNCDVVIGIVNNTVYDPLQPELDSFKEELDKYFKNHTSPDVDLGDISGINASVVNIQKEIDRLNEVAKNLNESLIDLQELGKYEQYIKWPWYIWLGFIAGLIAIVMVTIMLCCMTSCCSCLKGCCSCGSCCKFDEDDSELVLKGVKLHYT

SEQ ID NO: 695 - protein, 1273 aa, Artificial Sequence
  SARS-CoV-2/Australia/NSW09/2020__EPI_ISL_413595 spike protein (1-1273)(I714C_Y1110C)
MFVFLVLLPLVSSQCVNLTTRTQLPPAYTNSFTRGVYYPDKVFRSSVLHSTQDLFLPFFSNVTWFHAIHVSGTNGTKRFDNPVLPFNDGVYFASTEKSNIIRGWIFGTTLDSKTQSLLIVNNATNVVIKVCEFQFCNDPFLGVYYHKNNKSWMESEFRVYSSANNCTFEYVSQPFLMDLEGKQGNFKNLREFVFKNIDGYFKIYSKHTPINLVRDLPQGFSALEPLVDLPIGINITRFQTLLALHRSYLTPGDSSSGWTAGAAAYYVGYLQPRTFLLKYNENGTITDAVDCALDPLSETKCTLKSFTVEKGIYQTSNFRVQPTESIVRFPNITNLCPFGEVFNATRFASVYAWNRKRISNCVADYSVLYNSASFSTFKCYGVSPTKLNDLCFTNVYADSFVIRGDEVRQIAPGQTGKIADYNYKLPDDFTGCVIAWNSNNLDSKVGGNYNYLYRLFRKSNLKPFERDISTEIYQAGSTPCNGVEGFNCYFPLQSYGFQPTNGVGYQPYRVVVLSFELLHAPATVCGPKKSTNLVKNKCVNFNFNGLTGTGVLTESNKKFLPFQQFGRDIADTTDAVRDPQTLEILDITPCSFGGVSVITPGTNTSNQVAVLYQDVNCTEVPVAIHADQLTPTWRVYSTGSNVFQTRAGCLIGAEHVNNSYECDIPIGAGICASYQTQTNSPRRARSVASQSIIAYTMSLGAENSVAYSNNSIACPTNFTISVTTEILPVSMTKTSVDCTMYICGDSTECSNLLLQYGSFCTQLNRALTGIAVEQDKNTQEVFAQVKQIYKTPPIKDFGGFNFSQILPDPSKPSKRSFIEDLLFNKVTLADAGFIKQYGDCLGDIAARDLICAQKFNGLTVLPPLLTDEMIAQYTSALLAGTITSGWTFGAGAALQIPFAMQMAYRFNGIGVTQNVLYENQKLIANQFNSAIGKIQDSLSFTASALGKLQDVVNQNAQALNTLVKQLSSNFGAISSVLNDILSRLDKVEAEVQIDRLITGRLQSLQTYVTQQLIRAAEIRASANLAATKMSECVLGQSKRVDFCGKGYHLMSFPQSAPHGVVFLHVTYVPAQEKNFTTAPAICHDGKAHFPREGVFVSNGTHWFVTQRNFCEPQIITTDNTFVSGNCDVVIGIVNNTVYDPLQPELDSFKEELDKYFKNHTSPDVDLGDISGINASVVNIQKEIDRLNEVAKNLNESLIDLQELGKYEQYIKWPWYIWLGFIAGLIAIVMVTIMLCCMTSCCSCLKGCCSCGSCCKFDEDDSEPVLKGVKLHYT

SEQ ID NO: 696 - protein, 1273 aa, Artificial Sequence
  SARS-CoV-2/Australia/NSW10/2020__EPI_ISL_413596 spike protein (1-1273)(I714C_Y1110C)
MFVFLVLLPLVSSQCVNLTTRTQLPPAYTNSFTRGVYYPDKVFRSSVLHSTQDLFLPFFSNVTWFHAIHVSGTNGTKRFDNPVLPFNDGVYFASTEKSNIIRGWIFGTTLDSKTQSLLIVNNATNVVIKVCEFQFCNDPFLGVYYHKNNKSWMESEFRVYSSANNCTFEYVSQPFLMDLEGKQGNFKNLREFVFKNIDGYFKIYSKHTPINLVRDLPQGFSALEPLVDLPIGINITRFQTLLALHRSYLTPGDSSSGWTAGAAAYYVGYLQPRTFLLKYNENGTITDAVDCALDPLSETKCTLKSFTVEKGIYQTSNFRVQPTESIVRFPNITNLCPFGEVFNATRFASVYAWNRKRISNCVADYSVLYNSASFSTFKCYGVSPTKLNDLCFTNVYADSFVIRGDEVRQIAPGQTGKIADYNYKLPDDFTGCVIAWNSNNLDSKVGGNYNYLYRLFRKSNLKPFERDISTEIYQAGSTPCNGVEGFNCYFPLQSYGFQPTNGVGYQPYRVVVLSFELLHAPATVCGPKKSTNLVKNKCVNFNFNGLTGTGVLTESNKKFLPFQQFGRDIADTTDAVRDPQTLEILDITPCSFGGVSVITPGTNTSNQVAVLYQDVNCTEVPVAIHADQLTPTWRVYSTGSNVFQTRAGCLIGAEHVNNSYECDIPIGAGICASYQTQTNSPRRARSVASQSIIAYTMSLGAENSVAYSNNSIACPTNFTISVTTEILPVSMTKTSVDCTMYICGDSTECSNLLLQYGSFCTQLNRALTGIAVEQDKNTQEVFAQVKQIYKTPPIKDFGGFNFSQILPDPSKPSKRSFIEDLLFNKVTLADAGFIKQYGDCLGDIAARDLICAQKFNGLTVLPPLLTDEMIAQYTSALLAGTITSGWTFGAGAALQIPFAMQMAYRFNGIGVTQNVLYENQKLIANQFNSAIGKIQDSLSSTASALGKLQDVVNQNAQALNTLVKQLSSNFGAISSVLNDILSRLDKVEAEVQIDRLITGRLQSLQTYVTQQLIRAAEIRASANLAATKMSECVLGQSKRVDFCGKGYHLMSFPQSAPHGVVFLHVTYVPAQEKNFTTAPAICHDGKAHFPREGVFVSNGTHWFVTQRNFCEPQIITTDNTFVSGNCDVVIGIVNNTVYDPLQPELDSFKEELDKYFKNHTSPDVDLGDISGINASVVNIQKEIDRLNEVAKNLNESLIDLQELGKYEQYIKWPWYIWLGFIAGLIAIVMVTIMLCCMTSCCSCLKGCCSCGSCFKFDEDDSEPVLKGVKLHYT

SEQ ID NO: 697 - protein, 1273 aa, Artificial Sequence
  SARS-CoV-2/Switzerland/1000477797/2020__EPI_ISL_413023 spike protein (1-1273)(I714C_Y1110C)
MFVFLVLLPLVSSQCVNLTTRTQLPPAYTNSFTRGVYYPDKVFRSSVLHSTQDLFLPFFSNVTWFHAIHVSGTNGTKRFDNPVLPFNDGVYFASTEKSNIIRGWIFGTTLDSKTQSLLIVNNATNVVIKVCEFQFCNDPFLGVYYHKNNKSWMESEFRVYSSANNCTFEYVSQPFLMDLEGKQGNFKNLREFVFKNIDGYFNIYSKHTPINLVRDLPQGFSALEPLVDLPIGINITRFQTLLALHRSYLTPGDSSSGWTAGAAAYYVGYLQPRTFLLKYNENGTITDAVDCALDPLSETKCTLKSFTVEKGIYQTSNFRVQPTESIVRFPNITNLCPFGEVFNATRFASVYAWNRKRISNCVADYSVLYNSASFSTFKCYGVSPTKLNDLCFTNVYADSFVIRGDEVRQIAPGQTGKIADYNYKLPDDFTGCVIAWNSNNLDSKVGGNYNYLYRLFRKSNLKPFERDISTEIYQAGSTPCNGVEGFNCYFPLQSYGFQPTNGVGYQPYRVVVLSFELLHAPATVCGPKKSTNLVKNKCVNFNFNGLTGTGVLTESNKKFLPFQQFGRDIADTTDAVRDPQTLEILDITPCSFGGVSVITPGTNTSNQVAVLYQGVNCTEVPVAIHADQLTPTWRVYSTGSNVFQTRAGCLIGAEHVNNSYECDIPIGAGICASYQTQTNSPRRARSVASQSIIAYTMSLGAENSVAYSNNSIACPTNFTISVTTEILPVSMTKTSVDCTMYICGDSTECSNLLLQYGSFCTQLNRALTGIAVEQDKNTQEVFAQVKQIYKTPPIKDFGGFNFSQILPDPSKPSKRSFIEDLLFNKVTLADAGFIKQYGDCLGDIAARDLICAQKFNGLTVLPPLLTDEMIAQYTSALLAGTITSGWTFGAGAALQIPFAMQMAYRFNGIGVTQNVLYENQKLIANQFNSAIGKIQDSLSSTASALGKLQDVVNQNAQALNTLVKQLSSNFGAISSVLNDILSRLDKVEAEVQIDRLITGRLQSLQTYVTQQLIRAAEIRASANLAATKMSECVLGQSKRVDFCGKGYHLMSFPQSAPHGVVFLHVTYVPAQEKNFTTAPAICHDGKAHFPREGVFVSNGTHWFVTQRNFCEPQIITTDNTFVSGNCDVVIGIVNNTVYDPLQPELDSFKEELDKYFKNHTSPDVDLGDISGINASVVNIQKEIDRLNEVAKNLNESLIDLQELGKYEQYIKWPWYIWLGFIAGLIAIVMVTIMLCCMTSCCSCLKGCCSCGSCCKFDEDDSEPVLKGVKLHYT

SEQ ID NO: 698 - protein, 1273 aa, Artificial Sequence
  SARS-CoV-2/Belgium/BA-02291/2020__EPI_ISL_415159 spike protein (1-1273)(I714C_Y1110C)
MFVFLVLLPLVSSQCVNLTTRTQLPPAYTNSFTRGVYYPDKVFRSSVLHSTQDLFLPFFSNVTWFHAIHVSGTNGTKRFDNPVLPFNDGVYFASTEKSNIIRGWIFGTTLDSKTQSLLIVNNATNVVIKVCEFQFCNDPFLGVYYHKNNKSWMESEFRVYSSANNCTFEYVSQPFLMDLEGKQGNFKNLREFVFKNIDGYFKIYSKHTPINLVRDLPQGFSALEPLVDLPIGINITRFQTLLALHRSYLTPGDSSSGWTAGAAAYYVGYLQPRTFLLKYNENGTITDAVDCALDPLSETKCTLKSFTVEKGIYQTSNFRVQPTESIVRFPNITNLCPFGEVFNATRFASVYAWNRKRISNCVADYSVLYNSASFSTFKCYGVSPTKLNDLCFTNVYADSFVIRGDEVRQIAPGQTGKIADYNYKLPDDFTGCVIAWNSNNLDSKVGGNYNYLYRLFRRSNLKPFERDISTEIYQAGSTPCNGVEGFNCYFPLQSYGFQPTNGVGYQPYRVVVLSFELLPAPATVCGPKKSTNLVKNKCVNFNFNGLTGTGVLTESNKKFLPFQQFGRDIADTTDAVRDPQTLEILDITPCSFGGVSVITPGTNTSNQVAVLYQGVNCTEVPVAIHADQLTPTWRVYSTGSNVFQTRAGCLIGAEHVNNSYECDIPIGAGICASYQTQTNSPRRARSVASQSIIAYTMSLGAENSVAYSNNSIACPTNFTISVTTEILPVSMTKTSVDCTMYICGDSTECSNLLLQYGSFCTQLNRALTGIAVEQDKNTQEVFAQVKQIYKTPPIKDFGGFNFSQILPDPSKPSKRSFIEDLLFNKVTLADAGFIKQYGDCLGDIAARDLICAQKFNGLTVLPPLLTDEMIAQYTSALLAGTITSGWTFGAGAALQIPFAMQMAYRFNGIGVTQNVLYENQKLIANQFNSAIGKIQDSLSSAAPALGKLQDVVNQNAQALNTLVKQLSSNFGAISSVLNDILSRLDKVEAEVQIDRLITGRLQSLQTYVTQQLIRAAEIRASANLAATKMSECVLGQSKRVDFCGKGYHLMSFPQSAPHGVVFLHVTYVPAQEKNFTTAPAICHDGKAHFPREGVFVSNGTHWFVTQRNFCEPQIITTDNTFVSGNCDVVIGIVNNTVYDPLQPELDSFKEELDKYFKNHTSPDVDLGDISGINASVVNIQKEIDRLNEVAKNLNESLIDLQELGKYEQYIKWPWYIWLGFIAGLIAIVMVTIMLCCMTSCCSCLKGCCSCGSCCKFDEDDSEPVLKGVKLHYT

SEQ ID NO: 699 - protein, 1273 aa, Artificial Sequence
  SARS-CoV-2/USA/WA8-UW5/2020__EPI_ISL_413486 spike protein (1-1273)(I714C_Y1110C)
MFVFLVLLPLVSSQCVNLTTRTQLPPAYTNSFTRGVYYPDKVFRSSVLHSTQDLFLPFFSNVTWFHAIHVSGTNGTKRFDNPVLPFNDGVYFASTEKSNIIRGWIFGTTLDSKTQSLLIVNNATNVVIKVCEFQFCNDPFLGVYYHKNNKSWMESEFRVYSSANNCTFEYVSQPFLMDLEGKQGNFKNLREFVFKNIDGYFKIYSKHTPINLVRDLPQGFSALEPLVDLPIGINITRFQTLLALHRSYLTPGDSSSGWTAGAAAYYVGYLQPRTFLLKYNENGTITDAVDCALDPLSETKCTLKSFTVEKGIYQTSNFRVQPTESIVRFPNITNLCPFGEVFNATRFASVYAWNRKRISNCVADYSVLYNSASFSTFKCYGVSPTKLNDLCFTNVYADSFVIRGDEVRQIAPGQTGKIADYNYKLPDDFTGCVIAWNSNNLDSKVGGNYNYLYRLFRKSNLKPFERDISTEIYQAGSTPCNGVEGFNCYFPLQSYGFQPTNGVGYQPYRVVVLSFELLHAPATVCGPKKSTNLVKNKCVNFNFNGLTGTGVLTESNKKFLPFQQFGRDIADTTDAVRDPQTLEILDITPCSFGGVSVITPGTNTSNQVAVLYQDVNCTEVPVAIHADQLTPTWRVYSTGSNVFQTRAGCLIGAEYVNNSYECDIPIGAGICASYQTQTNSPRRARSVASQSIIAYTMSLGAENSVAYSNNSIACPTNFTISVTTEILPVSMTKTSVDCTMYICGDSTECSNLLLQYGSFCTQLNRALTGIAVEQDKNTQEVFAQVKQIYKTPPIKDFGGFNFSQILPDPSKPSKRSFIEDLLFNKVTLADAGFIKQYGDCLGDIAARDLICAQKFNGLTVLPPLLTDEMIAQYTSALLAGTITSGWTFGAGAALQIPFAMQMAYRFNGIGVTQNVLYENQKLIANQFNSAIGKIQDSLSSTASALGKLQDVVNQNAQALNTLVKQLSSNFGAISSVLNDILSRLDKVEAEVQIDRLITGRLQSLQTYVTQQLIRAAEIRASANLAATKMSECVLGQSKRVDFCGKGYHLMSFPQSAPHGVVFLHVTYVPAQEKNFTTAPAICHDGKAHFPREGVFVSNGTHWFVTQRNFCEPQIITTDNTFVSGNCDVVIGIVNNTVYDPLQPELDSFKEELDKYFKNHTSPDVDLGDISGINASVVNIQKEIDRLNEVAKNLNESLIDLQELGKYEQYIKWPWYIWLGFIAGLIAIVMVTIMLCCMTSCCSCLKGCCSCGSCCKFDEDDSEPVLKGVKLHYT

SEQ ID NO: 700 - protein, 1273 aa, Artificial Sequence
  SARS-CoV-2/England/20102000506/2020__EPI_ISL_415147 spike protein (1-1273)(I714C_Y1110C)
MFVFLVLLPLVSSQCVNLTTRTQLPPAYTNSFTRGVYYPDKVFRSSVLHSTQDLFLPFFSNVTWFHAIHVSGTNGTKRFDNPVLPFNDGVYFASTEKSNIIRGWIFGTTLDSKTQSLLIVNNATNVVIKVCEFQFCNDPFLGVYYHKNNKSWMESEFRVYSSANNCTFEYVSQPFLMDLEGKQGNFKNLREFVFKNIDGYFKIYSKHTPINLVRDLPQGFSALEPLVDLPIGINITRFQTLLALHRSYLTPGDSSSGWTAGAAAYYVGYLQPRTFLLKYNENGTITDAVDCALDPLSETKCTLKSFTVEKGIYQTSNFRVQPTESIVRFPNITNLCPFGEVFNATRFASVYAWNRKRISNCVADYSVLYNSASFSTFKCYGVSPTKLNDLCFTNVYADSFVIRGDEVRQIAPGQTGKIADYNYKLPDDFTGCVIAWNSNNLDSKVGGNYNYLYRLFRKSNLKPFERDISTEIYQAGSTPCNGVEGFNCYFPLQSYGFQPTNGVGYQPYRVVVLSFELLHAPATVCGPKKSTNLVKNKCVNFNFNGLTGTGVLTESNKKFLPFQQFGRDIADTTDAVRDPQTLEILDITPCSFGGVSVITPGTNTSNQVAVLYQGVNCTEVPVAIHADQLTPTWRVYSTGSNVFQTRAGCLIGAEHVNNSYECDIPIGAGICASYQTQTNSPRRARSVASQSIIAYTMSLGAENSVAYSNNSIACPTNFTISVTTEILPVSMTKTSVDCTMYICGDSTECSNLLLQYGSFCTQLNRALTGIAVEQDKNTQEVFAQVKQIYKTPPIKDFGGFNFSQILPDPSKPSKRSFIEDLLFNKVTLADAGFIKQYGYCLGDIAARDLICAQKFNGLTVLPPLLTDEMIAQYTSALLAGTITSGWTFGAGAALQIPFAMQMAYRFNGIGVTQNVLYENQKLIANQFNSAIGKIQDSLSSTASALGKLQDVVNQNAQALNTLVKQLSSNFGAISSVLNDILSRLDKVEAEVQIDRLITGRLQSLQTYVTQQLIRAAEIRASANLAATKMSECVLGQSKRVDFCGKGYHLMSFPQSAPHGVVFLHVTYVPAQEKNFTTAPAICHDGKAHFPREGVFVSNGTHWFVTQRNFCEPQIITTDNTFVSGNCDVVIGIVNNTVYDPLQPELDSFKEELDKYFKNHTSPDVDLGDISGINASVVNIQKEIDRLNEVAKNLNESLIDLQELGKYEQYIKWPWYIWLGFIAGLIAIVMVTIMLCCMTSCCSCLKGCCSCGSCCKFDEDDSEPVLKGVKLHYT

SEQ ID NO: 701 - protein, 1273 aa, Artificial Sequence
  SARS-CoV-2/Belgium/VAG-03013/2020__EPI_ISL_415155 spike protein (1-1273)(I714C_Y1110C)
MFVFLVLLPLVSSQCVNLTTRTQLPPAYTNSFTRGVYYPDKVFRSSVLHSTQDLFLPFFSNVTWFHAIHVSGTNGTKRFDNPVLPFNDGVYFASTEKSNIIRGWIFGTTLDSKTQSLLIVNNATNVVIKVCEFQFCNDPFLGVYYHKNNKSWMESEFRVYSSANNCTFEYVSQPFLMDLEGKQGNFKNLREFVFKNIDGYFKIYSKHTPINLVRDLPQGFSALEPLVDLPIGINITRFQTLLALHRSYLTPGDSSSGWTAGAAAYYVGYLQPRTFLLKYNENGTITDAVDCALDPLSETKCTLKSFTVEKGIYQTSNFRVQPTESIVRFPNITNLCPFGEVFNATRFASVYAWNRKRISNCVADYSVLYNSASFSTFKCYGVSPTKLNDLCFTNVYADSFVIRGDEVRQIAPGQTGKIADYNYKLPDDFTGCVIAWNSNNLDSKVGGNYNYLYRLFRKSNLKPFERDISTEIYQAGSTPCNGVEGFNCYFPLQSYGFQPTNGVGYQPYRVVVLSFELLHAPATVCGPKKSTNLVKNKCVNFNFNGLTGTGVLTESNKKFLPFQQFGRDIADTTDAVRDPQTLEILDITPCSFGGVSVITPGTNTSNQVAVLYQGVNCTEVPVAIHADQLTPTWRVYSTGSNVFQTRAGCLIGAEHVNNSYECDIPIGAGICASYQTQTNSPRRARSVASQSIIAYTMSLGAENSVAYSNNSIACPTNFTISVTTEILPVSMTKTSVDCTMYICGDSTECSNLLLQYGSFCTQLNRALTGIAVEQDKNTQEVFAQVKQIYKTPPIKDFGGFNFSQILPDPSKPSKRSFIEDLLFNKVTLADAGFIKQYGDCLGDIAARDLICAQKFNGLTVLPPLLTDEMIAQYTSALLAGTITSGWTFGAGAALQIPFAMQMAYRFNGIGVTQNVLYENQKLIANQFNSAIGKIQDSLSSTATALGKLQDVVNQNAQALNTLVKQLSSNFGAISSVLNDILSRLDKVEAEVQIDRLITGRLQSLQTYVTQQLIRAAEIRASANLAATKMSECVLGQSKRVDFCGKGYHLMSFPQSAPHGVVFLHVTYVPAQEKNFTTAPAICHDGKAHFPREGVFVSNGTHWFVTQRNFCEPQIITTDNTFVSGNCDVVIGIVNNTVYDPLQPELDSFKEELDKYFKNHTSPDVDLGDISGINASVVNIQKEIDRLNEVAKNLNESLIDLQELGKYEQYIKWPWYIWLGFIAGLIAIVMVTIMLCCMTSCCSCLKGCCSCGSCCKFDEDDSEPVLKGVKLHYT

SEQ ID NO: 702 - protein, 1273 aa, Artificial Sequence
  SARS-CoV-2/Belgium/BC-03016/2020__EPI_ISL_415157 spike protein (1-1273)(I714C_Y1110C)
MFVFLVLLPLVSSQCVNLTTRTQLPPAYTNSFTRGVYYPDKVFRSSVLHSTQDLFLPFFSNVTWFHAIHVSGTNGTKRFDNPVLPFNDGVYFASTEKSNIIRGWIFGTTLDSKTQSLLIVNNATNVVIKVCEFQFCNDPFLGVYYHKNNKSWMESEFRVYSSANNCTFEYVSQPFLMDLEGKQGNFKNLREFVFKNIDGYFKIYSKHTPINLVRDLPQGFSALEPLVDLPIGINITRFQTLLALHRSYLTPGDSSSGWTAGAAAYYVGYLQPRTFLLKYNENGTITDAVDCALDPLSETKCTLKSFTVEKGIYQTSNFRVQPTESIVRFPNITNLCPFGEVFNATRFASVYAWNRKRISNCVADYSVLYNSASFSTFKCYGVSPTKLNDLCFTNVYADSFVIRGDEVRQIAPGQTGKIADYNYKLPDDFTGCVIAWNSNNLDSKVGGNYNYLYRLFRKSNLKPFERDISTEIYQAGSTPCNGVEGFNCYFPLQSYGFQPTNGVGYQPYRVVVLSFELLHAPATVCGPKKSTNLVKNKCVNFNFNGLTGTGVLTESNKKFLPFQQFGRDIADTTDAVRDPQTLEILDITPCSFGGVSVITPGTNTSNQVAVLYQGVNCTEVPVAIHADQLTPTWRVYSTGSNVFQTRAGCLIGAEHVNNSYECDIPIGAGICASYQTQTNSPRRARSVASQSIIAYTMSLGAENSVAYSNNSIACPTNFTISVTTEILPVSMTKTSVDCTMYICGDSTECSNLLLQYGSFCTQLNRALTGIAVEQDKNTQEVFAQVKQIYKTPPIKDFGGFNFSQILPDPSKPSKRSFIEDLLFNKVTLADAGFIKQYGDCLGDIAARDLICAQKFNGLTVLPPLLTDEMIAQYTSALLAGTITSGWTFGAGAALQIPFAMQMAYRFNGIGVTQNVLYENQKLIANQFNSAIGKIQDSLSSTAPALGKLQDVVNQNAQALNTLVKQLSSNFGAISSVLNDILSRLDKVEAEVQIDRLITGRLQSLQTYVTQQLIRAAEIRASANLAATKMSECVLGQSKRVDFCGKGYHLMSFPQSAPHGVVFLHVTYVPAQEKNFTTAPAICHDGKAHFPREGVFVSNGTHWFVTQRNFCEPQIITTDNTFVSGNCDVVIGIVNNTVYDPLQPELDSFKEELDKYFKNHTSPDVDLGDISGINASVVNIQKEIDRLNEVAKNLNESLIDLQELGKYEQYIKWPWYIWLGFIAGLIAIVMVTIMLCCMTSCCSCLKGCCSCGSCCKFDEDDSEPVLKGVKLHYT

SEQ ID NO: 703 - protein, 1273 aa, Artificial Sequence
  SARS-CoV-2/Germany/BavPat3/2020__EPI_ISL_414521 spike protein (1-1273)(I714C_Y1110C)
MFVFLVLLPLVSSQCVNLTTRTQLPPAYTNSFTRGVYYPDKVFRSSVLHSTQDLFLPFFSNVTWFHAIHVSGTNGTKRFDNPVLPFNDGVYFASTEKSNIIRGWIFGTTLDSKTQSLLIVNNATNVVIKVCEFQFCNDPFLGVYYHKNNKSWMESEFRVYSSANNCTFEYVSQPFLMDLEGKQGNFKNLREFVFKNIDGYFKIYSKHTPINLVRDLPQGFSALEPLVDLPIGINITRFQTLLALHRSYLTPGDSSSGWTAGAAAYYVGYLQPRTFLLKYNENGTITDAVDCALDPLSETKCTLKSFTVEKGIYQTSNFRVQPTESIVRFPNITNLCPFGEVFNATRFASVYAWNRKRISNCVADYSVLYNSASFSTFKCYGVSPTKLNDLCFTNVYADSFVIRGDEVRQIAPGQTGKIADYNYKLPDDFTGCVIAWNSNNLDSKVGGNYNYLYRLFRKSNLKPFERDISTEIYQAGSTPCNGVEGFNCYFPLQSYGFQPTNGVGYQPYRVVVLSFELLHAPATVCGPKKSTNLVKNKCVNFNFNGLTGTGVLTESNKKFLPFQQFGRDIADTTDAVRDPQTLEILDITPCSFGGVSVITPGTNTSNQVAVLYQDVNCTEVPVAIHADQLTPTWRVYSTGSNVFQTRAGCLIGAEHVNNSYECDIPIGAGICASYQTQTNSPRRARSVASQSIIAYTMSLGAENSVAYSNNSIACPTNFTISVTTEILPVSMTKTSVDCTMYICGDSTECSNLLLQYGSFCTQLNRALTGIAVEQDKNTQQVFAQVKQIYKTPPIKDFGGFNFSQILPDPSKPSKRSFIEDLLFNKVTLADAGFIKQYGDCLGDIAARDLICAQKFNGLTVLPPLLTDEMIAQYTSALLAGTITSGWTFGAGAALQIPFAMQMAYRFNGIGVTQNVLYENQKLIANQFNSAIGKIQDSLSSTASALGKLQDVVNQNAQALNTLVKQLSSNFGAISSVLNDILSRLDKVEAEVQIDRLITGRLQSLQTYVTQQLIRAAEIRASANLAATKMSECVLGQSKRVDFCGKGYHLMSFPQSAPHGVVFLHVTYVPAQEKNFTTAPAICHDGKAHFPREGVFVSNGTHWFVTQRNFCEPQIITTDNTFVSGNCDVVIGIVNNTVYDPLQPELDSFKEELDKYFKNHTSPDVDLGDISGINASVVNIQKEIDRLNEVAKNLNESLIDLQELGKYEQYIKWPWYIWLGFIAGLIAIVMVTIMLCCMTSCCSCLKGCCSCGSCCKFDEDDSEPVLKGVKLHYT

SEQ ID NO: 704 - protein, 1273 aa, Artificial Sequence
  SARS-CoV-2/France/HF1805/2020__EPI_ISL_414628 spike protein (1-1273)(I714C_Y1110C)
MFVFLVLLPLVSSQCVNLTTRTQLPPAYTNSFTRGVYYPDKVFRSSVLHSTQDLFLPFFSNVTWFHAIHVSGTNGTKRFDNPVLPFNDGVYFASTEKSNIIRGWIFGTTLDSKTQSLLIVNNATNVVIKVCEFQFCNDPFLGVYYHKNNKSWMESEFRVYSSANNCTFEYVSQPFLMDLEGKQGNFKNLREFVFKNIDGYFKIYSKHTPINLVRDLPQGFSALEPLVDLPIGINITRFQTLLALHRSYLTPGDSSSGWTAGAAAYYVGYLQPRTFLLKYNENGTITDAVDCALDPLSETKCTLKSFTVEKGIYQTSNFRVQPTESIVRFPNITNLCPFGEVFNATRFASVYAWNRKRISNCVADYSVLYNSASFSTFKCYGVSPTKLNDLCFTNVYADSFVIRGDEVRQIAPGQTGKIADYNYKLPDDFTGCVIAWNSNNLDSKVGGNYNYLYRLFRKSNLKPFERDISTEIYQAGSTPCNGVEGFNCYFPLQSYGFQPTNGVGYQPYRVVVLSFELLHAPATVCGPKKSTNLVKNKCVNFNFNGLTGTGVLTESNKKFLPFQQFGRDIADTTDAVRDPQTLEILDITPCSFGGVSVITPGTNTSNQVAVLYQGVNCTEVPVAIHADQLTPTWRVYSTGSNVFQTRAGCLIGAEHVNNSYECDIPIGAGICASYQTQTNSPRRARSVASQSIIAYTMSLGAENSVAYSNNSIACPTNFTISVTTEILPVSMTKTSVDCTMYICGDSTECSNLLLQYGSFCTQLNRALTGIAVEQDKNTQEVFAQVKQIYKTPPIKDFGGFNFSQILPDPSKPSKRSFIEDLLFNKVTLADAGFIKQYGDCLGDIAARDLICAQKFNGLTVLPPLLTDEMIAQYTSALLAGTITSGWTFGAGAALQIPFAMQMAYRFNGIGVTQNVLYENQKLIANQFNSAIGKIQDSLSSTASALGKLQDVVNQNAQALNTLVKQLSSNFGAISSVLNDILSRLDKVEAEVQIDRLITGRLQSLQTYVTQQLIRAAEIRASANLAATKMSECVLGQSKRVDFCGKGYHLMSFPQSAPHGVVFLHVTYVPAQEKNFTTAPAICHDGKAHFPREGVFVSNGTHWFVTQRNFCEPQIITTDNTFVSGNCDVVIGVVNNTVYDPLQPELDSFKEELDKYFKNHTSPDVDLGDISGINASVVNIQKEIDRLNEVAKNLNESLIDLQELGKYEQYIKWPWYIWLGFIAGLIAIVMVTIMLCCMTSCCSCLKGCCSCGSCCKFDEDDSEPVLKGVKLHYT

SEQ ID NO: 705 - protein, 1273 aa, Artificial Sequence
  SARS-CoV-2/Netherlands/ZuidHolland_9/2020__EPI_ISL_414445 spike protein (1-1273)(I714C_Y1110C)
MFVFLVLLPLVSSQCVNLTTRTQLPPAYTNSFTRGVYYPDKVFRSSVLHSTQDLFLPFFSNVTWFHAIHVSGTNGTKRFDNPVLPFNDGVYFASTEKSNIIRGWIFGTTLDSKTQSLLIVNNATNVVIKVCEFQFCNDPFLGVYYHKNNKSWMESEFRVYSSANNCTFEYVSQPFLMDLEGKQGNFKNLREFVFKNIDGYFKIYSKHTPINLVRDLPQGFSALEPLVDLPIGINITRFQTLLALHRSYLTPGDSSSGWTAGAAAYYVGYLQPRTFLLKYNENGTITDAVDCALDPLSETKCTLKSFTVEKGIYQTSNFRVQPTESIVRFPNITNLCPFGEVFNATRFASVYAWNRKRISNCVADYSVLYNSASFSTFKCYGVSPTKLNDLCFTNVYADSFVIRGDEVRQIAPGQTGKIADYNYKLPDDFTGCVIAWNSNNLDSKVGGNYNYLYRLFRKSNLKPFERDISTEIYQAGSTPCNGVEGFNCYFPLQSYGFQPTNGVGYQPYRVVVLSFELLHAPATVCGPKKSTNLVKNKCVNFNFNGLTGTGVLTESNKKFLPFQQFGRDIADTTDAVRDPQTLEILDITPCSFGGVSVITPGTNTSNQVAVLYQGVNCTEVPVAIHADQLTPTWRVYSTGSNVFQTRAGCLIGAEHVNNSYECDIPIGAGICASYQTQTNSPRRARSVASQSIIAYTMSLGAENSVAYSNNSIACPTNFTISVTTEILPVSMTKTSVDCTMYICGDSTECSNLLLQYGSFCTQLNRALTGIAVEQDKNTQEVFAQVKQIYKTPPIKDFGGFNFSQILPDPSKPSKRSFIEDLLFNKVTLADAGFIKQYGDCLGDIAARDLICVQKFNGLTVLPPLLTDEMIAQYTSALLAGTITSGWTFGAGAALQIPFAMQMAYRFNGIGVTQNVLYENQKLIANQFNSAIGKIQDSLSSTASALGKLQDVVNQNAQALNTLVKQLSSNFGAISSVLNDILSRLDKVEAEVQIDRLITGRLQSLQTYVTQQLIRAAEIRASANLAATKMSECVLGQSKRVDFCGKGYHLMSFPQSAPHGVVFLHVTYVPAQEKNFTTAPAICHDGKAHFPREGVFVSNGTHWFVTQRNFCEPQIITTDNTFVSGNCDVVIGIVNNTVYDPLQPELDSFKEELDKYFKNHTSPDVDLGDISGINASVVNIQKEIDRLNEVAKNLNESLIDLQELGKYEQYIKWPWYIWLGFIAGLIAIVMVTIMLCCMTSCCSCLKGCCSCGSCCKFDEDDSEPVLKGVKLHYT

SEQ ID NO: 706 - protein, 1273 aa, Artificial Sequence
  SARS-CoV-2/Finland/FIN03032020A/2020__EPI_ISL_413602 spike protein (1-1273)(I714C_Y1110C)
MFVFLVLLPLVSSQCVNLTTRTQLPPAYTNSFTRGVYYPDKVFRSSVLHSTQDLFLPFFSNVTWFHAIHVSGTNGTKRFDNPVLPFNDGVYFASTEKSNIIRGWIFGTTLDSKTQSLLIVNNATNVVIKVCEFQFCNDPFLGVYYHKNNKSWMESEFRVYSSANNCTFEYVSQPFLMDLEGKQGNFKNLREFVFKNIDGYFKIYSKHTPINLVRDLPQGFSALEPLVDLPIGINITRFQTLLALHRSYLTPGDSSSGWTAGAAAYYVGYLQPRTFLLKYNENGTITDAVDCALDPLSETKCTLKSFTVEKGIYQTSNFRVQPTESIVRFPNITNLCPFGEVFNATRFASVYAWNRKRISNCVADYSVLYNSASFSTFKCYGVSPTKLNDLCFTNVYADSFVIRGDEVRQIAPGQTGKIADYNYKLPDDFTGCVISWNSNNLDSKVGGNYNYLYRLFRKSNLKPFERDISTEIYQAGSTPCNGVEGFNCYFPLQSYGFQPTNGVGYQPYRVVVLSFELLHAPATVCGPKKSTNLVKNKCVNFNFNGLTGTGVLTESNKKFLPFQQFGRDIADTTDAVRDPQTLEILDITPCSFGGVSVITPGTNTSNQVAVLYQGVNCTEVPVAIHADQLTPTWRVYSTGSNVFQTRAGCLIGAEHVNNSYECDIPIGAGICASYQTQTNSPRRARSVASQSIIAYTMSLGAENSVAYSNNSIACPTNFTISVTTEILPVSMTKTSVDCTMYICGDSTECSNLLLQYGSFCTQLNRALTGIAVEQDKNTQEVFAQVKQIYKTPPIKDFGGFNFSQILPDPSKPSKRSFIEDLLFNKVTLADAGFIKQYGDCLGDIAARDLICAQKFNGLTVLPPLLTDEMIAQYTSALLAGTITSGWTFGAGAALQIPFAMQMAYRFNGIGVTQNVLYENQKLIANQFNSAIGKIQDSLSSTASALGKLQDVVNQNAQALNTLVKQLSSNFGAISSVLNDILSRLDKVEAEVQIDRLITGRLQSLQTYVTQQLIRAAEIRASANLAATKMSECVLGQSKRVDFCGKGYHLMSFPQSAPHGVVFLHVTYVPAQEKNFTTAPAICHDGKAHFPREGVFVSNGTHWFVTQRNFCEPQIITTDNTFVSGNCDVVIGIVNNTVYDPLQPELDSFKEELDKYFKNHTSPDVDLGDISGINASVVNIQKEIDRLNEVAKNLNESLIDLQELGKYEQYIKWPWYIWLGFIAGLIAIVMVTIMLCCMTSCCSCLKGCCSCGSCCKFDEDDSEPVLKGVKLHYT

SEQ ID NO: 707 - protein, 1273 aa, Artificial Sequence
  SARS-CoV-2/France/GE1977/2020__EPI_ISL_414632 spike protein (1-1273)(I714C_Y1110C)
MFVFLVLLPLVSSQCVNLTTRTQLPPAYTNSFTRGVYYPDKVFRSSVLHSTQDLFLPFFSNVTWFHAIHVSGTNGTKRFDNPVLPFNDGVYFASTEKSNIIRGWIFGTTLDSKTQSLLIVNNATNVVIKVCEFQFCNDPFLGVYYHKNNKSWMESEFRVYSSANNCTFEYVSQPFLMDLEGKQGNFKNLREFVFKNIDGYFKIYSKHTPINLVRDLPQGFSALEPLVDLPIGINITRFQTLLALHRSYLTPGDSSSGWTAGAAAYYVGYLQPRTFLLKYNENGTITDAVDCALDPLSETKCTLKSFTVEKGIYQTSNFRVQPTESIVRFPNITNLCPFGEVFNATRFASVYAWNRKRISNCVADYSVLYNSASFSTFKCYGVSPTKLNDLCFTNVYADSFVIRGDEVRQIAPGQTGKIADYNYKLPDDFTGCVIAWNSNNLDSKVGGNYNYLYRLFRKSNLKPFERDISTEIYQAGSTPCNGVEGFNCYFPLQSYGFQPTNGVGYQPYRVVVLSFELLHAPATVCGPKKSTNLVKNKCVNFNFNGLTGTGVLTESNKKFLPFQQFGRDIADTTDAVRDPQTLEILDITPCSFGGVSVITPGTNTSNQVAVLYQGVNCTEVPVAIHADQLTPTWRVYSTGSNVFQTRAGCLIGAEHVNNSYECDIPIGAGICASYQTQTNSPRRARSVASQSIIAYTMSLGAENSVAYSNNSIACPTNFTISVTTEILPVSMTKTSVDCTMYICGDSTECSNLLLQYGSFCTQLNRALTGIAVEQDKNTQEVFAQVKQIYKTPPIKDFGGFNFSQILPDPSKPSKRSFIEDLLFNKVTLADAGFIKQYGDCLGDIAARDLICAQKFNGLTVLPPLLTDEMIAQYTSALLAGTITSGWTFGAGAALQIPFAMQMAYRFNGIGVTQNVLYENQKLIANQFNSAIGKIQDSLFSTASALGKLQDVVNQNAQALNTLVKQLSSNFGAISSVLNDILSRLDKVEAEVQIDRLITGRLQSLQTYVTQQLIRAAEIRASANLAATKMSECVLGQSKRVDFCGKGYHLMSFPQSAPHGVVFLHVTYVPAQEKNFTTAPAICHDGKAHFPREGVFVSNGTHWFVTQRNFCEPQIITTDNTFVSGNCDVVIGIVNNTVYDPLQPELDSFKEELDKYFKNHTSPDVDLGDISGINASVVNIQKEIDRLNEVAKNLNESLIDLQELGKYEQYIKWPWYIWLGFIAGLIAIVMVTIMLCCMTSCCSCLKGCCSCGSCCKFDEDDSEPVLKGVKLHYT

SEQ ID NO: 708 - protein, 1273 aa, Artificial Sequence
  SARS-CoV-2/Finland/FIN-313/2020__EPI_ISL_414641 spike protein (1-1273)(I714C_Y1110C)
MFVFLVLLPLVSSQCVNLTTRTQLPPAYTNSFTRGVYYPDKVFRSSVLHSTQDLFLPFFSNVTWFHAIHVSGTNGTKRFDNPVLPFNDGVYFASTEKSNIIRGWIFGTTLDSKTQSLLIVNNATNVVIKVCEFQFCNDPFLGVYYHKNNKSWMESEFRVYSSANNCTFEYVSQPFLMDLEGKQGNFKNLREFVFKNIDGYFKIYSKHTPINLVRDLPQGFSALEPLVDLPIGINITRFKTLLALHRSYLTPGDSSSGWTAGAAAYYVGYLQPRTFLLKYNENGTITDAVDCALDPLSETKCTLKSFTVEKGIYQTSNFRVQPTESIVRFPNITNLCPFGEVFNATRFASVYAWNRKRISNCVADYSVLYNSASFSTFKCYGVSPTKLNDLCFTNVYADSFVIRGDEVRQIAPGQTGKIADYNYKLPDDFTGCVIAWNSNNLDSKVGGNYNYLYRLFRKSNLKPFERDISTEIYQAGSTPCNGVEGFNCYFPLQSYGFQPTNGVGYQPYRVVVLSFELLHAPATVCGPKKSTNLVKNKCVNFNFNGLTGTGVLTESNKKFLPFQQFGRDIADTTDAVRDPQTLEILDITPCSFGGVSVITPGTNTSNQVAVLYQGVNCTEVPVAIHADQLTPTWRVYSTGSNVFQTRAGCLIGAEHVNNSYECDIPIGAGICASYQTQTNSPRRARSVASQSIIAYTMSLGAENSVAYSNNSIACPTNFTISVTTEILPVSMTKTSVDCTMYICGDSTECSNLLLQYGSFCTQLNRALTGIAVEQDKNTQEVFAQVKQIYKTPPIKDFGGFNFSQILPDPSKPSKRSFIEDLLFNKVTLADAGFIKQYGDCLGDIAARDLICAQKFNGLTVLPPLLTDEMIAQYTSALLAGTITSGWTFGAGAALQIPFAMQMAYRFNGIGVTQNVLYENQKLIANQFNSAIGKIQDSLSSTASALGKLQDVVNQNAQALNTLVKQLSSNFGAISSVLNDILSRLDKVEAEVQIDRLITGRLQSLQTYVTQQLIRAAEIRASANLAATKMSECVLGQSKRVDFCGKGYHLMSFPQSAPHGVVFLHVTYVPAQEKNFTTAPAICHDGKAHFPREGVFVSNGTHWFVTQRNFCEPQIITTDNTFVSGNCDVVIGIVNNTVYDPLQPELDSFKEELDKYFKNHTSPDVDLGDISGINASVVNIQKEIDRLNEVAKNLNESLIDLQELGKYEQYIKWPWYIWLGFIAGLIAIVMVTIMLCCMTSCCSCLKGCCSCGSCCKFDEDDSEPVLKGVKLHYT

SEQ ID NO: 709 - protein, 1273 aa, Artificial Sequence
  SARS-CoV-2/Netherlands/ZuidHolland_2/2020__EPI_ISL_414556 spike protein (1-1273)(I714C_Y1110C)
MFVFLVLLPLVSSQCVNLTTRTQLPPAYTNSFTRGVYYPDKVFRSSVLHSTQDLFLPFFSNVTWFHAIHVSGTNGTKRFDNPVLPFNDGVYFASTEKSNIIRGWIFGTTLDSKTQSLLIVNNATNVVIKVCEFQFCNDPFLGVYYHKNNKSWMESEFRVYSSANNCTFEYVSQPFLMDLEGKQGNFKNLREFVFKNIDGYFKIYSKHTPINLVRDLPQGFSALEPLVDLPIGINITRFQTLLALHRSYLTPGDSSSGWTAGAAAYYVGYLQPRTFLLKYNENGTITDAVDCALDPLSETKCTLKSFTVEKGIYQTSNFRVQPTESIVRFPNITNLCPFGEVFNATRFASVYAWNRKRISNCVADYSVLYNSASFSTFKCYGVSPTKLNDLCFTNVYADSFVIRGDEVRQIAPGQTGKIADYNYKLPDDFTGCVIAWNSNNLDSKVGGNYNYLYRLFRKSNLKPFERDISTEIYQAGSTPCNGVEGFNCYFPLQSYGFQPTNGVGYQPYRVVVLSFELLHAPATVCGPKKSTNLVKNKCVNFNFNGLTGTGVLTESNKKFLPFQQFGRDIADTTDAVRDPQTLEILDITPCSFGGVSVITPGTNTSNQVAVLYQGVNCTEVPVAIHADQLTPTWRVYSTGSNVFQTRAGCLIGAEHVNNSYECDIPIGAGICASYQTQTNSPRRARSVASQSIIAYTMSLGAENSVAYSNNSIACPTNFTISVTTEILPVSMTKTSVDCTMYICGDSTECSNLLLQYGSFCTQLNRALTGIALEQDKNTQEVFAQVKQIYKTPPIKDFGGFNFSQILPDPSKPSKRSFIEDLLFNKVTLADAGFIKQYGDCLGDIAARDLICAQKFNGLTVLPPLLTDEMIAQYTSALLAGTITSGWTFGAGAALQIPFAMQMAYRFNGIGVTQNVLYENQKLIANQFNSAIGKIQDSLSSTASALGKLQDVVNQNAQALNTLVKQLSSNFGAISSVLNDILSRLDKVEAEVQIDRLITGRLQSLQTYVTQQLIRAAEIRASANLAATKMSECVLGQSKRVDFCGKGYHLMSFPQSAPHGVVFLHVTYVPAQEKNFTTAPAICHDGKAHFPREGVFVSNGTHWFVTQRNFCEPQIITTDNTFVSGNCDVVIGIVNNTVYDPLQPELDSFKEELDKYFKNHTSPDVDLGDISGINASVVNIQKEIDRLNEVAKNLNESLIDLQELGKYEQYIKWPWYIWLGFIAGLIAIVMVTIMLCCMTSCCSCLKGCCSCGSCCKFDEDDSEPVLKGVKLHYT

SEQ ID NO: 710 - protein, 1273 aa, Artificial Sequence
  SARS-CoV-2/USA/WA-UW31/2020__EPI_ISL_414618 spike protein (1-1273)(I714C_Y1110C)
MFVFLVLLPLVSSQCVNLTTRTQLPPAYTNSFTRGVYYPDKVFRSSVLHSTQDLFLPFFSNVTWFHAIHVSGTNGTKRFDNPVLPFNDGVYFASTEKSNIIRGWIFGTTLDSKTQSLLIVNNATNVVIKVCEFQFCNDPFLGVYYHKNNKSWMESEFRVYSSANNCTFEYVSQPFLMDLEGKQGNFKNLREFVFKNIDGYFKIYSKHTPINLVRDLPQGFSALEPLVDLPIGINITRFQTLLALHRSYLTPGDSSSGWTAGAAAYYVGYLQPRTFLLKYNENGTITDAVDCALDPLSETKCTLKSFTVEKGIYQTSNFRVQPTESIVRFPNITNLCPFGEVFNATRFASVYAWNRKRISNCVADYSVLYNSASFSTFKCYGVSPTKLNDLCFTNVYADSFVIRGDEVRQIAPGQTGKIADYNYKLPDDFTGCVIAWNSNNLDSKVGGNYNYLYRLFRKSNLKPFERDISTEIYQAGSTPCNGAEGFNCYFPLQSYGFQPTNGVGYQPYRVVVLSFELLHAPATVCGPKKSTNLVKNKCVNFNFNGLTGTGVLTESNKKFLPFQQFGRDIADTTDAVRDPQTLEILDITPCSFGGVSVITPGTNTSNQVAVLYQDVNCTEVPVAIHADQLTPTWRVYSTGSNVFQTRAGCLIGAEHVNNSYECDIPIGAGICASYQTQTNSPRRARSVASQSIIAYTMSLGAENSVAYSNNSIACPTNFTISVTTEILPVSMTKTSVDCTMYICGDSTECSNLLLQYGSFCTQLNRALTGIAVEQDKNTQEVFAQVKQIYKTPPIKDFGGFNFSQILPDPSKPSKRSFIEDLLFNKVTLADAGFIKQYGDCLGDIAARDLICAQKFNGLTVLPPLLTDEMIAQYTSALLAGTITSGWTFGAGAALQIPFAMQMAYRFNGIGVTQNVLYENQKLIANQFNSAIGKIQDSLSSTASALGKLQDVVNQNAQALNTLVKQLSSNFGAISSVLNDILSRLDKVEAEVQIDRLITGRLQSLQTYVTQQLIRAAEIRASANLAATKMSECVLGQSKRVDFCGKGYHLMSFPQSAPHGVVFLHVTYVPAQEKNFTTAPAICHDGKAHFPREGVFVSNGTHWFVTQRNFCEPQIITTDNTFVSGNCDVVIGIVNNTVYDPLQPELDSFKEELDKYFKNHTSPDVDLGDISGINASVVNIQKEIDRLNEVAKNLNESLIDLQELGKYEQYIKWPWYIWLGFIAGLIAIVMVTIMLCCMTSCCSCLKGCCSCGSCCKFDEDDSEPVLKGVKLHYT

SEQ ID NO: 711 - protein, 1273 aa, Artificial Sequence
  SARS-CoV-2/South Korea/SNU01/2020__EPI_ISL_411929 spike protein (1-1273)(I714C_Y1110C)
MFVFLVLLPLVSSQCVNLTTRTQLPPAYTNSFTRGVYYPDKVFRSSVLHSTQDLFLPFFSNVTWFHAIHVSGTNGTKRFDNPVLPFNDGVYFASTEKSNIIRGWIFGTTLDSKTQSLLIVNNATNVVIKVCEFQFCNDPFLGVYYHKNNKSWMESEFRVYSSANNCTFEYVSQPFLMDLEGKQGNFKNLREFVFKNIDGYFKIYSKHTPINLVRDLPQGFWALEPLVDLPIGINITRFQTLLALHRSYLTPGDSSSGWTAGAAAYYVGYLQPRTFLLKYNENGTITDAVDCALDPLSETKCTLKSFTVEKGIYQTSNFRVQPTESIVRFPNITNLCPFGEVFNATRFASVYAWNRKRISNCVADYSVLYNSASFSTFKCYGVSPTKLNDLCFTNVYADSFVIRGDEVRQIAPGQTGKIADYNYKLPDDFTGCVIAWNSNNLDSKVGGNYNYLYRLFRKSNLKPFERDISTEIYQAGSTPCNGVEGFNCYFPLQSYGFQPTNGVGYQPYRVVVLSFELLHAPATVCGPKKSTNLVKNKCVNFNFNGLTGTGVLTESNKKFLPFQQFGRDIADTTDAVRDPQTLEILDITPCSFGGVSVITPGTNTSNQVAVLYQDVNCTEVPVAIHADQLTPTWRVYSTGSNVFQTRAGCLIGAEHVNNSYECDIPIGAGICASYQTQTNSPRRARSVASQSIIAYTMSLGAENSVAYSNNSIACPTNFTISVTTEILPVSMTKTSVDCTMYICGDSTECSNLLLQYGSFCTQLNRALTGIAVEQDKNTQEVFAQVKQIYKTPPIKDFGGFNFSQILPDPSKPSKRSFIEDLLFNKVTLADAGFIKQYGDCLGDIAARDLICAQKFNGLTVLPPLLTDEMIAQYTSALLAGTITSGWTFGAGAALQIPFAMQMAYRFNGIGVTQNVLYENQKLIANQFNSAIGKIQDSLSSTASALGKLQDVVNQNAQALNTLVKQLSSNFGAISSVLNDILSRLDKVEAEVQIDRLITGRLQSLQTYVTQQLIRAAEIRASANLAATKMSECVLGQSKRVDFCGKGYHLMSFPQSAPHGVVFLHVTYVPAQEKNFTTAPAICHDGKAHFPREGVFVSNGTHWFVTQRNFCEPQIITTDNTFVSGNCDVVIGIVNNTVYDPLQPELDSFKEELDKYFKNHTSPDVDLGDISGINASVVNIQKEIDRLNEVAKNLNESLIDLQELGKYEQYIKWPWYIWLGFIAGLIAIVMVTIMLCCMTSCCSCLKGCCSCGSCCKFDEDDSEPVLKGVKLHYT

SEQ ID NO: 712 - protein, 1273 aa, Artificial Sequence
  SARS-CoV-2/China/WF0004/2020__EPI_ISL_413694 spike protein (1-1273)(I714C_Y1110C)
MFVFLVLLPLVSSQCVNLTTRTQLPPAYTNSFTRGVYYPDKVFRSSVLHSTQDLFLPFFSNVTWFHAIHVSGTNGTKRFDNPVLPFNDGVYFASTEKSNIIRGWIFGTTLDSKTQSLLIVNNATNVVIKVCEFQFCNDPFLGVYYHKNNKSWTESEFRVYSSANNCTFEYVSQPFLMDLEGKQGNFKNLREFVFKNIDGYFKIYSKHTPINLVRDLPQGFSALEPLVDLPIGINITRFQTLLALHRSYLTPGDSSSGWTAGAAAYYVGYLQPRTFLLKYNENGTITDAVDCALDPLSETKCTLKSFTVEKGIYQTSNFRVQPTESIVRFPNITNLCPFGEVFNATRFASVYAWNRKRISNCVADYSVLYNSASFSTFKCYGVSPTKLNDLCFTNVYADSFVIRGDEVRQIAPGQTGKIADYNYKLPDDFTGCVIAWNSNNLDSKVGGNYNYLYRLFRKSNLKPFERDISTEIYQAGSTPCNGVEGFNCYFPLQSYGFQPTNGVGYQPYRVVVLSFELLHAPATVCGPKKSTNLVKNKCVNFNFNGLTGTGVLTESNKKFLPFQQFGRDIADTTDAVRDPQTLEILDITPCSFGGVSVITPGTNTSNQVAVLYQDVNCTEVPVAIHADQLTPTWRVYSTGSNVFQTRAGCLIGAEHVNNSYECDIPIGAGICASYQTQTNSPRRARSVASQSIIAYTMSLGAENSVAYSNNSIACPTNFTISVTTEILPVSMTKTSVDCTMYICGDSTECSNLLLQYGSFCTQLNRALTGIAVEQDKNTQEVFAQVKQIYKTPPIKDFGGFNFSQILPDPSKPSKRSFIEDLLFNKVTLADAGFIKQYGDCLGDIAARDLICAQKFNGLTVLPPLLTDEMIAQYTSALLAGTITSGWTFGAGAALQIPFAMQMAYRFNGIGVTQNVLYENQKLIANQFNSAIGKIQDSLSSTASALGKLQDVVNQNAQALNTLVKQLSSNFGAISSVLNDILSRLDKVEAEVQIDRLITGRLQSLQTYVTQQLIRAAEIRASANLAATKMSECVLGQSKRFDFCGKGYHLMSFPQSAPHGVVFLHVTYVPAQEKNFTTAPAICHDGKAHFPREGVFVSNGTHWFVTQRNFCEPQIITTDNTFVSGNCDVVIGIVNNTVYDPLQPELDSFKEELDKYFKNHTSPDVDLGDISGINASVVNIQKEIDRLNEVAKNLNESLIDLQELGKYEQYIKWPWYIWLGFIAGLIAIVMVTIMLCCMTSCCSCLKGCCSCGSCCKFDEDDSEPVLKGVKLHYT

SEQ ID NO: 713 - protein, 1273 aa, Artificial Sequence
  SARS-CoV-2/China/WF0028/2020__EPI_ISL_413791 spike protein (1-1273)(I714C_Y1110C)
MFVFLVLLPLVSSQCVNLTTRTQLPPAYTNSFTRGVYYPDKVFRSSVLHSTQDLFLPFFSNVTWFHAIHVSGTNGTKRFDNPVLPFNDGVYFASTEKSNIIRGWIFGTTLDSKTQSLLIVNNATNVVIKVCEFQFCNDPFLGVYYHKNNKSWMESEFRVYSSANNCTFEYVSQPFLMDLEGKQGNFKNLREFVFKNIDGYFKIYSKHTPINLVRDLPQGFSALEPLVDLPIGINITRFQTLLALHRSYLTPGDSSSGWTAGAAAYYVGYLQPRTFLLKYNENGTITDAVDCALDPLSETKCTLKSFTVEKGIYQTSNFRVQPTESIVRFPNITNLCPFGEVFNATRFASVYAWNRKRISNCVADYSVLYNSASFSTFKCYGVSPTKLNDLCFTNVYADSFVIRGDEVRQIAPGQTGKIADYNYKLPDDFTGCVIAWNSNNLDSKVGGNYNYLYRLFRKSNLKPFERDISTEIYQAGSTPCNGVEGFNCYFPLQSYGFQPTNGVGYQPYRVVVLSFELLHAPATVCGPKKSTNLVKNKCVNFNFNGLTGTGVLTESNKKFLPFQQFGRDIADTTDAVRDPQTLEILDITPCSFGGVSVITPGTNTSNQVAVLYQDVNCTEVPVAIHADQLTPTWRVYSTGSNVFQTRAGCLIGAEHVNNSYECDIPIGAGICASYQTQTNSPRRARSVASQSIIAYTMSLGAENSVAYSNNSIACPTNFTISVTTEILPVSMTKTSVDCTMYICGDSTECSNLLLQYGSFCTQLNRALTGIAVEQDKNTQEVFAQVKQIYKTPPIKDFGGFNFSQILPDPSKPSKRSFIEDLLFNKVTLADAGFIKQYGDCLGDIAARDLICAQKFNGLTVLPPLLTDEMIAQYTSALLAGTITSGWTFGAGAALQIPFAMQMAYRFNGIGVTQNVLYENQKLIANQFNSAIGKIQDSLSSTASALGKLQDVVNQNAQALNTLVKQLSSNFGAISSVLNDILSRLDKVEAEVQIDRLITGRLQSLQTYVTQQLIRAAEIRASANLAATKMSECVLGQSKRVDFCGKGYHLMSFPQSAPHGVVFLHVTYVPAQEKNFTTAPAICHDGKAHFPREGVFVSNGTHWFVTQRNFCEPQIITTDNTFVSGNCDVVIGIVNNTVYDPLQPELESFKEELDKYFKNHTSPDVDLGDISGINASVVNIQKEIDRLNEVAKNLNESLIDLQELGKYEQYIKWPWYIWLGFIAGLIAIVMVTIMLCCMTSCCSCLKGCCSCGSCCKFDEDDSEPVLKGVKLHYT

SEQ ID NO: 714 - protein, 1273 aa, Artificial Sequence
  SARS-CoV-2/2019-nCoV/USA-CruiseA-18/2020__MT159716.1 spike protein (1-1273)(I714C_Y1110C)
MFVFLVLLPLVSSQCVNLTTRTQLPPAYTNSFTRGVYYPDKVFRSSVLHSTQDLFLPFFSNVTWFHAIHVSGTNGTKRFDNPVLPFNDGVYFASTEKSNIIRGWIFGTTLDSKTQSLLIVNNATNVVIKVCEFQFCNDPFLGVYYHKNNKSWMESELRVYSSANNCTFEYVSQPFLMDLEGKQGNFKNLREFVFKNIDGYFKIYSKHTPINLVRDLPQGFSALEPLVDLPIGINITRFQTLLALHRSYLTPGDSSSGWTAGAAAYYVGYLQPRTFLLKYNENGTITDAVDCALDPLSETKCTLKSFTVEKGIYQTSNFRVQPTESIVRFPNITNLCPFGEVFNATRFASVYAWNRKRISNCVADYSVLYNSASFSTFKCYGVSPTKLNDLCFTNVYADSFVIRGDEVRQIAPGQTGKIADYNYKLPDDFTGCVIAWNSNNLDSKVGGNYNYLYRLFRKSNLKPFERDISTEIYQAGSTPCNGVEGFNCYFPLQSYGFQPTNGVGYQPYRVVVLSFELLHAPATVCGPKKSTNLVKNKCVNFNFNGLTGTGVLTESNKKFLPFQQFGRDIADTTDAVRDPQTLEILDITPCSFGGVSVITPGTNTSNQVAVLYQDVNCTEVPVAIHADQLTPTWRVYSTGSNVFQTRAGCLIGAEHVNNSYECDIPIGAGICASYQTQTNSPRRARSVASQSIIAYTMSLGAENSVAYSNNSIACPTNFTISVTTEILPVSMTKTSVDCTMYICGDSTECSNLLLQYGSFCTQLNRALTGIAVEQDKNTQEVFAQVKQIYKTPPIKDFGGFNFSQILPDPSKPSKRSFIEDLLFNKVTLADAGFIKQYGDCLGDIAARDLICAQKFNGLTVLPPLLTDEMIAQYTSALLAGTITSGWTFGAGAALQIPFAMQMAYRFNGIGVTQNVLYENQKLIANQFNSAIGKIQDSLSSTASALGKLQDVVNQNAQALNTLVKQLSSNFGAISSVLNDILSRLDKVEAEVQIDRLITGRLQSLQTYVTQQLIRAAEIRASANLAATKMSECVLGQSKRVDFCGKGYHLMSFPQSAPHGVVFLHVTYVPAQEKNFTTAPAICHDGKAHFPREGVFVSNGTHWFVTQRNFCEPQIITTDNTFVSGNCDVVIGIVNNTVYDPLQPELDSFKEELDKYFKNHTSPDVDLGDISGINASVVNIQKEIDRLNEVAKNLNESLIDLQELGKYEQYIKWPWYIWLGFIAGLIAIVMVTIMLCCMTSCCSCLKGCCSCGSCCKFDEDDSEPVLKGVKLHYT

SEQ ID NO: 715 - protein, 1273 aa, Artificial Sequence
  SARS-CoV-2/SARS-CoV-2/Yunnan-01/human/2020/CHN__MT049951.1 spike protein (1-1273)(I714C_Y1110C)
MFVFLVLLPLVSSQCVNLTTRTQLPPANTNSFTRGVYYPDKVFRSSVLHSTQDLFLPFFSNVTWFHAIHVSGTNGTKRFDNPVLPFNDGVYFASTEKSNIIRGWIFGTTLDSKTQSLLIVNNATNVVIKVCEFQFCNDPFLGVYYHKNNKSWMESEFRVYSSANNCTFEYVSQPFLMDLEGKQGNFKNLREFVFKNIDGYFKIYSKHTPINLVRDLPQGFSALEPLVDLPIGINITRFQTLLALHRSYLTPGDSSSGWTAGAAAYYVGYLQPRTFLLKYNENGTITDAVDCALDPLSETKCTLKSFTVEKGIYQTSNFRVQPTESIVRFPNITNLCPFGEVFNATRFASVYAWNRKRISNCVADYSVLYNSASFSTFKCYGVSPTKLNDLCFTNVYADSFVIRGDEVRQIAPGQTGKIADYNYKLPDDFTGCVIAWNSNNLDSKVGGNYNYLYRLFRKSNLKPFERDISTEIYQAGSTPCNGVEGFNCYFPLQSYGFQPTNGVGYQPYRVVVLSFELLHAPATVCGPKKSTNLVKNKCVNFNFNGLTGTGVLTESNKKFLPFQQFGRDIADTTDAVRDPQTLEILDITPCSFGGVSVITPGTNTSNQVAVLYQDVNCTEVPVAIHADQLTPTWRVYSTGSNVFQTRAGCLIGAEHVNNSYECDIPIGAGICASYQTQTNSPRRARSVASQSIIAYTMSLGAENSVAYSNNSIACPTNFTISVTTEILPVSMTKTSVDCTMYICGDSTECSNLLLQYGSFCTQLNRALTGIAVEQDKNTQEVFAQVKQIYKTPPIKDFGGFNFSQILPDPSKPSKRSFIEDLLFNKVTLADAGFIKQYGDCLGDIAARDLICAQKFNGLTVLPPLLTDEMIAQYTSALLAGTITSGWTFGAGAALQIPFAMQMAYRFNGIGVTQNVLYENQKLIANQFNSAIGKIQDSLSSTASALGKLQDVVNQNAQALNTLVKQLSSNFGAISSVLNDILSRLDKVEAEVQIDRLITGRLQSLQTYVTQQLIRAAEIRASANLAATKMSECVLGQSKRVDFCGKGYHLMSFPQSAPHGVVFLHVTYVPAQEKNFTTAPAICHDGKAHFPREGVFVSNGTHWFVTQRNFCEPQIITTDNTFVSGNCDVVIGIVNNTVYDPLQPELDSFKEELDKYFKNHTSPDVDLGDISGINASVVNIQKEIDRLNEVAKNLNESLIDLQELGKYEQYIKWPWYIWLGFIAGLIAIVMVTIMLCCMTSCCSCLKGCCSCGSCCKFDEDDSEPVLKGVKLHYT

SEQ ID NO: 716 - protein, 1273 aa, Artificial Sequence
  SARS-CoV-2/USA/WA-UW292/2020__EPI_ISL_418077 spike protein (1-1273)(I714C_Y1110C)
MFVFLVLLPLVSSQCVNLTTRTQLPPAYTNSFTRGVYYPDKVFRSSVLHSTQDLFLPFFSNVTWFHAIHVSGTNGTKRFDNPVLPFNDGVYFASTEKSNIIRGWIFGTTLDSKTQSLLIVNNATNVVIKVCEFQFCNDPFLGVYYHKNNKSWMESEFRVYSSANNCTFEYVSQPFLMDLEGKQGNFKNLREFVFKNIDGYFKIYSKHTPINLVRDLPQGFSALEPLVDLPIGINITRFQTLLALHRSYLTPGDSSSGWTAGAAAYYVGYLQPRTFLLKYNENGTITDAVDCALDPLSETKCTLKSFTVEKGIYQTSNFRVQPTESIVRFPNITNLCPFGEVFNATRFASVYAWNRKRISNCVADYSVLYNSASFSTFKCYGVSPTKLNDLCFTNVYADSFVIRGDEVRQIAPGQTGKIADYNYKLPDDFTGCVIAWNSNNLDSKVGGNYNYLYRLFRKSNLKPFERDISTEIYQASSTPCNGVEGFNCYFPLQSYGFQPTNGVGYQPYRVVVLSFELLHAPATVCGPKKSTNLVKNKCVNFNFNGLTGTGVLTESNKKFLPFQQFGRDIADTTDAVRDPQTLEILDITPCSFGGVSVITPGTNTSNQVAVLYQDVNCTEVPVAIHADQLTPTWRVYSTGSNVFQTRAGCLIGAEHVNNSYECDIPIGAGICASYQTQTNSPRRARSVASQSIIAYTMSLGAENSVAYSNNSIACPTNFTISVTTEILPVSMTKTSVDCTMYICGDSTECSNLLLQYGSFCTQLNRALTGIAVEQDKNTQEVFAQVKQIYKTPPIKDFGGFNFSQILPDPSKPSKRSFIEDLLFNKVTLADAGFIKQYGDCLGDIAARDLICAQKFNGLTVLPPLLTDEMIAQYTSALLAGTITSGWTFGAGAALQIPFAMQMAYRFNGIGVTQNVLYENQKLIANQFNSAIGKIQDSLSSTASALGKLQDVVNQNAQALNTLVKQLSSNFGAISSVLNDILSRLDKVEAEVQIDRLITGRLQSLQTYVTQQLIRAAEIRASANLAATKMSECVLGQSKRVDFCGKGYHLMSFPQSAPHGVVFLHVTYVPAQEKNFTTAPAICHDGKAHFPREGVFVSNGTHWFVTQRNFCEPQIITTDNTFVSGNCDVVIGIVNNTVYDPLQPELDSFKEELDKYFKNHTSPDVDLGDISGINASVVNIQKEIDRLNEVAKNLNESLIDLQELGKYEQYIKWPWYIWLGFIAGLIAIVMVTIMLCCMTSCCSCLKGCCSCGSCCKFDEDDSEPVLKGVKLHYT

SEQ ID NO: 717 - protein, 1273 aa, Artificial Sequence
  SARS-CoV-2/Iceland/192/2020__EPI_ISL_417819 spike protein (1-1273)(I714C_Y1110C)
MFVFFVLLPLVSSQCVNLTTRTQLPPAYTNSFTRGVYYPDKVFRSSVLHSTQDLFLPFFSNVTWFHAIHVSGTNGTKRFDNPVLPFNDGVYFASTEKSNIIRGWIFGTTLDSKTQSLLIVNNATNVVIKVCEFQFCNDPFLGVYYHKNNKSWMESEFRVYSSANNCTFEYVSQPFLMDLEGKQGNFKNLREFVFKNIDGYFKIYSKHTPINLVRDLPQGFSALEPLVDLPIGINITRFQTLLALHRSYLTPGDSSSGWTAGAAAYYVGYLQPRTFLLKYNENGTITDAVDCALDPLSETKCTLKSFTVEKGIYQTSNFRVQPTESIVRFPNITNLCPFGEVFNATRFASVYAWNRKRISNCVADYSVLYNSASFSTFKCYGVSPTKLNDLCFTNVYADSFVIRGDEVRQIAPGQTGKIADYNYKLPDDFTGCVIAWNSNNLDSKVGGNYNYLYRLFRKSNLKPFERDISTEIYQAGSTPCNGVEGFNCYFPLQSYGFQPTNGVGYQPYRVVVLSFELLHAPATVCGPKKSTNLVKNKCVNFNFNGLTGTGVLTESNKKFLPFQQFGRDIADTTDAVRDPQTLEILDITPCSFGGVSVITPGTNTSNQVAVLYQGVNCTEVPVAIHADQLTPTWRVYSTGSNVFQTRAGCLIGAEHVNNSYECDIPIGAGICASYQTQTNSPRRARSVASQSIIAYTMSLGAENSVAYSNNSIACPTNFTISVTTEILPVSMTKTSVDCTMYICGDSTECSNLLLQYGSFCTQLNRALTGIAVEQDKNTQEVFAQVKQIYKTPPIKDFGGFNFSQILPDPSKPSKRSFIEDLLFNKVTLADAGFIKQYGDCLGDIAARDLICAQKFNGLTVLPPLLTDEMIAQYTSALLAGTITSGWTFGAGAALQIPFAMQMAYRFNGIGVTQNVLYENQKLIANQFNSAIGKIQDSLSSTASALGKLQDVVNQNAQALNTLVKQLSSNFGAISSVLNDILSRLDKVEAEVQIDRLITGRLQSLQTYVTQQLIRAAEIRASANLAATKMSECVLGQSKRVDFCGKGYHLMSFPQSAPHGVVFLHVTYVPAQEKNFTTAPAICHDGKAHFPREGVFVSNGTHWFVTQRNFCEPQIITTDNTFVSGNCDVVIGIVNNTVYDPLQPELDSFKEELDKYFKNHTSPDVDLGDISGINASVVNIQKEIDRLNEVAKNLNESLIDLQELGKYEQYIKWPWYIWLGFIAGLIAIVMVTIMLCCMTSCCSCLKGCCSCGSCCKFDEDDSEPVLKGVKLHYT

SEQ ID NO: 718 - protein, 1273 aa, Artificial Sequence
  SARS-CoV-2/Belgium/ULG-6939/2020__EPI_ISL_417020 spike protein (1-1273)(I714C_Y1110C)
MFVFLVLLPLVSSQCVNLTTRTQLPPAYTNSFTRGVYYPDKVFRSSVLHSTQDLFLPFFSNVTWFHAIHVSGTNGTKRFDNPVLPFNDGVYFASTEKSNIIRGWIFGTTLDSKTQSLLIVNNATNVVIKVCEFQFCNDPFLGVYYHKNNKSWMESEFRVYSSANNCTFEYVSQPFLMDLEGKQGNFKNLREFVFKNIDGYFKIYSKHTPINLVRDLPQGFSALEPLVDLPIGINITRFQTLLALHRSYLTPGDSSSGWTAGAAAYYVGYLQPRTFLLKYNENGTITDAVDCALDPLSETKCTLKSFTVEKGIYQTSNFRVQPTESIVRFPNITNLCPFGEVFNATRFASVYAWNRKRISNCVADYSVLYNSASFSTFKCYGVSPTKLNDLCFTNVYADSFVIRGDEVRQIAPGQTGKIADYNYKLPDDFTGCVIAWNSNNLDSKVGGNYNYLYRLFRKSNLKPFERDISTEIYQAGSTPCNGVEGFNCYFPLQSYGFQPTNGVGYQPYRVVVLSFELLHAPATVCGPKKSTNLVKNKCVNFNFNGLTGTGVLTESNKKFLPFQQFGRDIADTTDAVRDPQTLEILDITPCSFGGVSVITPGTNTSNQVAVLYQGVNCTEVPVAIHADQLTPTWRVYSTGSNVFQTRAGCLIGAEHVNNSYECDIPIGAGICASYQTQTNSPRRARSVASQSIIAYTMSLGAENSVVYSNNSIACPTNFTISVTTEILPVSMTKTSVDCTMYICGDSTECSNLLLQYGSFCTQLNRALTGIAVEQDKNTQEVFAQVKQIYKTPPIKDFGGFNFSQILPDPSKPSKRSFIEDLLFNKVTLADAGFIKQYGDCLGDIAARDLICAQKFNGLTVLPPLLTDEMIAQYTSALLAGTITSGWTFGAGAALQIPFAMQMAYRFNGIGVTQNVLYENQKLIANQFNSAIGKIQDSLSSTASALGKLQDVVNQNAQALNTLVKQLSSNFGAISSVLNDILSRLDKVEAEVQIDRLITGRLQSLQTYVTQQLIRAAEIRASANLAATKMSECVLGQSKRVDFCGKGYHLMSFPQSAPHGVVFLHVTYVPAQEKNFTTAPAICHDGKAHFPREGVFVSNGTHWFVTQRNFCEPQIITTDNTFVSGNCDVVIGIVNNTVYDPLQPELDSFKEELDKYFKNHTSPDVDLGDISGINASVVNIQKEIDRLNEVAKNLNESLIDLQELGKYEQYIKWPWYIWLGFIAGLIAIVMVTIMLCCMTSCCSCLKGCCSCGSCCKFDEDDSEPVLKGVKLHYT

SEQ ID NO: 719 - protein, 1273 aa, Artificial Sequence
  SARS-CoV-2/France/HF2496/2020__EPI_ISL_418231 spike protein (1-1273)(I714C_Y1110C)
MFVFLVLLPLVSSQCVNLTTRTQLPPAYTNSFTRGVYYPDKVFRSSVLHSTQDLFLPFFSNVTWFHAIHVSGTNGTKRFDNPVLPFNDGVYFASTEKSNIIRGWIFGTTLDSKTQSLLIVNNATNVVIKVCEFQFCNDPFLGVYYHKNNKSWMESEFRVYSSANNCTFEYVSQPFLMDLEGKQGNFKNLREFVFKNIDGYFKIYSKHTPINLVRDLPQGFSALEPLVDLPIGINITRFQTLLALHRSYLTPGDSSSGWTAGAAAYYVGYLQPRTFLLKYNENGTITDAVDCALDPLSETKCTLKSFTVEKGIYQTSNFRVQPTESIVRFPNITNLCPFGEVFNATRFASVYAWNRKRISNCVADYSVLYNSASFSTFKCYGVSPTKLNDLCFTNVYADSFVIRGDEVRQIAPGQTGKIADYNYKLPDDFTGCVIAWNSNNLDSKVGGNYNYLYRLFRKSNLKPFERDISTEIYQAGSTPCNGVEGFNCYFPLQSYGFQPTNGVGYQPYRVVVLSFELLHAPATVCGPKKSTNLVKNKCVNFNFNGLTGTGVLTESNKKFLPFQQFGRDIADTTDAVRDPQTLEILDITPCSFGGVSVITPGTNTSNQVAVLYQGVNCTEVPVAIHADQLTPTWRVYSTGSNVFQTRAGCLIGAEHVNNSYECDIPIGAGICASYQTQTNSPRRARSVASQSIIAYTMSLGAENSVAYSNNSIACPTNFTISVTTEILPVSMTKTSVDCTMYICGDSTECSNLLLQYGSFCTQLNRALTGIAVEQDKNTQEVFAQVKQIYKTPPIKDFGGFNFSQILPDPSKPSKRSFIEDLLFNKVTLADAGFIKQYGDCLGDIVARDLICAQKFNGLTVLPPLLTDEMIAQYTSALLAGTITSGWTFGAGAALQIPFAMQMAYRFNGIGVTQNVLYENQKLIANQFNSAIGKIQDSLSSTASALGKLQDVVNQNAQALNTLVKQLSSNFGAISSVLNDILSRLDKVEAEVQIDRLITGRLQSLQTYVTQQLIRAAEIRASANLAATKMSECVLGQSKRVDFCGKGYHLMSFPQSAPHGVVFLHVTYVPAQEKNFTTAPAICHDGKAHFPREGVFVSNGTHWFVTQRNFCEPQIITTDNTFVSGNCDVVIGIVNNTVYDPLQPELDSFKEELDKYFKNHTSPDVDLGDISGINASVVNIQKEIDRLNEVAKNLNESLIDLQELGKYEQYIKWPWYIWLGFIAGLIAIVMVTIMLCCMTSCCSCLKGCCSCGSCCKFDEDDSEPVLKGVKLHYT

SEQ ID NO: 720 - protein, 1273 aa, Artificial Sequence
  SARS-CoV-2/USA/WA-UW291/2020__EPI_ISL_418076 spike protein (1-1273)(I714C_Y1110C)
MFVFLVLLPLVSSQCVNLTTRTQLPPAYTNSFTRGVYYPDKVFRSSVLHSTQDLFLPFFSNVTWFHAIHVSGTNGTKRFDNPVLPFNDGVYFASTEKSNIIRGWIFGTTLDSKTQSLLIVNNATNVVIKVCEFQFCNDPFLGVYYHKNNKSWMESEFRVYSSANNCTFEYVSQPFLMDLEGKQGNFKNLREFVFKNIDGYFKIYSKHTPINLVRDLPQGFSALEPLVDLPIGINITRFQTLLALHRSYLTPGDSSSGWTAGAAAYYVGYLQPRTFLLKYNENGTITDAVDCALDPLSETKCTLKSFTVEKGIYQTSNFRVQPTESIVRFPNITNLCPFGEVFNATRFASVYAWNRKRISNCVADYSVLYNSASFSTFKCYGVSPTKLNDLCFTNVYADSFVIRGDEVRQIAPGQTGKIADYNYKLPDDFTGCVIAWNSNNLDSKVGGNYNYLYRLFRKSNLKPFERDISTEIYQAGSTPCNGVEGFNCYFPLQSYGFQPTNGVGYQPYRVVVLSFELLHAPATVCGPKKSTNLVKNKCVNFNFNGLTGTGVLTESNKKFLPFQQFGRDIADTTDAVRDPQTLEILDITPCSFGGVSVITPGTNTSNQVAVLYQGVNCTEVPVAIHADQLTPTWRVYSTGSNVFQTRAGCLIGAEHVNNSYECDIPIGAGICASYQTQTNSPRRARSVASQSIIAYTMSLGAENSVAYSNNSIACPTNFTISVTTEILPVSMTKTSVDCTMYICGDSTECSNLLLQYGSFCTQLNRALTGIAVEQDKNTQEVFAQVKQIYKTPPIKDFGGFNFSQILPDPSKPSKRSFIEDLLFNKVTLADAGFIKQYGDCLGDIAARDLICAQKFNGLTVLPPLLTDEMIAQYTSALLAGTITSGWTFGAGAALQIPFAMQMAYRFNGIGVTQNVLYENQKLIANQFNSAIGKIQYSLSSTASALGKLQDVVNQNAQALNTLVKQLSSNFGAISSVLNDILSRLDKVEAEVQIDRLITGRLQSLQTYVTQQLIRAAEIRASANLAATKMSECVLGQSKRVDFCGKGYHLMSFPQSAPHGVVFLHVTYVPAQEKNFTTAPAICHDGKAHFPREGVFVSNGTHWFVTQRNFCEPQIITTDNTFVSGNCDVVIGIVNNTVYDPLQPELDSFKEELDKYFKNHTSPDVDLGDISGINASVVNIQKEIDRLNEVAKNLNESLIDLQELGKYEQYIKWPWYIWLGFIAGLIAIVMVTIMLCCMTSCCSCLKGCCSCGSCCKFDEDDSEPVLKGVKLHYT

SEQ ID NO: 721 - protein, 1273 aa, Artificial Sequence
  SARS-CoV-2/Portugal/PT0034/2020__EPI_ISL_418019 spike protein (1-1273)(I714C_Y1110C)
MFVFLVLLPLVSSQCVNLTTRTQLPPAYTNSFTRGVYYPDKVFRSSVLHSTQDLFLPFFSNVTWFHAIHVSGTNGTKRFDNPVLPFNDGVYFASTEKSNIIRGWIFGTTLDSKTQSLLIVNNATNVVIKVCEFQFCNDPFLGVYYHKNNKSWMESEFRVYSSANNCTFEYVSQPFLMDLEGKQGNFKNLREFVFKNIDGYFKIYSKHTPINLVRDLPQGFSALEPLVDLPIGINITRFQTLLALHRSYLTPGDSSSGWTAGAAAYYVGYLQPRTFLLKYNENGTITDAVDCALDPLSETKCTLKSFTVEKGIYQTSNFRVQPTESIVRFPNITNLCPFGEVFNATRFASVYAWNRKRISNCVADYSVLYNSASFSTFKCYGVSPTKLNDLCFTNVYADSFVIRGDEVRQIAPGQTGKIADYNYKLPDDFTGCVIAWNSNNLDSKVGGNYNYLYRLFRKSNLKPFERDISTEIYQAGSTPCNGVEGFNCYFPLQSYGFQPTNGVGYQPYRVVVLSFELLHAPATVCGPKKSTNLVKNKCVNFNFNGLTGTGVLTESNKKFLPFQQFGRDIADTTDAVRDPQTLEILDITPCSFGGVSVITPGTNTSNQVAVLYQGVNCTEVPVAIHADQLTPTWRVYSTGSNVFQTRAGCLIGAEHVNNSYECDIPIGAGICASYQTQTNSPRRARSVASQSIIAYTMSLGAENSVAYSNNSIACPTNFTISVTTEILPVSMTKTSVDCTMYICGDSTECSNLLLQYGSFCTQLNRALTGIAVEQDKNTQEVFAQVKQIYKTPPIKDFGGFNFSQILPDPSKPSKRSFIEDLLFNKVTLADAGFIKQYGDCLGDIAARDLICAQKFNGLTVLPPLLTDEMIAQYTSALLAGTITSGWTFGAGAALQIPFAMQMAYRFNGIGVTQNVLYENQKLIANQFNSAIGKIQDSLSSTASALGKLQDVVNQNAQALNTLVKQLSSNFGAISSVLNDILSRLDKVEAEVQIDRLITGRLQSLQTYVTQQLIRAAEIRASANLAATKMSECVLGQSKRVDFCGKGYHLMSFPQSAPHGVVFLHVTYVPAQEKNFTTAPAICHDGKAHFPREGVFVSNGTHWFVTQRNFCEPQIITTDNTFVSGNCDVVIGIVNNTVYDPLQPELDSFKEELDKYFKNHTSPDVDLGDISGINASVVNIQKEIDRLNEVAKNLNESLIDLQELGKYEQYIKWPWYIWLGFIAGLIAIVMVTIMLCCITSCCSCLKGCCSCGSCCKFDEDDSEPVLKGVKLHYT

SEQ ID NO: 722 - protein, 1273 aa, Artificial Sequence
  SARS-CoV-2/Iceland/202/2020__EPI_ISL_417750 spike protein (1-1273)(I714C_Y1110C)
MFVFLVLLPLVSSQCVNLTTRTQLPPAYTNSFTRGVYYPDKVFRSSVLHSTQDLFLPFFSNVTWFHAIHVSGTNGTKRFDNPVLPFNDGVYFASTEKSNIIRGWIFGTTLDSKTQSLLIVNNATNVVIKVCEFQFCNDPFLGVYYHKNNKSWMESEFRVYSSANNCTFEYVSQPFLMDLEGKQGNFKNLREFVFKNIDGYFKIYSKHTPINLVRDLPQGFSALEPLVDLPIGINITRFQTLLALHRSYLTPGDSSSGWTAGAAAYYVGYLQPRTFLLKYNENGTITDAVDCALDPLSETKCTLKSFTVEKGIYQTSNFRVQPTESIVRFPNITNLCPFGEVFNATRFASVYAWNRKRISNCVADYSVLYNSASFSTFKCYGVSPTKLNDLCFTNVYADSFVIRGDEVRQIAPGQTGKIADYNYKLPDDFTGCVIAWNSNNLDSKVGGNYNYLYRLFRKSNLKPFERDISTEIYQAGSTPCNGVEGFNCYFPLQSYGFQPTNGVGYQPYRVVVLSFELLHAPATVCGPKKSTNLVKNKCVNFNFNGLTGTGVLTESNKKFLPFQQFGRDIADTTDAVRDPQTLEILDITPCSFGGVSVITPGTNTSNQVAVLYQDVNCTEVPVAIHADQLTPTWRVYSTGSNVFQTRAGCLIGAEHVNNSYECDIPIGAGICASYQTQTNSPRRARSVASQSIIAYTMSLGAENSVAYSNNSIACPTNFTISVTTEILPVSMTKTSVDCTMYICGDSTECSNLLLQYGSFCTQLNRALTGIAVEQDKNTQEVFAQVKQIYKTPPIKDFGGFNFSQILPDPSKPSKRSFIEDLLFNKVTLADAGFIKQYGDCLGDIAARDLICAQKFNGLTVLPPLLTDEMIAQYTSALLAGTITSGWTFGAGAALQIPFAMQMAYRFNGIGVTQNVLYENQKLIANQFNSAIGKIQDSLSSTASALGKLQDVVNQNAQALNTLVKQLSSNFGAISSVLNDILSRLDKVEAEVQIDRLITGRLQSLQTYVTQQLIRAAEIRASANLAATKMSECVLGQSKRVDFCGKGYHLMSFPQSAPHGVVFLHVTYVPAQEKNFTTAPAICHDGKAHFPREGVFVSNGTHWFVTQRNFCEPQIITTDNTFVSGNCDVVIGIVNNTVYDPLQPELDSFKEELDKYFKNHTSPDVDLGDIPGINASVVNIQKEIDRLNEVAKNLNESLIDLQELGKYEQYIKWPWYIWLGFIAGLIAIVMVTIMLCCMTSCCSCLKGCCSCGSCCKFDEDDSEPVLKGVKLHYT

SEQ ID NO: 723 - protein, 1273 aa, Artificial Sequence
  SARS-CoV-2/USA/WA-UW261/2020__EPI_ISL_418046 spike protein (1-1273)(I714C_Y1110C)
MFVFLVLLPLVSSQCVNLTTRTQLPPAYTNSFTRGVYYPDKVFRSSVLHSTQDLFLPFFSNVTWFHAIHVSGTNGTKRFDNPVLPFNDGVYFASTEKSNIIRGWIFGTTLDSKTQSLLIVNNATNVVIKVCEFQFCNDPFLGVYYHKNNKSWMESEFRVYSSANNCTFEYVSQPFLMDLEGKQGNFKNLREFVFKNIDGYFKIYSKHTPINLVRDLPQGFSALEPLVDLPIGINITRFQTLLALHRSYLTPGDSSSGWTAGAAAYYVGYLQPRTFLLKYNENGTITDAVDCALDPLSETKCTLKSFTVEKGIYQTSNFRVQPTESIVRFPNITNLCPFGEVFNATRFTSVYAWNRKRISNCVADYSVLYNSASFSTFKCYGVSPTKLNDLCFTNVYADSFVIRGDEVRQIAPGQTGKIADYNYKLPDDFTGCVIAWNSNNLDSKVGGNYNYLYRLFRKSNLKPFERDISTEIYQAGSTPCNGVEGFNCYFPLQSYGFQPTNGVGYQPYRVVVLSFELLHAPATVCGPKKSTNLVKNKCVNFNFNGLTGTGVLTESNKKFLPFQQFGRDIADTTDAVRDPQTLEILDITPCSFGGVSVITPGTNTSNQVAVLYQDVNCTEVPVAIHADQLTPTWRVYSTGSNVFQTRAGCLIGAEHVNNSYECDIPIGAGICASYQTQTNSPRRARSVASQSIIAYTMSLGAENSVAYSNNSIACPTNFTISVTTEILPVSMTKTSVDCTMYICGDSTECSNLLLQYGSFCTQLNRALTGIAVEQDKNTQEVFAQVKQIYKTPPIKDFGGFNFSQILPDPSKPSKRSFIEDLLFNKVTLADAGFIKQYGDCLGDIAARDLICAQKFNGLTVLPPLLTDEMIAQYTSALLAGTITSGWTFGAGAALQIPFAMQMAYRFNGIGVTQNVLYENQKLIANQFNSAIGKIQDSLSSTASALGKLQDVVNQNAQALNTLVKQLSSNFGAISSVLNDILSRLDKVEAEVQIDRLITGRLQSLQTYVTQQLIRAAEIRASANLAATKMSECVLGQSKRVDFCGKGYHLMSFPQSAPHGVVFLHVTYVPAQEKNFTTAPAICHDGKAHFPREGVFVSNGTHWFVTQRNFCEPQIITTDNTFVSGNCDVVIGIVNNTVYDPLQPELDSFKEELDKYFKNHTSPDVDLGDISGINASVVNIQKEIDRLNEVAKNLNESLIDLQELGKYEQYIKWPWYIWLGFIAGLIAIVMVTIMLCCMTSCCSCLKGCCSCGSCCKFDEDDSEPVLKGVKLHYT

SEQ ID NO: 724 - protein, 1273 aa, Artificial Sequence
  SARS-CoV-2/Portugal/PT0035/2020__EPI_ISL_418020 spike protein (1-1273)(I714C_Y1110C)
MFVFLVLLPLVSSQCVNLTTRTQLPPAYTNSFTRGVYYPDKVFRSSVLHSTQDLFLPFFSNVTWFHAIHVSGTNGTKRFDNPVLPFNDGVYFASTEKSNIIRGWIFGTTLDSKTQSLLIVNNATNVVIKVCEFQFCNDPFLGVYYHKNNKSWMESEFRVYSSANNCTFEYVSQPFLMDLEGKQGNFKNLREFVFKNIDGYFKIYSKHTPINLVRDLPQGFSALEPLVDLPIGINITRFQTLLALHRSYLTPGDSSSGWTAGAAAYYVGYLQPRTFLLKYNENGTITDAVDCALDPLSETKCTLKSFTVEKGIYQTSNFRVQPTESIVRFPNITNLCPFGEVFNATRFASVYAWNRKRISNCVADYSVLYNSASFSTFKCYGVSPTKLNDLCFTNVYADSFVIRGDEVRQIAPGQTGKIADYNYKLPDDFTGCVIAWNSNNLDSKVGGNYNYLYRLFRKSNLKPFERDISTEIYQAGSTPCNGVEGFNCYFPLQSYGFQPTNGVGYQPYRVVVLSFELLHAPATVCGPKKSTNLVKNKCVNFNFNGLTGTGVLTESNKKFLPFQQFGRDIADTTDAVRDPQTLEILDITPCSFGGVSVITPGTNTSNQVAVLYQDVNCTEVPVAIHADQLTPTWRVYSTGSNVFQTRAGCLIGAEHVNNSYECDIPIGAGICASYQTQTNSPRRARSVASQSIIAYTMSLGAENSVAYSNNSIACPTNFTISVTTEILPVSMTKTSVDCTMYICGDSTECSNLLLQYGSFCTQLNRALTGIAVEQDKNTQEVFAQVKQIYKTPPIKDFGGFNFSQILPDPSKPSKRSFIEDLLFNKVTLADAGFIKQYGDCLGDISARDLICAQKFNGLTVLPPLLTDEMIAQYTSALLAGTITSGWTFGAGAALQIPFAMQMAYRFNGIGVTQNVLYENQKLIANQFNSAIGKIQDSLSSTASALGKLQDVVNQNAQALNTLVKQLSSNFGAISSVLNDILSRLDKVEAEVQIDRLITGRLQSLQTYVTQQLIRAAEIRASANLAATKMSECVLGQSKRVDFCGKGYHLMSFPQSAPHGVVFLHVTYVPAQEKNFTTAPAICHDGKAHFPREGVFVSNGTHWFVTQRNFCEPQIITTDNTFVSGNCDVVIGIVNNTVYDPLQPELDSFKEELDKYFKNHTSPDVDLGDISGINASVVNIQKEIDRLNEVAKNLNESLIDLQELGKYEQYIKWPWYIWLGFIAGLIAIVMVTIMLCCMTSCCSCLKGCCSCGSCCKFDEDDSEPVLKGVKLHYT

SEQ ID NO: 725 - protein, 1273 aa, Artificial Sequence
  SARS-CoV-2/USA/NY-NYUMC7/2020__EPI_ISL_418192 spike protein (1-1273)(I714C_Y1110C)
MFVFLVLLPLVSSQCVNLTTRTQLPPAYTNSFTRGVYYPDKVFRSSVLHSTQDLFLPFFSNVTWFHAIHVSGTNGTKRFDNPVLPFNDGVYFASTEKSNIIRGWIFGTTLDSKTQSLLIVNNATNVVIKVCEFQFCNDPFLGVYHHKNNKSWMESEFRVYSSANNCTFEYVSQPFLMDLEGKQGNFKNLREFVFKNIDGYFKIYSKHTPINLVRDLPQGFSALEPLVDLPIGINITRFQTLLALHRSYLTPGDSSSGWTAGAAAYYVGYLQPRTFLLKYNENGTITDAVDCALDPLSETKCTLKSFTVEKGIYQTSNFRVQPTESIVRFPNITNLCPFGEVFNATRFASVYAWNRKRISNCVADYSVLYNSASFSTFKCYGVSPTKLNDLCFTNVYADSFVIRGDEVRQIAPGQTGKIADYNYKLPDDFTGCVIAWNSNNLDSKVGGNYNYLYRLFRKSNLKPFERDISTEIYQAGSTPCNGVEGFNCYFPLQSYGFQPTNGVGYQPYRVVVLSFELLHAPATVCGPKKSTNLVKNKCVNFNFNGLTGTGVLTESNKKFLPFQQFGRDIADTTDAVRDPQTLEILDITPCSFGGVSVITPGTNTSNQVAVLYQGVNCTEVPVAIHADQLTPTWRVYSTGSNVFQTRAGCLIGAEHVNNSYECDIPIGAGICASYQTQTNSPRRARSVASQSIIAYTMSLGAENSVAYSNNSIACPTNFTISVTTEILPVSMTKTSVDCTMYICGDSTECSNLLLQYGSFCTQLNRALTGIAVEQDKNTQEVFAQVKQIYKTPPIKDFGGFNFSQILPDPSKPSKRSFIEDLLFNKVTLADAGFIKQYGDCLGDIAARDLICAQKFNGLTVLPPLLTDEMIAQYTSALLAGTITSGWTFGAGAALQIPFAMQMAYRFNGIGVTQNVLYENQKLIANQFNSAIGKIQDSLSSTASALGKLQDVVNQNAQALNTLVKQLSSNFGAISSVLNDILSRLDKVEAEVQIDRLITGRLQSLQTYVTQQLIRAAEIRASANLAATKMSECVLGQSKRVDFCGKGYHLMSFPQSAPHGVVFLHVTYVPAQEKNFTTAPAICHDGKAHFPREGVFVSNGTHWFVTQRNFCEPQIITTDNTFVSGNCDVVIGIVNNTVYDPLQPELDSFKEELDKYFKNHTSPDVDLGDISGINASVVNIQKEIDRLNEVAKNLNESLIDLQELGKYEQYIKWPWYIWLGFIAGLIAIVMVTIMLCCMTSCCSCLKGCCSCGSCCKFDEDDSEPVLKGVKLHYT

SEQ ID NO: 726 - protein, 1273 aa, Artificial Sequence
  SARS-CoV-2/Iceland/189/2020__EPI_ISL_417709 spike protein (1-1273)(I714C_Y1110C)
MFVFLVLLPLVSSQCVNLTTRTQLPPAYTNSFTRGVYYPDKVFRSSVLHSTQDLFLPFFSNVTWFHAIHVSGTNGTKRFDNPVLPFNDGVYFASTEKSNIIRGWIFGTTLDSKTQSLLIVNNATNVVIKVCEFQFCNDPFLGVYYHKNNKSWMESEFRVYSSANNCTFEYVSQPFLMDLEGKQGNFKNLREFVFKNIDGYFKIYSKHTPINLVRDLPQGFSALEPLVDLPIGINITRFQTLLALHRSYLTPGDSSSGWTAGAAAYYVGYLQPRTFLLKYNENGTITDAVDCALDPLSETKCTLKSFTVEKGIYQTSNFRVQPTESIVRFPNITNLCPFGEVFNATRFASVYAWNRKRISNCVADYSVLYNSASFSTFKCYGVSPTKLNDLCFTNVYADSFVIRGDEVRQIAPGQTGKIADYNYKLPDDFTGCVIAWNSNNLDSKVGGNYNYLYRLFRKSNLKPFERDISTEIYQAGSTPCNGVEGFNCYFPLQSYGFQPTNGVGYQPYRVVVLSFELLHAPATVCGPKKSTNLVKNKCVNFNFNGLTGTGVLTESNKKFLPFQQFGRDIADTTDAVRDPQTLEILDITPCSFGGVSVITPGTNTSNQVAVLYQGVNCTEVPVAIHADQLTPTWRVYSTGSNVFQTRAGCLIGAEHVNNSYECDIPIGAGICASYQTQTNSPRRARSVASQSIIAYTMSLGAENSVAYSNNSIACPTNFTISVTTEILPVSMTKTSVDCTMYICGDSTECSNLLLQYGSFCTQLNRALTGIAVEQDKNTQEVFAQVKQIYKTPPIKDFGGFNFSQILPDPSKPSKRSFIEDLLFNKVTLADAGFTKQYGDCLGDIAARDLICAQKFNGLTVLPPLLTDEMIAQYTSALLAGTITSGWTFGAGAALQIPFAMQMAYRFNGIGVTQNVLYENQKLIANQFNSAIGKIQDSLSSTASALGKLQDVVNQNAQALNTLVKQLSSNFGAISSVLNDILSRLDKVEAEVQIDRLITGRLQSLQTYVTQQLIRAAEIRASANLAATKMSECVLGQSKRVDFCGKGYHLMSFPQSAPHGVVFLHVTYVPAQEKNFTTAPAICHDGKAHFPREGVFVSNGTHWFVTQRNFCEPQIITTDNTFVSGNCDVVIGIVNNTVYDPLQPELDSFKEELDKYFKNHTSPDVDLGDISGINASVVNIQKEIDRLNEVAKNLNESLIDLQELGKYEQYIKWPWYIWLGFIAGLIAIVMVTIMLCCMTSCCSCLKGCCSCGSCCKFDEDDSEPVLKGVKLHYT

SEQ ID NO: 727 - protein, 1273 aa, Artificial Sequence
  SARS-CoV-2/Australia/NSW56/2020__EPI_ISL_417408 spike protein (1-1273)(I714C_Y1110C)
MFVFLVLLPLVSSQCVNLTTRTQLPPAYTNSFTRGVYYPDKVFRSSVLHSTQDLFLPFFSNVTWFHAIHVSGTNGTKRFDNPVLPFNDGVYFASTEKSNIIRGWIFGTTLDSKTQSLLIVNNATNVVIKVCEFQFCNDPFLGVYYHKNNKSWMESEFRVYSSANNCTFEYVSQPFLMDLEGKQGNFKNLREFVFKNIDGYFKIYSKHTPINLVRDLPQGFSALEPLVDLPIGINITRFQTLLALHRSYLTPGDSSSGWTAGAAAYYVGYLQPRTFLLKYNENGTITDAVDCALDPLSETKCTLKSFTVEKGIYQTSNFRVQPTESIVRFPNITNLCPFGEVFNATRFASVYAWNRKRISNCVADYSVLYNSASFSTFKCYGVSPTKLNDLCFTNVYADSFVIRGDEVRQIAPGQTGKIADYNYKLPDDFTGCVIAWNSNNLDSKVGGNYNYLYRLFRKSNLKPFERDISTEIYQAGSTPCNGVEGFNCYFPLQSYGFQPTNGVGYQPYRVVVLSFELLHAPATVCGPKKSTNLVKNKCVNFNFNGLTGTGVLTESNKKFLPFQQFGRDIADTTDAVRDPQTLEILDITPCSFGGVSVITPGTNTSNQVAVLYQDVNCTEVPVAIHADQLTPTWRVYSTGSNVFQTRAGCLIGAEHVNNSYECDIPIGAGICASYQTQTNSPRRARSVASQSIIAYTMSLGAENSVAYSNNSIACPTNFTISVTTEILPVSMTKTSVDCTMYICGDSTECSNLLLQYGSFCTQLNRALTGIAVEQDKNTQEVFAQVKQIYKTPPIKDFGGFNFSQILPDSSKPSKRSFIEDLLFNKVTLADAGFIKQYGDCLGDIAARDLICAQKFNGLTVLPPLLTDEMIAQYTSALLAGTITSGWTFGAGAALQIPFAMQMAYRFNGIGVTQNVLYENQKLIANQFNSAIGKIQDSLSSTASALGKLQDVVNQNAQALNTLVKQLSSNFGAISSVLNDILSRLDKVEAEVQIDRLITGRLQSLQTYVTQQLIRAAEIRASANLAATKMSECVLGQSKRVDFCGKGYHLMSFPQSAPHGVVFLHVTYVPAQEKNFTTAPAICHDGKAHFPREGVFVSNGTHWFVTQRNFCEPQIITTDNTFVSGNCDVVIGIVNNTVYDPLQPELDSFKEELDKYFKNHTSPDVDLGDISGINASVVNIQKEIDRLNEVAKNLNESLIDLQELGKYEQYIKWPWYIWLGFIAGLIAIVMVTIMLCCMTSCCSCLKGCCSCGSCCKFDEDDSEPVLKGVKLHYT

SEQ ID NO: 728 - protein, 1273 aa, Artificial Sequence
  SARS-CoV-2/Iceland/280/2020__EPI_ISL_417608 spike protein (1-1273)(I714C_Y1110C)
MFVFLVLLPLVSSQCVNLTTRTQLPPAYTNSFTRGVYYPDKVFRSSVLHSTQDLFLPFFSNVTWFHAIHVSGTNGTKRFDNPVLPFNDGVYFASTEKSNIIRGWIFGTTLDSKTQSLLIVNNATNVVIKVCEFQFCNDPFLGVYYHKNNKSWMESEFRVYSSANNCTFEYVSQPFLMDLEGKQGNFKNLREFVFKNIDGYFKIYSKHTPINLVRDLPQGFSALEPLVDLPIGINITRFQTLLALHRSYLTPGDSSSGWTAGAAAYYVGYLQPRTFLLKYNENGTITDAVDCALDPLSETKCTLKSFTVEKGIYQTSNFRVQPTESIVRFPNITNLCPFGEVFNATRFASVYAWNRKRISNCVADYSVLYNSASFSTFKCYGVSPTKLNDLCFTNVYADSFVIRGDEVRQIAPGQTGKIADYNYKLPDDFTGCVIAWNSNNLDSKVGGNYNYLYRLFRKSNLKPFERDISTEIYQAGSTPCNGVEGFNCYFPLQSYGFQPTNGVGYQPYRVVVLSFELLHAPATVCGPKKSTNLVKNKCVNFNFNGLTGTGVLTESNKKFLPFQQFGRDIADTTDAVRDPQTLEILDITPCSFGGVSVITPGTNTSNQVAVLYQGVNCTEVPVAIHADQLTPTWRVYSTGSNVFQTRAGCLIGAEHVNNSYECDIPIGAGICASYHTQTNSPRRARSVASQSIIAYTMSLGAENSVAYSNNSIACPTNFTISVTTEILPVSMTKTSVDCTMYICGDSTECSNLLLQYGSFCTQLNRALTGIAVEQDKNTQEVFAQVKQIYKTPPIKDFGGFNFSQILPDPSKPSKRSFIEDLLFNKVTLADAGFIKQYGDCLGDIAARDLICAQKFNGLTVLPPLLTDEMIAQYTSALLAGTITSGWTFGAGAALQIPFAMQMAYRFNGIGVTQNVLYENQKLIANQFNSAIGKIQDSLSSTASALGKLQDVVNQNAQALNTLVKQLSSNFGAISSVLNDILSRLDKVEAEVQIDRLITGRLQSLQTYVTQQLIRAAEIRASANLAATKMSECVLGQSKRVDFCGKGYHLMSFPQSAPHGVVFLHVTYVPAQEKNFTTAPAICHDGKAHFPREGVFVSNGTHWFVTQRNFCEPQIITTDNTFVSGNCDVVIGIVNNTVYDPLQPELDSFKEELDKYFKNHTSPDVDLGDISGINASVVNIQKEIDRLNEVAKNLNESLIDLQELGKYEQYIKWPWYIWLGFIAGLIAIVMVTIMLCCMTSCCSCLKGCCSCGSCCKFDEDDSEPVLKGVKLHYT

SEQ ID NO: 729 - protein, 1273 aa, Artificial Sequence
  SARS-CoV-2/Iceland/247/2020__EPI_ISL_417575 spike protein (1-1273)(I714C_Y1110C)
MFVFLVLLPLVSSQCVNLTTRTQLPPAYTNSFTRGVYYPDKVFRSSVLHSTQDLFLPFFSNVTWFHAIHVSGTNGTKRFDNPVLPFNDGVYFASTEKSNIIRGWIFGTTLDSKTQSLLIVNNATNVVIKVCEFQFCNDPFLGVYYHKNNKSWMESEFRVYSSANNCTFEYVSQPFLMDLEGKQGNFKNLREFVFKNIDGYFKIYSKHTPINLVRDLPQGFSALEPLVDLPIGINITRFQTLLALHRSYLTPGDSSSGWTAGAAAYYVGYLQPRTFLLKYNENGTITDAVDCALDPLSETKCTLKSFTVEKGIYQTSNFRVQPTESIVRFPNITNLCPFGEVFNATRFASVYAWNRKRISNCVADYSVLYNSASFSTFKCYGVSPTKLNDLCFTNVYADSFVIRGDEVRQIAPGQTGKIADYNYKLPDDFTGCVIAWNSNNLDSKVGGNYNYLYRLFRKSNLKPFERDISTEIYQAGSTPCNGVEGFNCYFPLQSYGFQPTNGVGYQPYRVVVLSFELLHAPATVCGPKKSTNLVKNKCVNFNFNGLTGTGVLTESNKKFLPFQQFGRDIADTTDAVRDPQTLEILDITPCSFGGVSVITPGTNTSNQVAVLYQGVNCTEVPVAIHADQLTPTWRVYSTGSNVFQTRAGCLIGAEHVNNSYECDIPIGAGICASYQTQTNSPRRARSVASQSIIAYTMSLGAENSVAYSNNSIACPTNFTISVTTEILPVSMTKTSVDCTMYICGDSTECSNLLLQYGSFCTQLNRALTGIAVEQDKNTQEVFAQVKQIYKTPPIKDFGGFNFSQILPDPSKPSKRSFIEDLLFNKVTLADAGFIKQYGDCLGDIAARDLICAQKFNGLTVLPPLLTDEMIAQYTSALLAGTITSGWTFGAGAALQIPFAMQMAYRFNGIGVTQNVLYENQKLIANQFNSAIGKIQDSLSSTASALGKLQDVVNQNAQALNTLVKQLSSNFGAISSVLNDILSRLDKVEAEVQIDRLITGRLQSLQTYVTQQLIRAAEIRASANLAATKMSECVLGQSKRVDFCGKGYHLMSFPQSAPHGVVFLHVTYVPAQEKNFTTAPAICHDGKAHFPREGVFVSNGTHWFVTQRNFCEPQIITTDNTFVSGNCDVVIGIVNNTVYDPLQPELDSFKEELDKYFKNHTSPDVDLGDISGINASVVNIQKEIDRLNEVAKNLNESLIDLQELGKYEQYIKWPWYIWLGFIAGLIAIVIVTIMLCCMTSCCSCLKGCCSCGSCCKFDEDDSEPVLKGVKLHYT

SEQ ID NO: 730 - protein, 1273 aa, Artificial Sequence
  SARS-CoV-2/Iceland/238/2020__EPI_ISL_417566 spike protein (1-1273)(I714C_Y1110C)
MFVFLVLLPLVSSQCVNLTTRTQLPPAYTNSFTRGVYYPDKVFRSSVLHSTQDLFLPFFSNVTWFHAIHVSGTNGTKRFDNPVLPFNDGVYFASTEKSNIIRGWIFGTTLDSKTQSLLIVNNATNVVIKVCEFQFCNDPFLGVYYHKNNKSWMESEFRVYSSANNCTFEYVSQPFLMDLEGKQGNFKNLREFVFKNIDGYFKIYSKHTPINLVRDLPQGFSALEPLVDLPIGINITRFQTLLALHRSYLTPGDSSSGWTAGAAAYYVGYLQPRTFLLKYNENGTITDAVDCALDPLSETKCTLKSFTVEKGIYQTSNFRVQPTESIVRFPNITNLCPFGEVFNATRFASVYAWNRKRISNCVADYSVLYNSASFSTFKCYGVSPTKLNDLCFTNVYADSFVIRGDEVRQIAPGQTGKIADYNYKLPDDFTGCVIAWNSNNLDSKVGGNYNYLYRLFRKSNLKPFERDISTEIYQAGSTPCNGVEGFNCYFPLQSYGFQPTNGVGYQPYRVVVLSFELLHAPATVCGPKKSTNLVKNKCVNFNFNGLTGTGVLTESNKKFLPFQQFGRDIADTTDAVRDPQTLEILDITPCSFGGVSVITPGTNTSNQVAVLYQGVNCTEVPVAIHADQLTPTWRVYSTGSNVFQTRAGCLIGAEHVNNSYECDIPIGAGICASYQTQTNSPRRARSVASQSIIAYTMSLGAENSVAYSNNSIACPTNFTISVTTEILPVSMTKTSVDCTMYICGDSTECSNLLLQYGSFCTQLNRALTGIAVEQDKNTQEVFAQVKQIYKTPPIKDFGGFNFSQILPDPSKPSKRSFIEDLLFNKVTLADVGFIKQYGDCLGDIAARDLICAQKFNGLTVLPPLLTDEMIAQYTSALLAGTITSGWTFGAGAALQIPFAMQMAYRFNGIGVTQNVLYENQKLIANQFNSAIGKIQDSLSSTASALGKLQDVVNQNAQALNTLVKQLSSNFGAISSVLNDILSRLDKVEAEVQIDRLITGRLQSLQTYVTQQLIRAAEIRASANLAATKMSECVLGQSKRVDFCGKGYHLMSFPQSAPHGVVFLHVTYVPAQEKNFTTAPAICHDGKAHFPREGVFVSNGTHWFVTQRNFCEPQIITTDNTFVSGNCDVVIGIVNNTVYDPLQPELDSFKEELDKYFKNHTSPDVDLGDISGINASVVNIQKEIDRLNEVAKNLNESLIDLQELGKYEQYIKWPWYIWLGFIAGLIAIVMVTIMLCCMTSCCSCLKGCCSCGSCCKFDEDDSEPVLKGVKLHYT

SEQ ID NO: 731 - protein, 1273 aa, Artificial Sequence
  SARS-CoV-2/Greece/16/2020__EPI_ISL_418265 spike protein (1-1273)(I714C_Y1110C)
MFVFLVLLPLVSSQCVNLTTRTQLPPAYTNSFTRGVYYPDKVFRSSVLHSTQDLFLPFFSNVTWFHAIHVSGTNGTKRFDNPVLPFNDGVYFASTEKSNIIRGWIFGTTLDSKTQSLLIVNNATNVVIKVCEFQFCNDPFLGVYYHKNNKSWMESEFRVYSSANNCTFEYVSQPFLMDLEGKQGNFKNLREFVFKNVDGYFKIYSKHTPINLVRDLPQGFSALEPLVDLPIGINITRFQTLLALHRSYLTPGDSSSGWTAGAAAYYVGYLQPRTFLLKYNENGTITDAVDCALDPLSETKCTLKSFTVEKGIYQTSNFRVQPTESIVRFPNITNLCPFGEVFNATRFASVYAWNRKRISNCVADYSVLYNSASFSTFKCYGVSPTKLNDLCFTNVYADSFVIRGDEVRQIAPGQTGKIADYNYKLPDDFTGCVIAWNSNNLDSKVGGNYNYLYRLFRKSNLKPFERDISTEIYQAGSTPCNGVEGFNCYFPLQSYGFQPTNGVGYQPYRVVVLSFELLHAPATVCGPKKSTNLVKNKCVNFNFNGLTGTGVLTESNKKFLPFQQFGRDIADTTDAVRDPQTLEILDITPCSFGGVSVITPGTNTSNQVAVLYQDVNCTEVPVAIHADQLTPTWRVYSTGSNVFQTRAGCLIGAEHVNNSYECDIPIGAGICASYQTQTNSPRRARSVASQSIIAYTMSLGAENSVAYSNNSIACPTNFTISVTTEILPVSMTKTSVDCTMYICGDSTECSNLLLQYGSFCTQLNRALTGIAVEQDKNTQEVFAQVKQIYKTPPIKDFGGFNFSQILPDPSKPSKRSFIEDLLFNKVTLADAGFIKQYGDCLGDIAARDLICAQKFNGLTVLPPLLTDEMIAQYTSALLAGTITSGWTFGAGAALQIPFAMQMAYRFNGIGVTQNVLYENQKLIANQFNSAIGKIQDSLSSTASALGKLQDVVNQNAQALNTLVKQLSSNFGAISSVLNDILSRLDKVEAEVQIDRLITGRLQSLQTYVTQQLIRAAEIRASANLAATKMSECVLGQSKRVDFCGKGYHLMSFPQSAPHGVVFLHVTYVPAQEKNFTTAPAICHDGKAHFPREGVFVSNGTHWFVTQRNFCEPQIITTDNTFVSGNCDVVIGIVNNTVYDPLQPELDSFKEELDKYFKNHTSPDVDLGDISGINASVVNIQKEIDRLNEVAKNLNESLIDLQELGKYEQYIKWPWYIWLGFIAGLIAIVMVTIMLCCMTSCCSCLKGCCSCGSCCKFDEDDSEPVLKGVKLHYT

SEQ ID NO: 732 - protein, 1273 aa, Artificial Sequence
  SARS-CoV-2/Iceland/319/2020__EPI_ISL_417648 spike protein (1-1273)(I714C_Y1110C)
MFVFLVLLPLVSSQCVNLTTRTQLPPAYTNSFTRGVYYPDKVFRSSVLHSTQDLFLPFFSNVTWFHAIHVSGTNGTKRFDNPVLPFNDGVYFASTEKSNIIRGWIFGTTLDSKTQSLLIVNNATNVVIKVCEFQFCNDPFLGVYYHKNNKSWMESEFRVYSSANNCTFEYVSQPFLIDLEGKQGNFKNLREFVFKNIDGYFKIYSKHTPINLVRDLPQGFSALEPLVDLPIGINITRFQTLLALHRSYLTPGDSSSGWTAGAAAYYVGYLQPRTFLLKYNENGTITDAVDCALDPLSETKCTLKSFTVEKGIYQTSNFRVQPTESIVRFPNITNLCPFGEVFNATRFASVYAWNRKRISNCVADYSVLYNSASFSTFKCYGVSPTKLNDLCFTNVYADSFVIRGDEVRQIAPGQTGKIADYNYKLPDDFTGCVIAWNSNNLDSKVGGNYNYLYRLFRKSNLKPFERDISTEIYQAGSTPCNGVEGFNCYFPLQSYGFQPTNGVGYQPYRVVVLSFELLHAPATVCGPKKSTNLVKNKCVNFNFNGLTGTGVLTESNKKFLPFQQFGRDIADTTDAVRDPQTLEILDITPCSFGGVSVITPGTNTSNQVAVLYQGVNCTEVPVAIHADQLTPTWRVYSTGSNVFQTRAGCLIGAEHVNNSYECDIPIGAGICASYQTQTNSPRRARSVASQSIIAYTMSLGAENSVAYSNNSIACPTNFTISVTTEILPVSMTKTSVDCTMYICGDSTECSNLLLQYGSFCTQLNRALTGIAVEQDKNTQEVFAQVKQIYKTPPIKDFGGFNFSQILPDPSKPSKRSFIEDLLFNKVTLADAGFIKQYGDCLGDIAARDLICAQKFNGLTVLPPLLTDEMIAQYTSALLAGTITSGWTFGAGAALQIPFAMQMAYRFNGIGVTQNVLYENQKLIANQFNSAIGKIQDSLSSTASALGKLQDVVNQNAQALNTLVKQLSSNFGAISSVLNDILSRLDKVEAEVQIDRLITGRLQSLQTYVTQQLIRAAEIRASANLAATKMSECVLGQSKRVDFCGKGYHLMSFPQSAPHGVVFLHVTYVPAQEKNFTTAPAICHDGKAHFPREGVFVSNGTHWFVTQRNFCEPQIITTDNTFVSGNCDVVIGIVNNTVYDPLQPELDSFKEELDKYFKNHTSPDVDLGDISGINASVVNIQKEIDRLNEVAKNLNESLIDLQELGKYEQYIKWPWYIWLGFIAGLIAIVMVTIMLCCMTSCCSCLKGCCSCGSCCKFDEDDSEPVLKGVKLHYT

SEQ ID NO: 733 - protein, 1273 aa, Artificial Sequence
  SARS-CoV-2/Congo/94/2020__EPI_ISL_417947 spike protein (1-1273)(I714C_Y1110C)
MFVFLVLLPLVSSQCVNLTTRTQLPPAYTNSFTRGVYYPDKVFRSSVLHSTQDLFLPFFSNVTWFHAIHVSGTNGTKRFDNPVLPFNDGVYFASTEKSNIIRGWIFGTTLDSKTQSLLIVNNATNVVIKVCEFQFCNDPFLGVYYHKNNKSWMESEFRVYSSANNCTFEYVSQPFLMDLEGKQGNFKNLREFVFKNIDGYFKIYSKHTPINLVRDLPQGFSALEPLVDLPIGINITRFQTLLALHRSYLTPGDSSSGWTAGAAAYYVGYLQPRTFLLKYNENGTITDAVDCALDPLSETKCTLKSFTVEKGIYQTSNFRVQPTESIVRFPNITNLCPFGEVFNATRFASVYAWNRKRISNCVADYSVLYNSASFSTFKCYGVSPTKLNDLCFTNVYADSFVIRGDEVRQIAPGQTGKIADYNYKLPDDFTGCVIAWNSNNLDSKVGGNYNYLYRLFRKSNLKPFERDISTEIYQAGSTPCNGVEGFNCYFPLQSYGFQPTNGVGYQPYRVVVLSFELLHAPATVCGPKKSTNLVKNKCVNFNFNGLTGTGVLTESNKKFLPFQQFGRDIADTTDAVRDPQTLEILDITPCSFGGVSVITPGTNTSNQVAVLYQGVNCTEVPVAIHADQLTPTWRVYSTGSNVFQTRAGCLIGAEHVNNSYECDIPIGAGICASYQTQTNSPRRARSVASQSIIAYTMSLGAENSVAYSNNSIACPTNFTISVTTEILPVSMTKTSVDCTMYICGDSTECSNLLLQYGSFCTQLNRALTGIAVEQDKNTQEVFAQVKQIYKTPPIKDFGGFNFSQILPDPSKPSKRSFIEDILFNKVTLADAGFIKQYGDCLGDIAARDLICAQKFNGLTVLPPLLTDEMIAQYTSALLAGTITSGWTFGAGAALQIPFAMQMAYRFNGIGVTQNVLYENQKLIANQFNSAIGKIQDSLSSTASALGKLQDVVNQNAQALNTLVKQLSSNFGAISSVLNDILSRLDKVEAEVQIDRLITGRLQSLQTYVTQQLIRAAEIRASANLAATKMSECVLGQSKRVDFCGKGYHLMSFPQSAPHGVVFLHVTYVPAQEKNFTTAPAICHDGKAHFPREGVFVSNGTHWFVTQRNFCEPQIITTDNTFVSGNCDVVIGIVNNTVYDPLQPELDSFKEELDKYFKNHTSPDVDLGDISGINASVVNIQKEIDRLNEVAKNLNESLIDLQELGKYEQYIKWPWYIWLGFIAGLIAIVMVTIMLCCMTSCCSCLKGCCSCGSCCKFDEDDSEPVLKGVKLHYT

SEQ ID NO: 734 - protein, 1273 aa, Artificial Sequence
  SARS-CoV-2/Congo/158/2020__EPI_ISL_417950 spike protein (1-1273)(I714C_Y1110C)
MFVFLVLLPLVSSQCVNLTTRTQLPPAYTNSFTRGVYYPDKVFRSSVLHSTQDLFLPFFSNVTWFHAIHVSGTNGTKRFDNPVLPFNDGVYFASTEKSNIIRGWIFGTTLDSKTQSLLIVNNATNVVIKVCEFQFCNDPFLGVYYHKNNKSWMESEFRVYSSANNCTFEYVSQPFLMDLEGKQGNFKNLREFVFKNIDGYFKIYSKHTPINLVRDLPQGFSALEPLVDLPIGINITRFQTLLALHRSYLTPGDSSSGWTAGAAAYYVGYLQPRTFLLKYNENGTITDAVDCALDPLSETKCTLKSFTVEKGIYQTSNFRVQPTESIVRFPNITNLCPFGEVFNATRFASVYAWNRKRISNCVADYSVLYNSASFSTFKCYGVSPTKLNDLCFTNVYADSFVIRGDEVRQIAPGQTGKIADYNYKLPDDFTGCVIAWNSNNLDSKVGGNYNYLYRLFRKSNLKPFERDISTEIYQAGSTPCNGVEGFNCYFPLQSYGFQPTNGVGYQPYRVVVLSFELLHAPATVCGPKKSTNLVKNKCVNFNFNGLTGTGVLTESNKKFLPFQQFGRDIADTTDAVRDPQTLEILDITPCSFGGVSVITPGTNTSNQVAVLYQDVNCTEVPVAIHADQLTPTWRVYSTGSNVFQTRAGCLIGAEHVNNSYECDIPIGAGICASYQTQTNSPRRARSVASQSIIAYTMSLGAENSVAYSNNSIACPTNFTISVTTEILPVSMTKTSVDCTMYICGDSTECSNLLLQYGSFCTQLNRALTGIAVEQDKNTQEVFAQVKQIYKTPPIKDFGGFNFSQILPDPSKPSKRSFIEDLLFNKVTLADAGFIKQYGDCLGDIAARDLICAQKFNGLTVLPPLLTDEMIAQYTSALLAGTITSGWTFGAGAALQIPFAMQMAYRFNGIGVTQNVLYENQKLIANQFNSAIGKIQDSLSSTASALGKLQDVVNQNAQALNTLVKQLSSNFGAISSVLNDILSRLDKVEAEVQIDRLITGRLQSLQTYVTQQLIRAAEIRASANLAATKMSECVLGQSKRVDFCGKGYHLMSFPQSAPHGVVFLHVTYVPAQEKNFTTAPAICHDGKAHFPREGVFVSNGTHWFVTQRNFCEPQIITTDNTFLSGNCDVVIGIVNNTVYDPLQPELDSFKEELDKYFKNHTSPDVDLGDISGINASVVNIQKEIDRLNEVAKNLNESLIDLQELGKYEQYIKWPWYIWLGFIAGLIAIVMVTIMLCCMTSCCSCLKGCCSCGSCCKFDEDDSEPVLKGVKLHYT

SEQ ID NO: 735 - protein, 1273 aa, Artificial Sequence
  SARS-CoV-2/USA/UT-00034/2020__EPI_ISL_417977 spike protein (1-1273)(I714C_Y1110C)
MFVFLVLLPLVSSQCVNLTTRTQLPPAYTNSFTRGVYYPDKVFRSSVLHSTQDLFLPFFSNVTWFHAIHVSGTNGTKRFDNPVLPFNDGVYFASTEKSNIIRGWIFGTTLDSKTQSLLIVNNATNVVIKVCEFQFCNDPFLGVYYYKNNKSWMESEFRVYSSANNCTFEYVSQPFLMDLEGKQGNFKNLREFVFKNIDGYFKIYSKHTPINLVRDLPQGFSALEPLVDLPIGINITRFQTLLALHRSYLTPGDSSSGWTAGAAAYYVGYLQPRTFLLKYNENGTITDAVDCALDPLSETKCTLKSFTVEKGIYQTSNFRVQPTESIVRFPNITNLCPFGEVFNATRFASVYAWNRKRISNCVADYSVLYNSASFSTFKCYGVSPTKLNDLCFTNVYADSFVIRGDEVRQIAPGQTGKIADYNYKLPDDFTGCVIAWNSNNLDSKVGGNYNYLYRLFRKSNLKPFERDISTEIYQAGSTPCNGVEGFNCYFPLQSYGFQPTNGVGYQPYRVVVLSFELLHAPATVCGPKKSTNLVKNKCVNFNFNGLTGTGVLTESNKKFLPFQQFGRDIADTTDAVRDPQTLEILDITPCSFGGVSVITPGTNTSNQVAVLYQGVNCTEVPVAIHADQLTPTWRVYSTGSNVFQTRAGCLIGAEHVNNSYECDIPIGAGICASYQTQTNSPRRARSVASQSIIAYTMSLGAENSVAYSNNSIACPTNFTISVTTEILPVSMTKTSVDCTMYICGDSTECSNLLLQYGSFCTQLNRALTGIAVEQDKNTQEVFAQVKQIYKTPPIKDFGGFNFSQILPDPSKPSKRSFIEDLLFNKVTLADAGFIKQYGDCLGDIAARDLICAQKFNGLTVLPPLLTDEMIAQYTSALLAGTITSGWTFGAGAALQIPFAMQMAYRFNGIGVTQNVLYENQKLIANQFNSAIGKIQDSLSSTASALGKLQDVVNQNAQALNTLVKQLSSNFGAISSVLNDILSRLDKVEAEVQIDRLITGRLQSLQTYVTQQLIRAAEIRASANLAATKMSECVLGQSKRVDFCGKGYHLMSFPQSAPHGVVFLHVTYVPAQEKNFTTAPAICHDGKAHFPREGVFVSNGTHWFVTQRNFCEPQIITTDNTFVSGNCDVVIGIVNNTVYDPLQPELDSFKEELDKYFKNHTSPDVDLGDISGINASVVNIQKEIDRLNEVAKNLNESLIDLQELGKYEQYIKWPWYIWLGFIAGLIAIVMVTIMLCCMTSCCSCLKGCCSCGSCCKFDEDDSEPVLKGVKLHYT

SEQ ID NO: 736 - protein, 1273 aa, Artificial Sequence
  SARS-CoV-2/USA/UT-00033/2020__EPI_ISL_417976 spike protein (1-1273)(I714C_Y1110C)
MFVFLVLLPLVSSQCVNLTTRTQLPPAYTNSFTRGVYYPDKVFRSSVLHSTQDLFLPFFSNVTWFHAIHVSGTNGTKRFDNPVLPFNDGVYFASTEKSNIIRGWIFGTTLDSKTQSLLIVNNATNVVIKVCEFQFCNDPFLGVYYHKNNKSWMESEFRVYSSANNCTFEYVSQPFLMDLEGKQGNFKNLREFVFKNIDGYFKIYSKHTPINLVRDLPQGFSALEPLVDLPIGINITRFQTLLALHRSYLTPGDSSSGLTAGAAAYYVGYLQPRTFLLKYNENGTITDAVDCALDPLSETKCTLKSFTVEKGIYQTSNFRVQPTESIVRFPNITNLCPFGEVFNATRFASVYAWNRKRISNCVADYSVLYNSASFSTFKCYGVSPTKLNDLCFTNVYADSFVIRGDEVRQIAPGQTGKIADYNYKLPDDFTGCVIAWNSNNLDSKVGGNYNYLYRLFRKSNLKPFERDISTEIYQAGSTPCNGVEGFNCYFPLQSYGFQPTNGVGYQPYRVVVLSFELLHAPATVCGPKKSTNLVKNKCVNFNFNGLTGTGVLTESNKKFLPFQQFGRDIADTTDAVRDPQTLEILDITPCSFGGVSVITPGTNTSNQVAVLYQGVNCTEVPVAIHADQLTPTWRVYSTGSNVFQTRAGCLIGAEHVNNSYECDIPIGAGICASYQTQTNSPRRARSVASQSIIAYTMSLGAENSVAYSNNSIACPTNFTISVTTEILPVSMTKTSVDCTMYICGDSTECSNLLLQYGSFCTQLNRALTGIAVEQDKNTQEVFAQVKQIYKTPPIKDFGGFNFSQILPDPSKPSKRSFIEDLLFNKVTLADAGFIKQYGDCLGDIAARDLICAQKFNGLTVLPPLLTDEMIAQYTSALLAGTITSGWTFGAGAALQIPFAMQMAYRFNGIGVTQNVLYENQKLIANQFNSAIGKIQDSLSSTASALGKLQDVVNQNAQALNTLVKQLSSNFGAISSVLNDILSRLDKVEAEVQIDRLITGRLQSLQTYVTQQLIRAAEIRASANLAATKMSECVLGQSKRVDFCGKGYHLMSFPQSAPHGVVFLHVTYVPAQEKNFTTAPAICHDGKAHFPREGVFVSNGTHWFVTQRNFCEPQIITTDNTFVSGNCDVVIGIVNNTVYDPLQPELDSFKEELDKYFKNHTSPDVDLGDISGINASVVNIQKEIDRLNEVAKNLNESLIDLQELGKYEQYIKWPWYIWLGFIAGLIAIVMVTIMLCCMTSCCSCLKGCCSCGSCCKFDEDDSEPVLKGVKLHYT

SEQ ID NO: 737 - protein, 1273 aa, Artificial Sequence
  SARS-CoV-2/USA/WI-13/2020__EPI_ISL_417516 spike protein (1-1273)(I714C_Y1110C)
MFVFLVLLPLVSSQCVNLTTRTQLPPAYTNSFTRGVYYPDKVFRSSVLHSTQDLFLPFFSNVTWFHAIHVSGTNGTKRFDNPVLPFNDGVYFASTEKSNIIRGWIFGTTLDSKTQSLLIVNNATNVVIKVCEFQFCNDPFLGVYYHKNNKSWMESEFRVYSSANNCTFEYVSQPFLMDLEGKQGNFKNLREFVFKNIDGYFKIYSKHTPINLVRDLPQGFSALEPLVDLPIGINITRFQTLLALHRSYLTPGDSSSGWTAGAAAYYVGYLQPRTFLLKYNENGTITDAVDCALDPLSETKCTLKSFTVEKGIYQTSNFRVLPTESIVRFPNITNLCPFGEVFNATRFASVYAWNRKRISNCVADYSVLYNSASFSTFKCYGVSPTKLNDLCFTNVYADSFVIRGDEVRQIAPGQTGKIADYNYKLPDDFTGCVIAWNSNNLDSKVGGNYNYLYRLFRKSNLKPFERDISTEIYQAGSTPCNGVEGFNCYFPLQSYGFQPTNGVGYQPYRVVVLSFELLHAPATVCGPKKSTNLVKNKCVNFNFNGLTGTGVLTESNKKFLPFQQFGRDIADTTDAVRDPQTLEILDITPCSFGGVSVITPGTNTSNQVAVLYQGVNCTEVPVAIHADQLTPTWRVYSTGSNVFQTRAGCLIGAEHVNNSYECDIPIGAGICASYQTQTNSPRRARSVASQSIIAYTMSLGAENSVAYSNNSIACPTNFTISVTTEILPVSMTKTSVDCTMYICGDSTECSNLLLQYGSFCTQLNRALTGIAVEQDKNTQEVFAQVKQIYKTPPIKDFGGFNFSQILPDPSKPSKRSFIEDLLFNKVTLADAGFIKQYGDCLGDIAARDLICAQKFNGLTVLPPLLTDEMIAQYTSALLAGTITSGWTFGAGAALQIPFAMQMAYRFNGIGVTQNVLYENQKLIANQFNSAIGKIQDSLSSTASALGKLQDVVNQNAQALNTLVKQLSSNFGAISSVLNDILSRLDKVEAEVQIDRLITGRLQSLQTYVTQQLIRAAEIRASANLAATKMSECVLGQSKRVDFCGKGYHLMSFPQSAPHGVVFLHVTYVPAQEKNFTTAPAICHDGKAHFPREGVFVSNGTHWFVTQRNFCEPQIITTDNTFVSGNCDVVIGIVNNTVYDPLQPELDSFKEELDKYFKNHTSPDVDLGDISGINASVVNIQKEIDRLNEVAKNLNESLIDLQELGKYEQYIKWPWYIWLGFIAGLIAIVMVTIMLCCMTSCCSCLKGCCSCGSCCKFDEDDSEPVLKGVKLHYT

SEQ ID NO: 738 - protein, 1272 aa, Artificial Sequence
  SARS-CoV-2/India/1-27/2020__EPI_ISL_413522 spike protein (1-1272)(I713C_Y1109C)
MFVFLVLLPLVSSQCVNLTTRTQLPPAYTNSFTRGVYYPDKVFRSSVLHSTQDLFLPFFSNVTWFHAIHVSGTNGTKRFDNPVLPFNDGVYFASTEKSNIIRGWIFGTTLDSKTQSLLIVNNATNVVIKVCEFQFCNDPFLGVYHKNNKSWMESEFRVYSSANNCTFEYVSQPFLMDLEGKQGNFKNLREFVFKNIDGYFKIYSKHTPINLVRDLPQGFSALEPLVDLPIGINITRFQTLLALHRSYLTPGDSSSGWTAGAAAYYVGYLQPRTFLLKYNENGTITDAVDCALDPLSETKCTLKSFTVEKGIYQTSNFRVQPTESIVRFPNITNLCPFGEVFNATRFASVYAWNRKRISNCVADYSVLYNSASFSTFKCYGVSPTKLNDLCFTNVYADSFVIRGDEVIQIAPGQTGKIADYNYKLPDDFTGCVIAWNSNNLDSKVGGNYNYLYRLFRKSNLKPFERDISTEIYQAGSTPCNGVEGFNCYFPLQSYGFQPTNGVGYQPYRVVVLSFELLHAPATVCGPKKSTNLVKNKCVNFNFNGLTGTGVLTESNKKFLPFQQFGRDIADTTDAVRDPQTLEILDITPCSFGGVSVITPGTNTSNQVAVLYQDVNCTEVPVAIHADQLTPTWRVYSTGSNVFQTRAGCLIGAEHVNNSYECDIPIGAGICASYQTQTNSPRRARSVASQSIIAYTMSLGAENSVAYSNNSIACPTNFTISVTTEILPVSMTKTSVDCTMYICGDSTECSNLLLQYGSFCTQLNRALTGIAVEQDKNTQEVFAQVKQIYKTPPIKDFGGFNFSQILPDPSKPSKRSFIEDLLFNKVTLADAGFIKQYGDCLGDIAARDLICAQKFNGLTVLPPLLTDEMIAQYTSALLAGTITSGWTFGAGAALQIPFAMQMAYRFNGIGVTQNVLYENQKLIANQFNSAIGKIQDSLSSTASALGKLQDVVNQNAQALNTLVKQLSSNFGAISSVLNDILSRLDKVEAEVQIDRLITGRLQSLQTYVTQQLIRAAEIRASANLAATKMSECVLGQSKRVDFCGKGYHLMSFPQSAPHGVVFLHVTYVPAQEKNFTTAPAICHDGKAHFPREGVFVSNGTHWFVTQRNFCEPQIITTDNTFVSGNCDVVIGIVNNTVYDPLQPELDSFKEELDKYFKNHTSPDVDLGDISGINASVVNIQKEIDRLNEVAKNLNESLIDLQELGKYEQYIKWPWYIWLGFIAGLIAIVMVTIMLCCMTSCCSCLKGCCSCGSCCKFDEDDSEPVLKGVKLHYT

SEQ ID NO: 739 - protein, 1267 aa, Artificial Sequence
  SARS-CoV-2/pangolin/Guangxi/P4L/2017__EPI_ISL_410538 spike protein (1-1267)(I708C_Y1104C)
MFVFLFVLPLVSSQCVNLTTRTGIPPGYTNSSTRGVYYPDKVFRSSILHLTQDLFLPFFSNVTWFNTINYQGGFKKFDNPVLPFNDGVYFASTEKSNIIRGWIFGTTLDARTQSLLIVNNATNVVIKVCEFQFCTDPFLGVYYHNNNKTWVENEFRVYSSANNCTFEYISQPFLMDLEGKQGNFKNLREFVFKNVDGYFKIYSKHTPIDLVRDLPRGFAALEPLVDLPIGINITRFQTLLALHRSYLTPGNLESGWTTGAAAYYVGYLQQRTFLLSYNQNGTITDAVDCSLDPLSETKCTLKSLTVEKGIYQTSNFRVQPTISIVRFPNITNLCPFGEVFNASKFASVYAWNRKRISNCVADYSVLYNSTSFSTFKCYGVSPTKLNDLCFTNVYADSFVVKGDEVRQIAPGQTGVIADYNYKLPDDFTGCVIAWNSVKQDALTGGNYGYLYRLFRKSKLKPFERDISTEIYQAGSTPCNGQVGLNCYYPLERYGFHPTTGVNYQPFRVVVLSFELLNGPATVCGPKLSTTLVKDKCVNFNFNGLTGTGVLTTSKKQFLPFQQFGRDISDTTDAVRDPQTLEILDITPCSFGGVSVITPGTNTSNQVAVLYQDVNCTEVPMAIHAEQLTPAWRVYSAGANVFQTRAGCLVGAEHVNNSYECDIPVGAGICASYHSMSSLRSVNQRSIIAYTMSLGAENSVAYSNNSIACPTNFTISVTTEILPVSMTKTSVDCTMYICGDSIECSNLLLQYGSFCTQLNRALTGIAVEQDKNTQEVFAQVKQIYKTPPIKDFGGFNFSQILPDPSKPSKRSFIEDLLFNKVTLADAGFIKQYGDCLGDIAARDLICAQKFNGLTVLPPLLTDEMIAQYTSALLAGTITSGWTFGAGAALQIPFAMQMAYRFNGIGVTQNVLYENQKLIANQFNSAIGKIQDSLSSTASALGKLQDVVNQNAQALNTLVKQLSSNFGAISSVLNDILSRLDKVEAEVQIDRLITGRLQSLQTYVTQQLIRAAEIRASANLAATKMSECVLGQSKRVDFCGKGYHLMSFPQSAPHGVVFLHVTYVPAQEKNFTTAPAICHEGKAHFPREGVFVSNGTHWFITQRNFCEPQIITTDNTFVSGSCDVVIGIVNNTVYDPLQPELDSFKEELDKYFKNHTSPDVDLGDISGINASVVNIQKEIDRLNEVAKNLNESPIDLQELGKYEQYIKWPWYIWLGFIAGLIAIIMVTIMLCCMTSCCSCLKGCCSCGSCCKFDEDDSEPVLKGVKLHYT

SEQ ID NO: 740 - protein, 1267 aa, Artificial Sequence
  SARS-CoV-2/pangolin/Guangxi/P5L/2017__EPI_ISL_410540 spike protein (1-1267)(I708C_Y1104C)
MFVFLFVLPLVSSQCVNLTTRTGIPPGYTNSSTRGVYYPDKVFRSSILHLTQDLFLPFFSNVTWFNTINYQGGFKKFDNPVLPFNDGVYFASTEKSNIIRGWIFGTTLDARTQSLLIVNNATNVVIKVCEFQFCTDPFLGVYYHNNNKTWVENEFRVYSSANNCTFEYISQPFLMDLEGKQGNFKNLREFVFKNVDGYFKIYSKHTPIDLVRDLPRGFAALEPLVDLPIGINITRFQTLLALHRSYLTPGKLESGWTTGAAAYYVGYLQQRTFLLSYNQNGTITDAVDCSLDPLSETKCTLKSLTVEKGIYQTSNFRVQPTISIVRFPNITNLCPFGEVFNASKFASVYAWNRKRISNCVADYSVLYNSTSFSTFKCYGVSPTKLNDLCFTNVYADSFVVKGDEVRQIAPGQTGVIADYNYKLPDDFTGCVIAWNSVKQDALTGGNYGYLYRLFRKSKLKPFERDISTEIYQAGSTPCNGQVGLNCYYPLERYGFHPTTGVNYQPFRVVVLSFELLNGPATVCGPKLSTTLVKDKCVNFNFNGLTGTGVLTTSKKQFLPFQQFGRDISDTTDAVRDPQTLEILDITPCSFGGVSVITPGTNTSNQVAVLYQDVNCTEVPMAIHAEQLTPAWRVYSAGANVFQTRAGCLVGAEHVNNSYECDIPVGAGICASYHSMSSFRSVNQRSIIAYTMSLGAENSVAYSNNSIACPTNFTISVTTEILPVSMTKTSVDCTMYICGDSIECSNLLLQYGSFCTQLNRALTGIAVEQDKNTQEVFAQVKQIYKTPPIKDFGGFNFSQILPDPSKPSKRSFIEDLLFNKVTLADAGFIKQYGDCLGDIAARDLICAQKFNGLTVLPPLLTDEMIAQYTSALLAGTITSGWTFGAGAALQIPFAMQMAYRFNGIGVTQNVLYENQKLIANQFNSAIGKIQDSLSSTASALGKLQDVVNQNAQALNTLVKQLSSNFGAISSVLNDILSRLDKVEAEVQIDRLITGRLQSLQTYVTQQLIRAAEIRASANLAATKMSECVLGQSKRVDFCGKGYHLMSFPQSAPHGVVFLHVTYVPAQEKNFTTAPAICHEGKAHFPREGVFVSNGTHWFITQRNFCEPQIITTDNTFVSGSCDVVIGIVNNTVYDPLQPELDSFKEELDKYFKNHTSPDVDLGDISGINASVVNIQKEIDRLNEVAKNLNESLIDLQELGKYEQYIKWPWYIWLGFIAGLIAIIMVTIMLCCMTSCCSCLKGCCSCGSCCKFDEDDSEPVLKGVKLHYT

SEQ ID NO: 741 - protein, 1267 aa, Artificial Sequence
  SARS-CoV-2/pangolin/Guangxi/P5E/2017__EPI_ISL_410541 spike protein (1-1267)(I708C_Y1104C)
MFVFLFVLPLVSSQCVNLTTRTGIPPGYTNSSTRGVYYPDKVFRSSILHLTQDLFLPFFSNVTWFNTITYQGGSKKFDNPVLPFNDGVYFASTEKSNIIRGWIFGTTLDARTQSLLIVNNATNVVIKVCEFQFCTDPFLGVYYHNNNKTWVENEFRVYSSANNCTFEYISQPFLMDLEGKQGNFKNLREFVFKNVDGYFKIYSKHTPIDLVRDLPRGFAALEPLVDLPIGINITRFQTLLALHRSYLTPGKLESGWTTGAAAYYVGYLQQRTFLLSYNQNGTITDAVDCSLDPLSETKCTLKSLTVEKGIYQTSNFRVQPTISIVRFPNITNLCPFGEVFNASKFASVYAWNRKRISNCVADYSVLYNSTSFSTFKCYGVSPTKLNDLCFTNVYADSFVVKGDEVRQIAPGQTGVIADYNYKLPDDFTGCVIAWNSVKQDALTGDNYGYLYRLFRKSKLKPFERDISTEIYQAGSTPCNGQVGLNCYYPLERYGFHPTTGVNYQPFRVVVLSFELLNGPATVCGPKLSTTLVKDKCVNFNFNGLTGTGVLTTSKKQFLPFQQFGRDISDTTDAVRDPQTLEILDITPCSFGGVSVITPGTNTSNQVAVLYQDVNCTEVPMAIHAEQLTPAWRVYSAGANVFQTRAGCLVGAEHVNNSYECDIPVGAGICASYHSMSSFRSVNQRSIIAYTMSLGAENSVAYSNNSIACPTNFTISVTTEILPVSMTKTSVDCTMYICGDSIECSNLLLQYGSFCTQLNRALTGIAVEQDKNTQEVFAQVKQIYKTPPIKDFGGFNFSQILPDPSKPSKRSFIEDLLFNKVTLADAGFIKQYGDCLGDIAARDLICAQKFNGLTVLPPLLTDEMIAQYTSALLAGTITSGWTFGAGAALQIPFAMQMAYRFNGIGVTQNVLYENQKLIANQFNSAIGKIQDSLSSTASALGKLQDVVNQNAQALNTLVKQLSSNFGAISSVLNDILSRLDKVEAEVQIDRLITGRLQSLQTYVTQQLIRAAEIRASANLAATKMSECVLGQSKRVDFCGKGYHLMSFPQSAPHGVVFLHVTYVPAQEKNFTTAPAICHEGKAHFPREGVFVSNGTHWFITQRNFCEPQIITTDNTFVSGSCDVVIGIVNNTVYDPLQPELDSFKEELDKYFKNHTSPDVDLGDISGINASVVNIQKEIDRLNEVAKNLNESLIDLQELGKYEQYIKWPWYIWLGFIAGLIAIIMVTIMLCCMTSCCSCLKGCCSCGSCCKFDEDDSEPVLKGVKLHYT

SEQ ID NO: 742 - protein, 1265 aa, Artificial Sequence
  SARS-CoV-2/pangolin/Guangxi/P1E/2017__EPI_ISL_410539 spike protein (1-1265)(I706C_Y1102C)
MFVFLFVLPLVSSQCVNLTTRTGIQPGYTNSSTRGVYYPDKVFRSSILHLTQDLFLPFFSNVTWFNTINYQGGFKKFDNPVLPFNDGVYFASTEKSNIIRGWIFGTTLDARTQSLLIVNNATNVVIKVCEFQFCTDPFLGVYYHNNNKTWVENEFRVYSSANNCTFEYISQPFLMDLEGKQGNFKNLREFVFKNVDGYFKIYSKHTPIDLVRDLPRGFAALEPLVDLPIGINITRFQTLLALHRSYLTPGKLESGWTTGAAAYYVGYLQQRTFLLSYNQNGTITDAVDCSLDPLSETKCTLKSLTVEKGIYQTSNFRVQPTISIVRFPNITNLCPFGEVFNASKFASVYAWNRKRISNCVADYSVLYNSTSFSTFKCYGVSPTKLNDLCFTNVYADSFVVKGDEVRQIAPGQTGVIADYNYKLPDDFTGCVIAWNSVKQDALTGGNYLYRLFRKSKLKPFERDISTEIYQAGSTPCNGQVGLNCYYPLERYGFHPTTGVNYQPFRVVVLSFELLNGPATVCGPKLSTTLVKDKCVNFNFNGLTGTGVLTTSKKQFLPFQQFGRDISDTTDAVRDPQTLEILDITPCSFGGVSVITPGTNTSNQVAVLYQDVNCTEVPMAIHAEQLTPAWRVYSAGANVFQTRAGCLVGAEHVNNSYECDIPVGAGICASYHSMSSLRSVNQRSIIAYTMSLGAENSVAYSNNSIACPTNFTISVTTEILPVSMTKTSVDCTMYICGDSIECSNLLLQYGSFCTQLNRALTGIAVEQDKNTQEVFAQVKQIYKTPPIKDFGGFNFSQILPDPSKPSKRSFIEDLLFNKVTLADAGFIKQYGDCLGDIAARDLICAQKFNGLTVLPPLLTDEMIAQYTSALLAGTITSGWTFGAGAALQIPFAMQMAYRFNGIGVTQNVLYENQKLIANQFNSAIGKIQDSLSSTASALGKLQDVVNQNAQALNTLVKQLSSNFGAISSVLNDILSRLDKVEAEVQIDRLITGRLQSLQTYVTQQLIRAAEIRASANLAATKMSECVLGQSKRVDFCGKGYHLMSFPQSAPHGVVFLHVTYVPAQEKNFTTAPAICHEGKAHFPREGVFVSNGTHWFITQRNFCEPQIITTDNTFVSGSCDVVIGIVNNTVYDPLQPELDSFKEELDKYFKNHTSPDVDLGDISGINASVVNIQKEIDRLNEVAKNLNESLIDLQELGKYEQYIKWPWYIWLGFIAGLIAIIMVTIMLCCMTSCCSCLKGCCSCGSCCKFDEDDSEPVLKGVKLHYT

SEQ ID NO: 743 - protein, 1273 aa, Artificial Sequence; identical to SEQ ID NO: 21
  SARS-CoV-2/Wuhan/WIV05/2019__EPI_ISL_402128 spike protein (1-1273)(P715C_P1069C)

SEQ ID NO: 744 - protein, 1269 aa, Artificial Sequence
  SARS-CoV-2/bat/Yunnan/RaTG13/2013__EPI_ISL_402131 spike protein (1-1269)(P711C_P1065C)
MFVFLVLLPLVSSQCVNLTTRTQLPPAYTNSSTRGVYYPDKVFRSSVLHLTQDLFLPFFSNVTWFHAIHVSGTNGIKRFDNPVLPFNDGVYFASTEKSNIIRGWIFGTTLDSKTQSLLIVNNATNVVIKVCEFQFCNDPFLGVYYHKNNKSWMESEFRVYSSANNCTFEYVSQPFLMDLEGKQGNFKNLREFVFKNIDGYFKIYSKHTPINLVRDLPPGFSALEPLVDLPIGINITRFQTLLALHRSYLTPGDSSSGWTAGAAAYYVGYLQPRTFLLKYNENGTITDAVDCALDPLSETKCTLKSFTVEKGIYQTSNFRVQPTDSIVRFPNITNLCPFGEVFNATTFASVYAWNRKRISNCVADYSVLYNSTSFSTFKCYGVSPTKLNDLCFTNVYADSFVITGDEVRQIAPGQTGKIADYNYKLPDDFTGCVIAWNSKHIDAKEGGNFNYLYRLFRKANLKPFERDISTEIYQAGSKPCNGQTGLNCYYPLYRYGFYPTDGVGHQPYRVVVLSFELLNAPATVCGPKKSTNLVKNKCVNFNFNGLTGTGVLTESNKKFLPFQQFGRDIADTTDAVRDPQTLEILDITPCSFGGVSVITPGTNASNQVAVLYQDVNCTEVPVAIHADQLTPTWRVYSTGSNVFQTRAGCLIGAEHVNNSYECDIPIGAGICASYQTQTNSRSVASQSIIAYTMSLGAENSVAYSNNSIAICTNFTISVTTEILPVSMTKTSVDCTMYICGDSTECSNLLLQYGSFCTQLNRALTGIAVEQDKNTQEVFAQVKQIYKTPPIKDFGGFNFSQILPDPSKPSKRSFIEDLLFNKVTLADAGFIKQYGDCLGDIAARDLICAQKFNGLTVLPPLLTDEMIAQYTSALLAGTITSGWTFGAGAALQIPFAMQMAYRFNGIGVTQNVLYENQKLIANQFNSAIGKIQDSLSSTASALGKLQDVVNQNAQALNTLVKQLSSNFGAISSVLNDILSRLDKVEAEVQIDRLITGRLQSLQTYVTQQLIRAAEIRASANLAATKMSECVLGQSKRVDFCGKGYHLMSFPQSAPHGVVFLHVTYVCAQEKNFTTAPAICHDGKAHFPREGVFVSNGTHWFVTQRNFYEPQIITTDNTFVSGSCDVVIGIVNNTVYDPLQPELDSFKEELDKYFKNHTSPDVDLGDISGINASVVNIQKEIDRLNEVAKNLNESLIDLQELGKYEQYIKWPWYIWLGFIAGLIAIIMVTIMLCCMTSCCSCLKGCCSCGSCCKFDEDDSEPVLKGVKLHYT

SEQ ID NO: 745 - protein, 1273 aa, Artificial Sequence
  SARS-CoV-2/Wuhan/HBCDC-HB-01/2019__EPI_ISL_402132 spike protein (1-1273)(P715C_P1069C)
MFVFLVLLPLVSSQCVNLTTRTQLPPAYTNSITRGVYYPDKVFRSSVLHSTQDLFLPFFSNVTWFHAIHVSGTNGTKRFDNPVLPFNDGVYFASTEKSNIIRGWIFGTTLDSKTQSLLIVNNATNVVIKVCEFQFCNDPFLGVYYHKNNKSWMESEFRVYSSANNCTFEYVSQPFLMDLEGKQGNFKNLREFVFKNIDGYFKIYSKHTPINLVRDLPQGFSALEPLVDLPIGINITRFQTLLALHRSYLTPGDSSSGWTAGAAAYYVGYLQPRTFLLKYNENGTITDAVDCALDPLSETKCTLKSFTVEKGIYQTSNFRVQPTESIVRFPNITNLCPFGEVFNATRFASVYAWNRKRISNCVADYSVLYNSASFSTFKCYGVSPTKLNDLCFTNVYADSFVIRGDEVRQIAPGQTGKIADYNYKLPDDFTGCVIAWNSNNLDSKVGGNYNYLYRLFRKSNLKPFERDISTEIYQAGSTPCNGVEGFNCYFPLQSYGFQPTNGVGYQPYRVVVLSFELLHAPATVCGPKKSTNLVKNKCVNFNFNGLTGTGVLTESNKKFLPFQQFGRDIADTTDAVRDPQTLEILDITPCSFGGVSVITPGTNTSNQVAVLYQDVNCTEVPVAIHADQLTPTWRVYSTGSNVFQTRAGCLIGAEHVNNSYECDIPIGAGICASYQTQTNSPRRARSVASQSIIAYTMSLGAENSVAYSNNSIAICTNFTISVTTEILPVSMTKTSVDCTMYICGDSTECSNLLLQYGSFCTQLNRALTGIAVEQDKNTQEVFAQVKQIYKTPPIKDFGGFNFSQILPDPSKPSKRSFIEDLLFNKVTLADAGFIKQYGDCLGDIAARDLICAQKFNGLTVLPPLLTDEMIAQYTSALLAGTITSGWTFGAGAALQIPFAMQMAYRFNGIGVTQNVLYENQKLIANQFNSAIGKIQDSLSSTASALGKLQDVVNQNAQALNTLVKQLSSNFGAISSVLNDILSRLDKVEAEVQIDRLITGRLQSLQTYVTQQLIRAAEIRASANLAATKMSECVLGQSKRVDFCGKGYHLMSFPQSAPHGVVFLHVTYVCAQEKNFTTAPAICHDGKAHFPREGVFVSNGTHWFVTQRNFYEPQIITTDNTFVSGNCDVVIGIVNNTVYDPLQPELDSFKEELDKYFKNHTSPDVDLGDISGINASVVNIQKEIDRLNEVAKNLNESLIDLQELGKYEQYIKWPWYIWLGFIAGLIAIVMVTIMLCCMTSCCSCLKGCCSCGSCCKFDEDDSEPVLKGVKLHYT

SEQ ID NO: 746 - protein, 1273 aa, Artificial Sequence
  SARS-CoV-2/Guangdong/20SF028/2020__EPI_ISL_403936 spike protein (1-1273)(P715C_P1069C)
MFVFLVLLPLVSSQCVNLTTRTQLPPAYTNSFTRGVYYPDKVFRSSVLYSTQDLFLPFFSNVTWFHAIHVSGTNGTKRFDNPVLPFNDGVYFASTEKSNIIRGWIFGTTLDSKTQSLLIVNNATNVVIKVCEFQFCNDPFLGVYYHKNNKSWMESEFRVYSSANNCTFEYVSQPFLMDLEGKQGNFKNLREFVFKNIDGYFKIYSKHTPINLVRDLPQGFSALEPLVDLPIGINITRFQTLLALHRSYLTPGDSSSGWTAGAAAYYVGYLQPRTFLLKYNENGTITDAVDCALDPLSETKCTLKSFTVEKGIYQTSNFRVQPTESIVRFPNITNLCPFGEVFNATRFASVYAWNRKRISNCVADYSVLYNSASFSTFKCYGVSPTKLNDLCFTNVYADSFVIRGDEVRQIAPGQTGKIADYNYKLPDDFTGCVIAWNSNNLDSKVGGNYNYLYRLFRKSNLKPFERDISTEIYQAGSTPCNGVEGFNCYFPLQSYGFQPTNGVGYQPYRVVVLSFELLHAPATVCGPKKSTNLVKNKCVNFNFNGLTGTGVLTESNKKFLPFQQFGRDIADTTDAVRDPQTLEILDITPCSFGGVSVITPGTNTSNQVAVLYQDVNCTEVPVAIHADQLTPTWRVYSTGSNVFQTRAGCLIGAEHVNNSYECDIPIGAGICASYQTQTNSPRRARSVASQSIIAYTMSLGAENSVAYSNNSIAICTNFTISVTTEILPVSMTKTSVDCTMYICGDSTECSNLLLQYGSFCTQLNRALTGIAVEQDKNTQEVFAQVKQIYKTPPIKDFGGFNFSQILPDPSKPSKRSFIEDLLFNKVTLADAGFIKQYGDCLGDIAARDLICAQKFNGLTVLPPLLTDEMIAQYTSALLAGTITSGWTFGAGAALQIPFAMQMAYRFNGIGVTQNVLYENQKLIANQFNSAIGKIQDSLSSTASALGKLQDVVNQNAQALNTLVKQLSSNFGAISSVLNDILSRLDKVEAEVQIDRLITGRLQSLQTYVTQQLIRAAEIRASANLAATKMSECVLGQSKRVDFCGKGYHLMSFPQSAPHGVVFLHVTYVCAQEKNFTTAPAICHDGKAHFPREGVFVSNGTHWFVTQRNFYEPQIITTDNTFVSGNCDVVIGIVNNTVYDPLQPELDSFKEELDKYFKNHTSPDVDLGDISGINASVVNIQKEIDRLNEVAKNLNESLIDLQELGKYEQYIKWPWYIWLGFIAGLIAIVMVTIMLCCMTSCCSCLKGCCSCGSCCKFDEDDSEPVLKGVKLHYT

SEQ ID NO: 747 - protein, 1273 aa, Artificial Sequence
  SARS-CoV-2/Shenzhen/SZTH-001/2020__EPI_ISL_406592 spike protein (1-1273)(P715C_P1069C)
MFVFLVLLPLVSSQCVNLTTRTQLPPAYTNSFTRGVYYPDKVFRSSVLHSTQDLFLPFFSNVTWFHAIHVSGTNGTKRFDNPVLPFNDGVYFASTEKSNIIRGWIFGTTLDSKTQSLLIVNNATNVVIKVCEFQFCNDPFLGVYYHKNNKSWMESEFRVYSSANNCTFEYVSQPFLMDLEGKQGNFKNLREFVFKNIDGYFKIYSKHTPINLVRDLPQGFSALEPLVDLPIGINITRFQTLLALHRSYLTPGDSSSGWTAGAAAYYVGYLQPRTFLLKYNENGTITDAVDCALDPLSETKCTLKSFTVEKGIYQTSNFRVQPTESIVRFPNITNLCPFGEVFNATRFASVYAWNRKRISNCVADYSVLYNSASFSTFKCYGVSPTKLNDLCFTNVYADSFVIRGDEVRQIAPGQTGKIADYNYKLPDDFTGCVIAWNSNNLDSKVGGNYNYLYRLFRKSNLKPFERDISTEIYQAGSTPCNGVEGFNCYFPLQSYGFQPTNGVGYQPYRVVVLSFELLHAPATVCGPKKSTNLVKNKCVNFNFNGLTGTGVLTESNKKFLPFQQFGRDIADTTDAVRDPQTLEILDITPCSFGGVSVITPGTNTSNQVAVLYQDVNCTEVPVAIHADQLTPTWRVYSTGSNVFQTRAGCLIGAEHVNNSYECDIPIGAGICASYQTQTNSPRRARSVASQSIIAYTMSLGAENSVAYSNNSIAICTNFTISVTTEILPVSMTKTSVDCTMYICGDSTECSNLLLQYGSFCTQLNRALTGIAVEQDKNTQEVFAQVKQIYKTPPIKDFGGFNFSQILPDPSKPSKRSFIEDLLFNKVTLADAGFIKQYGDCLGDIAARDLICAQKFNGLTVLPPLLTDEMIAQYTSALLAGTITSGWTFGAGAALQIPFAMQMAYRFNGIGVTQNVLYENQKLIANQFNSAIGKIQDSLSSTASALGKLQDVVNQNAQALNTLVKQLSSNFGAISSVLNDILSRLDKVEAEVQIDRLITGRLQSLQTYVTQQLIRAAEIRASANLAATKMSECVLGQSKRVDFCGKGYHLMSFPQSAPHGVVFLHVTYVCAQEKNFTTAPAICHDGKAHFPREGVFVSNGTHWFVTQRNFYEPQIITTDNTFVSGNCDVLIGIVNNTVYDPLQPELDSFKEELDKYFKNHTSPDVDLGDISGINASVVNIQKEIDRLNEVAKNLNESLIDLQELGKYEQYIKWPWYIWLGFIAGLIAIVMVTIMLCCMTSCCSCLKGCCSCGSCCKFDEDDSGPVLKGVKLHYT

SEQ ID NO: 748 - protein, 1273 aa, Artificial Sequence
  SARS-CoV-2/Shenzhen/SZTH-004/2020__EPI_ISL_406595 spike protein (1-1273)(P715C_P1069C)
MFVFLVLLPLVSSQCVNLTTRTQLPPAYTNSFTRGVYYPDKVFRSSVLHSTQDLFLPFFSNVTWFHAIHVSGTNGTKRFDNPVLPFNDGVYFASTEKSNIIRGWIFGTTLDSKTQSLLIVNNATNVVIKVCEFQFCNDPFLGVYYHKNNKSWMESEFRVYSSANNCTFEYVSQPFLMDLEGKQGNFKNLREFVFKNIDGYFKIYSKHTPINLVRDLPQGFSALEPLVDLPIGINITRFQTLLALHRSYLTPGDSSSGWTAGAAAYYVGYLQPRTFLLKYNENGTITDAVDCALDPLSETKCTLKSFTVEKGIYQTSNFRVQPTESIVRFPNITNLCPFGEVFNATRFASVYAWDRKRISNCVAYYSVLYNSASFSTFKCYGVSPTKLNDLCFTNVYADSFVIRGDEVRQIAPGQTGKIADYNYKLPDDFTGCVIAWNSNNLDSKVGGNYNYLYRLFRKSNLKPFERDISTEIYQAGSTPCNGVEGFNCYFPLQSYGFQPTNGVGYQPYRVVVLSFELLHAPATVCGPKKSTNLVKNKCVNFNFNGLTGTGVLTESNKKFLPFQQFGRDIADTTDAVRDPQTLEILDITPCSFGGVSVITPGTNTSNQVAVLYQDVNCTEVPVAIHADQLTPTWRVYSTGSNVFQTRAGCLIGAEHVNNSYECDIPIGAGICASYQTQTNSPRRARSVASQSIIAYTMSLGAENSVAYSNNSIAICTNFTISVTTEILPVSMTKTSVDCTMYICGDSTECSNLLLQYGSFCTQLNRALTGIAVEQDKNTQEVFAQVKQIYKTPPIKDFGGFNFSQILPDPSKPSKRSFIEDLLFNKVTLADAGFIKQYGDCLGDIAARDLICAQKFNGLTVLPPLLTDEMIAQYTSALLAGTITSGWTFGAGAALQIPFAMQMAYRFNGIGVTQNVLYENQKLIANQFNSAIGKIQDSLSSTASALGKLQDVVNQNAQALNTLVKQLSSNFGAISSVLNDILSRLDKVEAEVQIDRLITGRLQSLQTYVTQQLIRAAEIRASANLAATKMSECVLGQSKRVDFCGKGYHLMSFPQSAPHGVVFLHVTYVCAQEKNFTTAPAICHDGKAHFPREGVFVSNGTHWFVTQRNFYEPQIITTDNTFVSGNCDVVIGIVNNTVYDPLQPELDSFKEELDKYFKNHTSPDVDLGDISGINASVVNIQKEIDRLNEVAKNLNESLIDLQELGKYEQYIKWPWYIWLGFIAGLIAIVMVTIMLCCMTSCCSCLKGCCSCGSCCKFDEDDSEPVLKGVKLHYT

SEQ ID NO: 749 - protein, 1273 aa, Artificial Sequence
  SARS-CoV-2/France/IDF0372/2020__EPI_ISL_406596 spike protein (1-1273)(P715C_P1069C)
MFVFLVLLPLVSSQCVNLTTRTQLPPAYTNSFTRGVYYPDKVFRSSVLHSTQDLFLPFFSNVTWFHAIHVSGTNGTKRFDNPVLPFNDGVYFASTEKSNIIRGWIFGTTLDSKTQSLLIVNNATNVVIKVCEFQFCNDPFLGVYYHKNNKSWMESEFRVYSSANNCTFEYVSQPFLMDLEGKQGNFKNLREFVFKNIDGYFKIYSKHTPINLVRDLPQGFSALEPLVDLPIGINITRFQTLLALHRSYLTPGDSSSGWTAGAAAYYVGYLQPRTFLLKYNENGTITDAVDCALDPLSETKCTLKSFTVEKGIYQTSNFRVQPTESIVRFPNITNLCPFGEVFNATRFASVYAWNRKRISNCVADYSFLYNSASFSTFKCYGVSPTKLNDLCFTNVYADSFVIRGDEVRQIAPGQTGKIADYNYKLPDDFTGCVIAWNSNNLDSKVGGNYNYLYRLFRKSNLKPFERDISTEIYQAGSTPCNGVEGFNCYFPLQSYGFQPTNGVGYQPYRVVVLSFELLHAPATVCGPKKSTNLVKNKCVNFNFNGLTGTGVLTESNKKFLPFQQFGRDIADTTDAVRDPQTLEILDITPCSFGGVSVITPGTNTSNQVAVLYQDVNCTEVPVAIHADQLTPTWRVYSTGSNVFQTRAGCLIGAEHVNNSYECDIPIGAGICASYQTQTNSPRRARSVASQSIIAYTMSLGAENSVAYSNNSIAICTNFTISVTTEILPVSMTKTSVDCTMYICGDSTECSNLLLQYGSFCTQLNRALTGIAVEQDKNTQEVFAQVKQIYKTPPIKDFGGFNFSQILPDPSKPSKRSFIEDLLFNKVTLADAGFIKQYGDCLGDIAARDLICAQKFNGLTVLPPLLTDEMIAQYTSALLAGTITSGWTFGAGAALQIPFAMQMAYRFNGIGVTQNVLYENQKLIANQFNSAIGKIQDSLSSTASALGKLQDVVNQNAQALNTLVKQLSSNFGAISSVLNDILSRLDKVEAEVQIDRLITGRLQSLQTYVTQQLIRAAEIRASANLAATKMSECVLGQSKRVDFCGKGYHLMSFPQSAPHGVVFLHVTYVCAQEKNFTTAPAICHDGKAHFPREGVFVSNGTHWFVTQRNFYEPQIITTDNTFVSGNCDVVIGIVNNTVYDPLQPELDSFKEELDKYFKNHTSPDVDLGDISGINASVVNIQKEIDRLNEVAKNLNESLIDLQELGKYEQYIKWPWYIWLGFIAGLIAIVMVTIMLCCMTSCCSCLKGCCSCGSCCKFDEDDSEPVLKGVKLHYT

SEQ ID NO: 750 - protein, 1273 aa, Artificial Sequence
  SARS-CoV-2/Australia/VIC01/2020__EPI_ISL_406844 spike protein (1-1273)(P715C_P1069C)
MFVFLVLLPLVSSQCVNLTTRTQLPPAYTNSFTRGVYYPDKVFRSSVLHSTQDLFLPFFSNVTWFHAIHVSGTNGTKRFDNPVLPFNDGVYFASTEKSNIIRGWIFGTTLDSKTQSLLIVNNATNVVIKVCEFQFCNDPFLGVYYHKNNKSWMESEFRVYSSANNCTFEYVSQPFLMDLEGKQGNFKNLREFVFKNIDGYFKIYSKHTPINLVRDLPQGFSALEPLVDLPIGINITRFQTLLALHRRYLTPGDSSSGWTAGAAAYYVGYLQPRTFLLKYNENGTITDAVDCALDPLSETKCTLKSFTVEKGIYQTSNFRVQPTESIVRFPNITNLCPFGEVFNATRFASVYAWNRKRISNCVADYSVLYNSASFSTFKCYGVSPTKLNDLCFTNVYADSFVIRGDEVRQIAPGQTGKIADYNYKLPDDFTGCVIAWNSNNLDSKVGGNYNYLYRLFRKSNLKPFERDISTEIYQAGSTPCNGVEGFNCYFPLQSYGFQPTNGVGYQPYRVVVLSFELLHAPATVCGPKKSTNLVKNKCVNFNFNGLTGTGVLTESNKKFLPFQQFGRDIADTTDAVRDPQTLEILDITPCSFGGVSVITPGTNTSNQVAVLYQDVNCTEVPVAIHADQLTPTWRVYSTGSNVFQTRAGCLIGAEHVNNSYECDIPIGAGICASYQTQTNSPRRARSVASQSIIAYTMSLGAENSVAYSNNSIAICTNFTISVTTEILPVSMTKTSVDCTMYICGDSTECSNLLLQYGSFCTQLNRALTGIAVEQDKNTQEVFAQVKQIYKTPPIKDFGGFNFSQILPDPSKPSKRSFIEDLLFNKVTLADAGFIKQYGDCLGDIAARDLICAQKFNGLTVLPPLLTDEMIAQYTSALLAGTITSGWTFGAGAALQIPFAMQMAYRFNGIGVTQNVLYENQKLIANQFNSAIGKIQDSLSSTASALGKLQDVVNQNAQALNTLVKQLSSNFGAISSVLNDILSRLDKVEAEVQIDRLITGRLQSLQTYVTQQLIRAAEIRASANLAATKMSECVLGQSKRVDFCGKGYHLMSFPQSAPHGVVFLHVTYVCAQEKNFTTAPAICHDGKAHFPREGVFVSNGTHWFVTQRNFYEPQIITTDNTFVSGNCDVVIGIVNNTVYDPLQPELDSFKEELDKYFKNHTSPDVDLGDISGINASVVNIQKEIDRLNEVAKNLNESLIDLQELGKYEQYIKWPWYIWLGFIAGLIAIVMVTIMLCCMTSCCSCLKGCCSCGSCCKFDEDDSEPVLKGVKLHYT

SEQ ID NO: 751 - protein, 1273 aa, Artificial Sequence
  SARS-CoV-2/Germany/BavPat1/2020__EPI_ISL_406862 spike protein (1-1273)(P715C_P1069C)
MFVFLVLLPLVSSQCVNLTTRTQLPPAYTNSFTRGVYYPDKVFRSSVLHSTQDLFLPFFSNVTWFHAIHVSGTNGTKRFDNPVLPFNDGVYFASTEKSNIIRGWIFGTTLDSKTQSLLIVNNATNVVIKVCEFQFCNDPFLGVYYHKNNKSWMESEFRVYSSANNCTFEYVSQPFLMDLEGKQGNFKNLREFVFKNIDGYFKIYSKHTPINLVRDLPQGFSALEPLVDLPIGINITRFQTLLALHRSYLTPGDSSSGWTAGAAAYYVGYLQPRTFLLKYNENGTITDAVDCALDPLSETKCTLKSFTVEKGIYQTSNFRVQPTESIVRFPNITNLCPFGEVFNATRFASVYAWNRKRISNCVADYSVLYNSASFSTFKCYGVSPTKLNDLCFTNVYADSFVIRGDEVRQIAPGQTGKIADYNYKLPDDFTGCVIAWNSNNLDSKVGGNYNYLYRLFRKSNLKPFERDISTEIYQAGSTPCNGVEGFNCYFPLQSYGFQPTNGVGYQPYRVVVLSFELLHAPATVCGPKKSTNLVKNKCVNFNFNGLTGTGVLTESNKKFLPFQQFGRDIADTTDAVRDPQTLEILDITPCSFGGVSVITPGTNTSNQVAVLYQGVNCTEVPVAIHADQLTPTWRVYSTGSNVFQTRAGCLIGAEHVNNSYECDIPIGAGICASYQTQTNSPRRARSVASQSIIAYTMSLGAENSVAYSNNSIAICTNFTISVTTEILPVSMTKTSVDCTMYICGDSTECSNLLLQYGSFCTQLNRALTGIAVEQDKNTQEVFAQVKQIYKTPPIKDFGGFNFSQILPDPSKPSKRSFIEDLLFNKVTLADAGFIKQYGDCLGDIAARDLICAQKFNGLTVLPPLLTDEMIAQYTSALLAGTITSGWTFGAGAALQIPFAMQMAYRFNGIGVTQNVLYENQKLIANQFNSAIGKIQDSLSSTASALGKLQDVVNQNAQALNTLVKQLSSNFGAISSVLNDILSRLDKVEAEVQIDRLITGRLQSLQTYVTQQLIRAAEIRASANLAATKMSECVLGQSKRVDFCGKGYHLMSFPQSAPHGVVFLHVTYVCAQEKNFTTAPAICHDGKAHFPREGVFVSNGTHWFVTQRNFYEPQIITTDNTFVSGNCDVVIGIVNNTVYDPLQPELDSFKEELDKYFKNHTSPDVDLGDISGINASVVNIQKEIDRLNEVAKNLNESLIDLQELGKYEQYIKWPWYIWLGFIAGLIAIVMVTIMLCCMTSCCSCLKGCCSCGSCCKFDEDDSEPVLKGVKLHYT

SEQ ID NO: 752 - protein, 1273 aa, Artificial Sequence
  SARS-CoV-2/Wuhan/HBCDC-HB-02/2020__EPI_ISL_412978 spike protein (1-1273)(P715C_P1069C)
MFVFLVLLPLVSSQCVNLTTRTQLPPAYTNSFTRGVYYPDKVFRSSVLHSTQDLFLPFFSNVTWFHAIHVSGTNGTKRFDNPVLPFNDGVYFASTEKSNIIRGWIFGTTLDSKTQSLLIVNNATNVVIKVCEFQFCNDPFLGVYYHKNNKSWMESEFRVYSSANNCTFEYVSQPFLMDLEGKQGNFKNLREFVFKNIDGYFKIYSKHTPINLVRDLPQGFSALEPLVDLPIGINITRFQTLLALHRSYLTPGDSSSGWTAGAAAYYVGYLQPRTFLLKYNENGTITDAVDCALDPLSETKCTLKSFTVEKGIYQTSNFRVQPTESIVRFPNITNLCPFGEVFNATRFASVYAWNRKRISNCVADYSVLYNSASFSTFKCYGVSPTKLNDLCFTNVYADSFVIRGDEVRQIAPGQTGKIADYNYKLPDDFTGCVIAWNSNNLDSKVGGNYNYLYRLFRKSNLKPFERDISTEIYQAGSTPCNGVEGFNCYFPLQSYGFQPTNGVGYQPYRVVVLSFELLHAPATVCGPKKSTNLVKNKCVNFNFNGLTGTGVLTESNKKFLPFQQFGRDIADTTDAVRDPQTLEILDITPCSFGGVSVITPGTNTSNQVAVLYQDVNCTEVPVAIHADQLTPTWRVYSTGSNVFQTRAGCLIGAEHVNNSYECDIPIGAGICASYQTQTNSPRRARSVASQSIIAYTMSLGAENSVAYSNNSIAICTNFTISVTTEILPVSMTKTSVDCTMYICGDSTECSNFLLQYGSFCTQLNRALTGIAVEQDKNTQEVFAQVKQIYKTPPIKDFGGFNFSQILPDPSKPSKRSFIEDLLFNKVTLADAGFIKQYGDCLGDIAARDLICAQKFNGLTVLPPLLTDEMIAQYTSALLAGTITSGWTFGAGAALQIPFAMQMAYRFNGIGVTQNVLYENQKLIANQFNSAIGKIQDSLSSTASALGKLQDVVNQNAQALNTLVKQLSSNFGAISSVLNDILSRLDKVEAEVQIDRLITGRLQSLQTYVTQQLIRAAEIRASANLAATKMSECVLGQSKRVDFCGKGYHLMSFPQSAPHGVVFLHVTYVCAQEKNFTTAPAICHDGKAHFPREGVFVSNGTHWFVTQRNFYEPQIITTDNTFVSGNCDVVIGIVNNTVYDPLQPELDSFKEELDKYFKNHTSPDVDLGDISGINASVVNIQKEIDRLNEVAKNLNESLIDLQELGKYEQYIKWPWYIWLGFIAGLIAIVMVTIMLCCMTSCCSCLKGCCSCGSCCKFDEDDSEPVLKGVKLHYT

SEQ ID NO: 753 - protein, 1273 aa, Artificial Sequence
  SARS-CoV-2/Australia/QLD02/2020__EPI_ISL_407896 spike protein (1-1273)(P715C_P1069C)
MFVFLVLLPLVSSQCVNLTTRTQLPPAYTNSFTRGVYYPDKVFRSSVLHSTQDLFLPFFSNVTWFHAIHVSGTNGTKRFDNPVLPFNDGVYFASTEKSNIIRGWIFGTTLDSKTQSLLIVNNATNVVIKVCEFQFCNDPFLGVYYHKNNKSWMESEFRVYSSANNCTFEYVSQPFLMDLEGKQGNFKNLREFVFKNIDGYFKIYSKHTPINLVRDLPQGFSALEPLVDLPIGINITRFQTLLALHRSYLTPGDSSSGWTAGAAAYYVGYLQPRTFLLKYNENGTITDAVDCALDPLSETKCTLKSFTVEKGIYQTSNFRVQPTESIVRFPNITNLCPFGEVFNATRFASVYAWNRKRISNCVADYSVLYNSASFSTFKCYGVSPTKLNDLCFTNVYADSFVIRGDEVRQIAPGQTGKIADYNYKLPDDFTGCVIAWNSNNLDSKVGGNYNYLYRLFRKSNLKPFERDISTEIYQAGSTPCNGVEGFNCYFPLQSYGFQPTNGVGYQPYRVVVLSFELLHAPATVCGPKKSTNLVKNKCVNFNFNGLTGTGVLTESNKKFLPFQQFGRDIADTTDAVRDPQTLEILDITPCSFGGVSVITPGTNTSNQVAVLYQDVNCTEVPVAIHADQLTPTWRVYSTGSNVFQTRAGCLIGAEHVNNSYECDIPIGAGICASYQTQTNSPRRARSVASQSIIAYTMSLGAENSVAYSNNSIAICTNFTISVTTEILPVSMTKTSVDCTMYICGDSTECSNLLLQYGSFCTQLNRALTGIAVEQDKNTQEVFAQVKQIYKTPPIKDFGGFNFSQILPDPSKPSKRSFIEDLLFNKVTLADAGFIKQYGDCLGDIAARDLICAQKFNGLTVLPPLLTDEMIAQYTSALLAGTITSGWTFGAGAALQIPFAMQMAYRFNGIGVTQNVLYENQKLIANQFNSAIGKIQDSLSSTASALGKLQDVVNQNAQALNTLVKQLSSNFGAISSVLNDILSRLDKVEAEVQIDRLITGRLQSLQTYVTQQLIRAAEIRASANLAATKMSECVLGQSKRVDFCGKGYHLMSFPQSAPHGVVFLHVTYVCAQEKNFTTAPAICHDGKAHFPREGVFVSNGTHWFVTQRNFYEPQIITTDNTFVSGNCDVVIGIVNNTVYDPLQLELDSFKEELDKYFKNHTSPDVDLGDISGINASVVNIQKEIDRLNEVAKNLNESLIDLQELGKYEQYIKWPWYIWLGFIAGLIAIVMVTIMLCCMTSCCSCLKGCCSCGSCCKFDEDDSEPVLKGVKLHYT

SEQ ID NO: 754 - protein, 1273 aa, Artificial Sequence
  SARS-CoV-2/India/1-31/2020__EPI_ISL_413523 spike protein (1-1273)(P715C_P1069C)
MFVFLVLLPLVSSQCVNLTTRTQLPPAYTNSFTRGVYYPDKVFRSSVLHSTQDLFLPFFSNVTWFHAIHVSGTNGTKRFDNPVLPFNDGVYFASTEKSNIIRGWIFGTTLDSKTQSLLIVNNATNVVIKVCEFQFCNDPFLGVYYHKNNKSWMESEFRVYSSANNCTFEYVSQPFLMDLEGKQGNFKNLREFVFKNIDGYFKIYSKHTPINLVRDLPQGFSALEPLVDLPIGINITRFQTLLALHRSYLTPGDSSSGWTAGAAAYYVGYLQPRTFLLKYNENGTITDAVDCALDPLSETKCTLKSFTVEKGIYQTSNFRVQPTESIVRFPNITNLCPFGEVFNATRFASVYAWNRKRISNCVADYSVLYNSASFSTFKCYGVSPTKLNDLCFTNVYADSFVIRGDEVRQIAPGQTGKIADYNYKLPDDFTGCVIAWNSNNLDSKVGGNYNYLYRLFRKSNLKPFERDISTEIYQAGSTPCNGVEGFNCYFPLQSYGFQPTNGVGYQPYRVVVLSFELLHAPATVCGPKKSTNLVKNKCVNFNFNGLTGTGVLTESNKKFLPFQQFGRDIADTTDAVRDPQTLEILDITPCSFGGVSVITPGTNTSNQVAVLYQDVNCTEVPVAIHADQLTPTWRVYSTGSNVFQTRAGCLIGAEHVNNSYECDIPIGAGICASYQTQTNSPRRARSVASQSIIAYTMSLGAENSVAYSNNSIAICTNFTISVTTEILPVSMTKTSVDCTMYICGDSTECSNLLLQYGSFCTQLNRALTGIAVEQDKNTQEVFAQVKQIYKTPPIKDFGGFNFSQILPDPSKPSKRSFIEDLLFNKVTLADAGFIKQYGDCLGDIAARDLICAQKFNGLTVLPPLLTDEMIAQYTSALLAGTITSGWTFGAGAALQIPFAMQMAYRFNGIGVTQNVLYENQKLIANQFNSVIGKIQDSLSSTASALGKLQDVVNQNAQALNTLVKQLSSNFGAISSVLNDILSRLDKVEAEVQIDRLITGRLQSLQTYVTQQLIRAAEIRASANLAATKMSECVLGQSKRVDFCGKGYHLMSFPQSAPHGVVFLHVTYVCAQEKNFTTAPAICHDGKAHFPREGVFVSNGTHWFVTQRNFYEPQIITTDNTFVSGNCDVVIGIVNNTVYDPLQPELDSFKEELDKYFKNHTSPDVDLGDISGINASVVNIQKEIDRLNEVAKNLNESLIDLQELGKYEQYIKWPWYIWLGFIAGLIAIVMVTIMLCCMTSCCSCLKGCCSCGSCCKFDEDDSEPVLKGVKLHYT

SEQ ID NO: 755 - protein, 1273 aa, Artificial Sequence
  SARS-CoV-2/Guangdong/GD2020087-P0008/2020__EPI_ISL_413863 spike protein (1-1273)(P715C_P1069C)
MFVFLVLLPLVSSQCVNLTTRTQLPPAYTNSFTRGVYYPDKVFRSSVLHSTQDLFLPFFSNVTWFHAIHVSGTNGTKRFDNPVLPFNDGVYFASTEKSNIIRGWIFGTTLDSKTQSLLIVNNATNVVIKVCEFQFCNDPFLGVYYHKNNKSWMESEFRVYSSANNCTFEYVSQPFLMDLEGKQGNFKNLREFVFKNIDGYFKIYSKHTPINLVRDLPQGFSALEPLVDLPIGINITRFQTLLALHRSYLTPGDSSSGWTAGAAAYYVGYLQPRTFLLKYNENGTITDAVDCALDPLSETKCTLKSFTVEKGIYQTSNFRVQPTESIVRFPNITNLCPFGEVFNATRFASVYAWNRKRISNCVADYSVLYNSASFSTFKCYGVSPTKLNDLCFTNVYADSFVIRGDEVREIAPGQTGKIADYNYKLPDDFTGCVIAWNSNNLDSKVGGNYNYLYRLFRKSNLKPFERDISTEIYQAGSTPCNGVEGFNCYFPLQSYGFQPTNGVGYQPYRVVVLSFELLHAPATVCGPKKSTNLVKNKCVNFNFNGLTGTGVLTESNKKFLPFQQFGRDIADTTDAVRDPQTLEILDITPCSFGGVSVITPGTNTSNQVAVLYQDVNCTEVPVAIHADQLTPTWRVYSTGSNVFQTRAGCLIGAEHVNNSYECDIPIGAGICASYQTQTNSPRRARSVASQSIIAYTMSLGAENSVAYSNNSIAICTNFTISVTTEILPVSMTKTSVDCTMYICGDSTECSNLLLQYGSFCTQLNRALTGIAVEQDKNTQEVFAQVKQIYKTPPIKDFGGFNFSQILPDPSKPSKRSFIEDLLFNKVTLADAGFIKQYGDCLGDIAARDLICAQKFNGLTVLPPLLTDEMIAQYTSALLAGTITSGWTFGAGAALQIPFAMQMAYRFNGIGVTQNVLYENQKLIANQFNSAIGKIQDSLSSTASALGKLQDVVNQNAQALNTLVKQLSSNFGAISSVLNDILSRLDKVEAEVQIDRLITGRLQSLQTYVTQQLIRAAEIRASANLAATKMSECVLGQSKRVDFCGKGYHLMSFPQSAPHGVVFLHVTYVCAQEKNFTTAPAICHDGKAHFPREGVFVSNGTHWFVTQRNFYEPQIITTDNTFVSGNCDVVIGIVNNTVYDPLQPELDSFKEELDKYFKNHTSPDVDLGDISGINASVVNIQKEIDRLNEVAKNLNESLIDLQELGKYEQYIKWPWYIWLGFIAGLIAIVMVTIMLCCMTSCCSCLKGCCSCGSCCKFDEDDSEPVLKGVKLHYT

SEQ ID NO: 756 - protein, 1273 aa, Artificial Sequence
  SARS-CoV-2/Sweden/01/2020__EPI_ISL_411951 spike protein (1-1273)(P715C_P1069C)
MFVFLVLLPLVSSQCVNLTTRTQLPPAYTNSFTRGVYYPDKVFRSSVLHSTQDLFLPFFSNVTWFHAIHVSGTNGTKRFDNPVLPFNDGVYFASTEKSNIIRGWIFGTTLDSKTQSLLIVNNATNVVIKVCEFQFCNDPFLGVYYHKNNKSWMESEFRVYSSANNCTFEYVSQPFLMDLEGKQGNFKNLREFVFKNIDGYFKIYSKHTPINLVRDLPQGFSALEPLVDLPIGINITRFQTLLALHRSYLTPGDSSSGWTAGAAAYYVGYLQPRTFLLKYNENGTITDAVDCALDPLSETKCTLKSFTVEKGIYQTSNFRVQPTESIVRFPNITNLCPFGEVFNATRFASVYAWNRKRISNCVADYSVLYNSASFSTFKCYGVSPTKLNDLCFTNVYADSFVIRGDEVRQIAPGQTGKIADYNYKLPDDFTGCVIAWNSNNLDSKVGGNYNYLYRLFRKSNLKPFERDISTEIYQAGSTPCNGVEGFNCYFPLQSYGFQPTNGVGYQPYRVVVLSFELLHAPATVCGPKKSTNLVKNKCVNFNFNGLTGTGVLTESNKKFLPFQQFGRDIADTTDAVRDPQTLEILDITPCSFGGVSVITPGTNTSNQVAVLYQDVNCTEVPVAIHADQLTPTWRVYSTGSNVFQTRAGCLIGAEHVNNSYECDIPIGAGICASYQTQTNSPRRARSVASQSIIAYTMSLGAENSVAYSNNSIAICTNFTISVTTEILPVSMTKTSVDCTMYICGDSTECSNLLLQYGSFCTQLNRALTGIAVEQDKNTQEVFAQVKQIYKTPPIKDCGGFNFSQILPDPSKPSKRSFIEDLLFNKVTLADAGFIKQYGDCLGDIAARDLICAQKFNGLTVLPPLLTDEMIAQYTSALLAGTITSGWTFGAGAALQIPFAMQMAYRFNGIGVTQNVLYENQKLIANQFNSAIGKIQDSLSSTASALGKLQDVVNQNAQALNTLVKQLSSNFGAISSVLNDILSRLDKVEAEVQIDRLITGRLQSLQTYVTQQLIRAAEIRASANLAATKMSECVLGQSKRVDFCGKGYHLMSFPQSAPHGVVFLHVTYVCAQEKNFTTAPAICHDGKAHFPREGVFVSNGTHWFVTQRNFYEPQIITTDNTFVSGNCDVVIGIVNNTVYDPLQPELDSFKEELDKYFKNHTSPDVDLGDISGINASVVNIQKEIDRLNEVAKNLNESLIDLQELGKYEQYIKWPWYIWLGFIAGLIAIVMVTIMLCCMTSCCSCLKGCCSCGSCCKFDEDDSEPVLKGVKLHYT

SEQ ID NO: 757 - protein, 1273 aa, Artificial Sequence
  SARS-CoV-2/Tianmen/HBCDC-HB-07/2020__EPI_ISL_412983 spike protein (1-1273)(P715C_P1069C)
MFVFLVLLPLVSSQCVNLTTRTQLPPAYTNSFTRGVYYPDKVFRSSVLHSTQDLFLPFFSNVTWFHAIHVSGTNGTKRFDNPVLPFNDGVYFASTEKSNIIRGWIFGTTLDSKTQSLLIVNNATNVVIKVCEFQFCNDPFLGVYYHKNNKSWMESEFRVYSSANNCTFEYVSQPFLMDLEGKQGNFKNLREFVFKNIDGYFKIYSKHTPINLVRDLPQGFSALEPLVDLPIGINITRFQTLLALHRSYLTPGDSSSGWTAGAAAYYVGYLQPRTFLLKYNENGTITDAVDCALDPLSETKCTLKSFTVEKGIYQTSNFRVQPTESIVRFPNITNLCPFGEVFNATRFASVYAWNRKRISNCVADYSVLYNSASFSTFKCYGVSPTKLNDLCFTNVYADSFVIRGDEVRQIAPGQTGKIADYNYKLPDDFTGCVIAWNSNNLDSKVGGNYNYLYRLFRKSNLKPFERDISTEIYQAGSTPCNGVEGFNCYFPLQSYGFQPTNGVGYQPYRVVVLSFELLHAPATVCGPKKSTNLVKNKCVNFNFNGLTGTGVLTESNKKFLPFQQFGRDIADTTDAVRDPQTLEILDITPCSFGGVSVITPGTNTSNQVAVLYQDLNCTEVPVAIHADQLTPTWRVYSTGSNVFQTRAGCLIGAEHVNNSYECDIPIGAGICASYQTQTNSPRRARSVASQSIIAYTMSLGAENSVAYSNNSIAICTNFTISVTTEILPVSMTKTSVDCTMYICGDSTECSNLLLQYGSFCTQLNRALTGIAVEQDKNTQEVFAQVKQIYKTPPIKDFGGFNFSQILPDPSKPSKRSFIEDLLFNKVTLADAGFIKQYGDCLGDIAARDLICAQKFNGLTVLPPLLTDEMIAQYTSALLAGTITSGWTFGAGAALQIPFAMQMAYRFNGIGVTQNVLYENQKLIANQFNSAIGKIQDSLSSTASALGKLQDVVNQNAQALNTLVKQLSSNFGAISSVLNDILSRLDKVEAEVQIDRLITGRLQSLQTYVTQQLIRAAEIRASANLAATKMSECVLGQSKRVDFCGKGYHLMSFPQSAPHGVVFLHVTYVCAQEKNFTTAPAICHDGKAHFPREGVFVSNGTHWFVTQRNFYEPQIITTDNTFVSGNCDVVIGIVNNTVYDPLQPELDSFKEELDKYFKNHTSPDVDLGDISGINASVVNIQKEIDRLNEVAKNLNESLIDLQELGKYEQYIKWPWYIWLGFIAGLIAIVMVTIMLCCMTSCCSCLKGCCSCGSCCKFDEDDSEPVLKGVKLHYT

SEQ ID NO: 758 - protein, 1273 aa, Artificial Sequence
  SARS-CoV-2/Hong Kong/case42_VM20002493/2020__EPI_ISL_414527 spike protein (1-1273)(P715C_P1069C)
MFVFLVLLPLVSSQCVNLTTRTQLPPAYTNSFTRGVYYPDKVFRSSVLHSTQDLFLPFFSNVTWFHAIHVSGTNGTKRFDNPVLPFNDGVYFASTEKSNIIRGWIFGTTLDSKTQSLLIVNNATNVVIKVCEFQFCNDPFLGVYYHKNNKSWMESEFRVYSSANNCTFEYVSQPFLMDLEGKQGNFKNLREFVFKNIDGYFKIYSKHTPINLVRDLPQGFSALEPLVDLPIGINITRFQTLLALHRSYLTPGDSSSGWTAGAAAYYVGYLQPRTFLLKYNENGTITDAVDCALDPLSETKCTLKSFTVEKGIYQTSNFRVQPTESIVRFPNITNLCPFGEVFNATRFASVYAWNRKRISNCVADYSVLYNSASFSTFKCYGVSPTKLNDLCFTNVYADSFVIRGDEVRQIAPGQTGKIADYNYKLPDDFTGCVIAWNSNNLDSKVGGNYNYLYRLFRKSNLKPFERDISTEIYQAGSTPCNGVEGFNCYFPLQSYGFQPTNGVGYQPYRVVVLSFELLHAPATVCGPKKSTNLVKNKCVNFNFNGLTGTGVLTESNKKFLPFQQFGRDIADTTDAVRDPQTLEILDITPCSFGGVSVITPGTNTSNQVAVLYQDVNCTEVPVAIHADQLTPTWRVYSTGSNVFQTRAGCLIGAEHVNNSYECDIPIGAGICASYQTQTNSPRRARSVASQSIIAYTMSLGAENSVAYSNNSIAICTNFAISVTTEILPVSMTKTSVDCTMYICGDSTECSNLLLQYGSFCTQLNRALTGIAVEQDKNTQEVFAQVKQIYKTPPIKDFGGFNFSQILPDPSKPSKRSFIEDLLFNKVTLADAGFIKQYGDCLGDIAARDLICAQKFNGLTVLPPLLTDEMIAQYTSALLAGTITSGWTFGAGAALQIPFAMQMAYRFNGIGVTQNVLYENQKLIANQFNSAIGKIQDSLSSTASALGKLQDVVNQNAQALNTLVKQLSSNFGAISSVLNDILSRLDKVEAEVQIDRLITGRLQSLQTYVTQQLIRAAEIRASANLAATKMSECVLGQSKRVDFCGKGYHLMSFPQSAPHGVVFLHVTYVCAQEKNFTTAPAICHDGKAHFPREGVFVSNGTHWFVTQRNFYEPQIITTDNTFVSGNCDVVIGIVNNTVYDPLQPELDSFKEELDKYFKNHTSPDVDLGDISGINASVVNIQKEIDRLNEVAKNLNESLIDLQELGKYEQYIKWPWYIWLGFIAGLIAIVMVTIMLCCMTSCCSCLKGCCSCGSCCKFDEDDSEPVLKGVKLHYT

SEQ ID NO: 759 - protein, 1273 aa, Artificial Sequence
  SARS-CoV-2/USA/CruiseA-23/2020__EPI_ISL_414482 spike protein (1-1273)(P715C_P1069C)
MFVFLVLLPLVSSQCVNLTTRTQLPPAYTNSFTRGVYYPDKVFRSSVLHSTQDLFLPFFSNVTWFHAIHVSGTNGTKRFDNPVLPFNDGVYFASTEKSNIIRGWIFGTTLDSKTQSLLIVNNATNVVIKVCEFQFCNDPFLGVYYHKNNKSWMESEFRVYSSANNCTFEYVSQPFLMDLEVKQGNFKNLREFVFKNIDGYFKIYSKHTPINLVRDLPQGFSALEPLVDLPIGINITRFQTLLALHRSYLTPGDSSSGWTAGAAAYYVGYLQPRTFLLKYNENGTITDAVDCALDPLSETKCTLKSFTVEKGIYQTSNFRVQPTESIVRFPNITNLCPFGEVFNATRFASVYAWNRKRISNCVADYSVLYNSASFSTFKCYGVSPTKLNDLCFTNVYADSFVIRGDEVRQIAPGQTGKIADYNYKLPDDFTGCVIAWNSNNLDSKVGGNYNYLYRLFRKSNLKPFERDISTEIYQAGSTPCNGVEGFNCYFPLQSYGFQPTNGVGYQPYRVVVLSFELLHAPATVCGPKKSTNLVKNKCVNFNFNGLTGTGVLTESNKKFLPFQQFGRDIADTTDAVRDPQTLEILDITPCSFGGVSVITPGTNTSNQVAVLYQDVNCTEVPVAIHADQLTPTWRVYSTGSNVFQTRAGCLIGAEHVNNSYECDIPIGAGICASYQTQTNSPRRARSVASQSIIAYTMSLGAENSVAYSNNSIAICTNFTISVTTEILPVSMTKTSVDCTMYICGDSTECSNLLLQYGSFCTQLNRALTGIAVEQDKNTQEVFAQVKQIYKTPPIKDFGGFNFSQILPDPSKPSKRSFIEDLLFNKVTLADAGFIKQYGDCLGDIAARDLICAQKFNGLTVLPPLLTDEMIAQYTSALLAGTITSGWTFGAGAALQIPFAMQMAYRFNGIGVTQNVLYENQKLIANQFNSAIGKIQDSLSSTASALGKLQDVVNQNAQALNTLVKQLSSNFGAISSVLNDILSRLDKVEAEVQIDRLITGRLQSLQTYVTQQLIRAAEIRASANLAATKMSECVLGQSKRVDFCGKGYHLMSFPQSAPHGVVFLHVTYVCAQEKNFTTAPAICHDGKAHFPREGVFVSNGTHWFVTQRNFYEPQIITTDNTFVSGNCDVVIGIVNNTVYDPLQPELDSFKEELDKYFKNHTSPDVDLGDISGINASVVNIQKEIDRLNEVAKNLNESLIDLQELGKYEQYIKWPWYIWLGFIAGLIAIVMVTIMLCCMTSCCSCLKGCCSCGSCCKFDEDDSEPVLKGVKLHYT

SEQ ID NO: 760 - protein, 1273 aa, Artificial Sequence
  SARS-CoV-2/Hong Kong/case85_VM20002868/2020__EPI_ISL_414519 spike protein (1-1273)(P715C_P1069C)
MFVFLVLVPLVSSQCVNLTTRTQLPPAYTNSFTRGVYYPDKVFRSSVLHSTQDLFLPFFSNVTWFHAIHVSGTNGTKRFDNPVLPFNDGVYFASTEKSNIIRGWIFGTTLDSKTQSLLIVNNATNVVIKVCEFQFCNDPFLGVYYHKNNKSWMESEFRVYSSANNCTFEYVSQPFLMDLEGKQGNFKNLREFVFKNIDGYFKIYSKHTPINLVRDLPQGFSALEPLVDLPIGINITRFQTLLALHRSYLTPGDSSSGWTAGAAAYYVGYLQPRTFLLKYNENGTITDAVDCALDPLSETKCTLKSFTVEKGIYQTSNFRVQPTESIVRFPNITNLCPFGEVFNATRFASVYAWNRKRISNCVADYSVLYNSASFSTFKCYGVSPTKLNDLCFTNVYADSFVIRGDEVRQIAPGQTGKIADYNYKLPDDFTGCVIAWNSNNLDSKVGGNYNYLYRLFRKSNLKPFERDISTEIYQAGSTPCNGVEGFNCYFPLQSYGFQPTNGVGYQPYRVVVLSFELLHAPATVCGPKKSTNLVKNKCVNFNFNGLTGTGVLTESNKKFLPFQQFGRDIADTTDAVRDPQTLEILDITPCSFGGVSVITPGTNTSNQVAVLYQDVNCTEVPVAIHADQLTPTWRVYSTGSNVFQTRAGCLIGAEHVNNSYECDIPIGAGICASYQTQTNSPRRARSVASQSIIAYTMSLGAENSVAYSNNSIAICTNFTISVTTEILPVSMTKTSVDCTMYICGDSTECSNLLLQYGSFCTQLNRALTGIAVEQDKNTQEVFAQVKQIYKTPPIKDFGGFNFSQILPDPSKPSKRSFIEDLLFNKVTLADAGFIKQYGDCLGDIAARDLICAQKFNGLTVLPPLLTDEMIAQYTSALLAGTITSGWTFGAGAALQIPFAMQMAYRFNGIGVTQNVLYENQKLIANQFNSAIGKIQDSLSSTASALGKLQDVVNQNAQALNTLVKQLSSNFGAISSVLNDILSRLDKVEAEVQIDRLITGRLQSLQTYVTQQLIRAAEIRASANLAATKMSECVLGQSKRVDFCGKGYHLMSFPQSAPHGVVFLHVTYVCAQEKNFTTAPAICHDGKAHFPREGVFVSNGTHWFVTQRNFYEPQIITTDNTFVSGNCDVVIGIVNNTVYDPLQPELDSFKEELDKYFKNHTSPDVDLGDISGINASVVNIQKEIDRLNEVAKNLNESLIDLQELGKYEQYIKWPWYIWLGFIAGLIAIVMVTIMLCCMTSCCSCLKGCCSCGSCCKFDEDDSEPVLKGVKLHYT

SEQ ID NO: 761 - protein, 1273 aa, Artificial Sequence
  SARS-CoV-2/England/200990660/2020__EPI_ISL_414523 spike protein (1-1273)(P715C_P1069C)
MFVFLVLLPLVSSQCVNLTTRTQLPPAYTNSFTRGVYYPDKVFRSSVLHSTQDLFLPFFSNVTWFHAIHVSGTNGTKRFDNPVLPFNDGVYFASTEKSNIIRGWIFGTTLDSKTQSLLIVNNATNVVIKVCEFQFCNDPFLGVYYHKNNKSWMESEFRVYSSANNCTFEYVSQPFLMDLEGKQGNFKNLREFVFKNIDGYFKIYSKHTPINLVRDLPQGFSALEPLVDLPIGINITRFQTLLALHRSYLTPGDSSSGWTAGAAAYYVGYLQPRTFLLKYNENGTITDAVDCALDPLSETKCTLKSFTVEKGIYQTSNFRVQPTESIVRFPNITNLCPFGEVFNATRFASVYAWNRKRISNCVADYSVLYNSASFSTFKCYGVSPTKLNDLCFTNVYADSFVIRGDEVRQIAPGQTGKIADYNYKLPDDFTGCVIAWNSNNLDSKVGGNYNYLYRLFRKSNLKPFERDISTEIYQAGSTPCNGVEGFNCYFPLQSYGFQPTNGVGYQPYRVVVLSFELLHAPATVCGPKKSTNLVKNKCVNFNFNGLTGTGVLTESNKKFLPFQQFGRDIADTTDAVRDPQTLEILDITPCSFGGVSVITPGTNTSNQVAVLYQGVNCTEVPVAIHADQLTPTWRVYSTGSNVFQTRAGCLIGAEHVNNSYECDIPIGAGICASYQTQTNSPRRARSVASQSIIAYTMSLGAENSVAYSNNSIAICTNFTISVTTEILPVSMTKTSVDCTMYICGDSTECSNLLLQYGSFCTQLNRALTGIAVEQDKNTQEVFAQVKQIYKTPPIKDFGGFNFSQILPDPSKPSKRSFIEDLLFNKVTLADAGFIKQYGDCLGDIAARDLICAQKFNGLTVLPPLLTDEMIAQYTSALLAGTITSGWTFGAGAALQIPFAMQMAYRFNGIGVTQNVLYENQKLIANQFNSAIGKIQDSLSSTASALGKLQDVVNQNAQALNTLVKQLSSNFGAISSVLNDILSRLDKVEAEVQIDRLITGRLQSLQTYVTQQLIRAAEIRASANLAATKMSECVLGQSKRVDFCGKGYHLMSFPQSAPHGVVFLHVTYVCAQEKNFTTAPAICHDGKAHFPREGVFVSNGTHWFVTQRNFYEPQIITTDNTFVSGNCDVVIGIVNNTVYDPLQPELDSFKEELDKYFKNHTSPDVDLGDISGINASVVNIQKEIDRLNEVAKNLNESLIDLQELGKYEQYIKWPWYIWLGFIAGLIAIVMVTIMLCCMTSCCSCLKGCCSCGSCCKFDEDDSELVLKGVKLHYT

SEQ ID NO: 762 - protein, 1273 aa, Artificial Sequence
  SARS-CoV-2/Australia/NSW09/2020__EPI_ISL_413595 spike protein (1-1273)(P715C_P1069C)
MFVFLVLLPLVSSQCVNLTTRTQLPPAYTNSFTRGVYYPDKVFRSSVLHSTQDLFLPFFSNVTWFHAIHVSGTNGTKRFDNPVLPFNDGVYFASTEKSNIIRGWIFGTTLDSKTQSLLIVNNATNVVIKVCEFQFCNDPFLGVYYHKNNKSWMESEFRVYSSANNCTFEYVSQPFLMDLEGKQGNFKNLREFVFKNIDGYFKIYSKHTPINLVRDLPQGFSALEPLVDLPIGINITRFQTLLALHRSYLTPGDSSSGWTAGAAAYYVGYLQPRTFLLKYNENGTITDAVDCALDPLSETKCTLKSFTVEKGIYQTSNFRVQPTESIVRFPNITNLCPFGEVFNATRFASVYAWNRKRISNCVADYSVLYNSASFSTFKCYGVSPTKLNDLCFTNVYADSFVIRGDEVRQIAPGQTGKIADYNYKLPDDFTGCVIAWNSNNLDSKVGGNYNYLYRLFRKSNLKPFERDISTEIYQAGSTPCNGVEGFNCYFPLQSYGFQPTNGVGYQPYRVVVLSFELLHAPATVCGPKKSTNLVKNKCVNFNFNGLTGTGVLTESNKKFLPFQQFGRDIADTTDAVRDPQTLEILDITPCSFGGVSVITPGTNTSNQVAVLYQDVNCTEVPVAIHADQLTPTWRVYSTGSNVFQTRAGCLIGAEHVNNSYECDIPIGAGICASYQTQTNSPRRARSVASQSIIAYTMSLGAENSVAYSNNSIAICTNFTISVTTEILPVSMTKTSVDCTMYICGDSTECSNLLLQYGSFCTQLNRALTGIAVEQDKNTQEVFAQVKQIYKTPPIKDFGGFNFSQILPDPSKPSKRSFIEDLLFNKVTLADAGFIKQYGDCLGDIAARDLICAQKFNGLTVLPPLLTDEMIAQYTSALLAGTITSGWTFGAGAALQIPFAMQMAYRFNGIGVTQNVLYENQKLIANQFNSAIGKIQDSLSFTASALGKLQDVVNQNAQALNTLVKQLSSNFGAISSVLNDILSRLDKVEAEVQIDRLITGRLQSLQTYVTQQLIRAAEIRASANLAATKMSECVLGQSKRVDFCGKGYHLMSFPQSAPHGVVFLHVTYVCAQEKNFTTAPAICHDGKAHFPREGVFVSNGTHWFVTQRNFYEPQIITTDNTFVSGNCDVVIGIVNNTVYDPLQPELDSFKEELDKYFKNHTSPDVDLGDISGINASVVNIQKEIDRLNEVAKNLNESLIDLQELGKYEQYIKWPWYIWLGFIAGLIAIVMVTIMLCCMTSCCSCLKGCCSCGSCCKFDEDDSEPVLKGVKLHYT

SEQ ID NO: 763 - protein, 1273 aa, Artificial Sequence
  SARS-CoV-2/Australia/NSW10/2020__EPI_ISL_413596 spike protein (1-1273)(P715C_P1069C)
MFVFLVLLPLVSSQCVNLTTRTQLPPAYTNSFTRGVYYPDKVFRSSVLHSTQDLFLPFFSNVTWFHAIHVSGTNGTKRFDNPVLPFNDGVYFASTEKSNIIRGWIFGTTLDSKTQSLLIVNNATNVVIKVCEFQFCNDPFLGVYYHKNNKSWMESEFRVYSSANNCTFEYVSQPFLMDLEGKQGNFKNLREFVFKNIDGYFKIYSKHTPINLVRDLPQGFSALEPLVDLPIGINITRFQTLLALHRSYLTPGDSSSGWTAGAAAYYVGYLQPRTFLLKYNENGTITDAVDCALDPLSETKCTLKSFTVEKGIYQTSNFRVQPTESIVRFPNITNLCPFGEVFNATRFASVYAWNRKRISNCVADYSVLYNSASFSTFKCYGVSPTKLNDLCFTNVYADSFVIRGDEVRQIAPGQTGKIADYNYKLPDDFTGCVIAWNSNNLDSKVGGNYNYLYRLFRKSNLKPFERDISTEIYQAGSTPCNGVEGFNCYFPLQSYGFQPTNGVGYQPYRVVVLSFELLHAPATVCGPKKSTNLVKNKCVNFNFNGLTGTGVLTESNKKFLPFQQFGRDIADTTDAVRDPQTLEILDITPCSFGGVSVITPGTNTSNQVAVLYQDVNCTEVPVAIHADQLTPTWRVYSTGSNVFQTRAGCLIGAEHVNNSYECDIPIGAGICASYQTQTNSPRRARSVASQSIIAYTMSLGAENSVAYSNNSIAICTNFTISVTTEILPVSMTKTSVDCTMYICGDSTECSNLLLQYGSFCTQLNRALTGIAVEQDKNTQEVFAQVKQIYKTPPIKDFGGFNFSQILPDPSKPSKRSFIEDLLFNKVTLADAGFIKQYGDCLGDIAARDLICAQKFNGLTVLPPLLTDEMIAQYTSALLAGTITSGWTFGAGAALQIPFAMQMAYRFNGIGVTQNVLYENQKLIANQFNSAIGKIQDSLSSTASALGKLQDVVNQNAQALNTLVKQLSSNFGAISSVLNDILSRLDKVEAEVQIDRLITGRLQSLQTYVTQQLIRAAEIRASANLAATKMSECVLGQSKRVDFCGKGYHLMSFPQSAPHGVVFLHVTYVCAQEKNFTTAPAICHDGKAHFPREGVFVSNGTHWFVTQRNFYEPQIITTDNTFVSGNCDVVIGIVNNTVYDPLQPELDSFKEELDKYFKNHTSPDVDLGDISGINASVVNIQKEIDRLNEVAKNLNESLIDLQELGKYEQYIKWPWYIWLGFIAGLIAIVMVTIMLCCMTSCCSCLKGCCSCGSCFKFDEDDSEPVLKGVKLHYT

SEQ ID NO: 764 - protein, 1273 aa, Artificial Sequence
  SARS-CoV-2/Switzerland/1000477797/2020__EPI_ISL_413023 spike protein (1-1273)(P715C_P1069C)
MFVFLVLLPLVSSQCVNLTTRTQLPPAYTNSFTRGVYYPDKVFRSSVLHSTQDLFLPFFSNVTWFHAIHVSGTNGTKRFDNPVLPFNDGVYFASTEKSNIIRGWIFGTTLDSKTQSLLIVNNATNVVIKVCEFQFCNDPFLGVYYHKNNKSWMESEFRVYSSANNCTFEYVSQPFLMDLEGKQGNFKNLREFVFKNIDGYFNIYSKHTPINLVRDLPQGFSALEPLVDLPIGINITRFQTLLALHRSYLTPGDSSSGWTAGAAAYYVGYLQPRTFLLKYNENGTITDAVDCALDPLSETKCTLKSFTVEKGIYQTSNFRVQPTESIVRFPNITNLCPFGEVFNATRFASVYAWNRKRISNCVADYSVLYNSASFSTFKCYGVSPTKLNDLCFTNVYADSFVIRGDEVRQIAPGQTGKIADYNYKLPDDFTGCVIAWNSNNLDSKVGGNYNYLYRLFRKSNLKPFERDISTEIYQAGSTPCNGVEGFNCYFPLQSYGFQPTNGVGYQPYRVVVLSFELLHAPATVCGPKKSTNLVKNKCVNFNFNGLTGTGVLTESNKKFLPFQQFGRDIADTTDAVRDPQTLEILDITPCSFGGVSVITPGTNTSNQVAVLYQGVNCTEVPVAIHADQLTPTWRVYSTGSNVFQTRAGCLIGAEHVNNSYECDIPIGAGICASYQTQTNSPRRARSVASQSIIAYTMSLGAENSVAYSNNSIAICTNFTISVTTEILPVSMTKTSVDCTMYICGDSTECSNLLLQYGSFCTQLNRALTGIAVEQDKNTQEVFAQVKQIYKTPPIKDFGGFNFSQILPDPSKPSKRSFIEDLLFNKVTLADAGFIKQYGDCLGDIAARDLICAQKFNGLTVLPPLLTDEMIAQYTSALLAGTITSGWTFGAGAALQIPFAMQMAYRFNGIGVTQNVLYENQKLIANQFNSAIGKIQDSLSSTASALGKLQDVVNQNAQALNTLVKQLSSNFGAISSVLNDILSRLDKVEAEVQIDRLITGRLQSLQTYVTQQLIRAAEIRASANLAATKMSECVLGQSKRVDFCGKGYHLMSFPQSAPHGVVFLHVTYVCAQEKNFTTAPAICHDGKAHFPREGVFVSNGTHWFVTQRNFYEPQIITTDNTFVSGNCDVVIGIVNNTVYDPLQPELDSFKEELDKYFKNHTSPDVDLGDISGINASVVNIQKEIDRLNEVAKNLNESLIDLQELGKYEQYIKWPWYIWLGFIAGLIAIVMVTIMLCCMTSCCSCLKGCCSCGSCCKFDEDDSEPVLKGVKLHYT

SEQ ID NO: 765 - protein, 1273 aa, Artificial Sequence
  SARS-CoV-2/Belgium/BA-02291/2020__EPI_ISL_415159 spike protein (1-1273)(P715C_P1069C)
MFVFLVLLPLVSSQCVNLTTRTQLPPAYTNSFTRGVYYPDKVFRSSVLHSTQDLFLPFFSNVTWFHAIHVSGTNGTKRFDNPVLPFNDGVYFASTEKSNIIRGWIFGTTLDSKTQSLLIVNNATNVVIKVCEFQFCNDPFLGVYYHKNNKSWMESEFRVYSSANNCTFEYVSQPFLMDLEGKQGNFKNLREFVFKNIDGYFKIYSKHTPINLVRDLPQGFSALEPLVDLPIGINITRFQTLLALHRSYLTPGDSSSGWTAGAAAYYVGYLQPRTFLLKYNENGTITDAVDCALDPLSETKCTLKSFTVEKGIYQTSNFRVQPTESIVRFPNITNLCPFGEVFNATRFASVYAWNRKRISNCVADYSVLYNSASFSTFKCYGVSPTKLNDLCFTNVYADSFVIRGDEVRQIAPGQTGKIADYNYKLPDDFTGCVIAWNSNNLDSKVGGNYNYLYRLFRRSNLKPFERDISTEIYQAGSTPCNGVEGFNCYFPLQSYGFQPTNGVGYQPYRVVVLSFELLPAPATVCGPKKSTNLVKNKCVNFNFNGLTGTGVLTESNKKFLPFQQFGRDIADTTDAVRDPQTLEILDITPCSFGGVSVITPGTNTSNQVAVLYQGVNCTEVPVAIHADQLTPTWRVYSTGSNVFQTRAGCLIGAEHVNNSYECDIPIGAGICASYQTQTNSPRRARSVASQSIIAYTMSLGAENSVAYSNNSIAICTNFTISVTTEILPVSMTKTSVDCTMYICGDSTECSNLLLQYGSFCTQLNRALTGIAVEQDKNTQEVFAQVKQIYKTPPIKDFGGFNFSQILPDPSKPSKRSFIEDLLFNKVTLADAGFIKQYGDCLGDIAARDLICAQKFNGLTVLPPLLTDEMIAQYTSALLAGTITSGWTFGAGAALQIPFAMQMAYRFNGIGVTQNVLYENQKLIANQFNSAIGKIQDSLSSAAPALGKLQDVVNQNAQALNTLVKQLSSNFGAISSVLNDILSRLDKVEAEVQIDRLITGRLQSLQTYVTQQLIRAAEIRASANLAATKMSECVLGQSKRVDFCGKGYHLMSFPQSAPHGVVFLHVTYVCAQEKNFTTAPAICHDGKAHFPREGVFVSNGTHWFVTQRNFYEPQIITTDNTFVSGNCDVVIGIVNNTVYDPLQPELDSFKEELDKYFKNHTSPDVDLGDISGINASVVNIQKEIDRLNEVAKNLNESLIDLQELGKYEQYIKWPWYIWLGFIAGLIAIVMVTIMLCCMTSCCSCLKGCCSCGSCCKFDEDDSEPVLKGVKLHYT

SEQ ID NO: 766 - protein, 1273 aa, Artificial Sequence
  SARS-CoV-2/USA/WA8-UW5/2020__EPI_ISL_413486 spike protein (1-1273)(P715C_P1069C)
MFVFLVLLPLVSSQCVNLTTRTQLPPAYTNSFTRGVYYPDKVFRSSVLHSTQDLFLPFFSNVTWFHAIHVSGTNGTKRFDNPVLPFNDGVYFASTEKSNIIRGWIFGTTLDSKTQSLLIVNNATNVVIKVCEFQFCNDPFLGVYYHKNNKSWMESEFRVYSSANNCTFEYVSQPFLMDLEGKQGNFKNLREFVFKNIDGYFKIYSKHTPINLVRDLPQGFSALEPLVDLPIGINITRFQTLLALHRSYLTPGDSSSGWTAGAAAYYVGYLQPRTFLLKYNENGTITDAVDCALDPLSETKCTLKSFTVEKGIYQTSNFRVQPTESIVRFPNITNLCPFGEVFNATRFASVYAWNRKRISNCVADYSVLYNSASFSTFKCYGVSPTKLNDLCFTNVYADSFVIRGDEVRQIAPGQTGKIADYNYKLPDDFTGCVIAWNSNNLDSKVGGNYNYLYRLFRKSNLKPFERDISTEIYQAGSTPCNGVEGFNCYFPLQSYGFQPTNGVGYQPYRVVVLSFELLHAPATVCGPKKSTNLVKNKCVNFNFNGLTGTGVLTESNKKFLPFQQFGRDIADTTDAVRDPQTLEILDITPCSFGGVSVITPGTNTSNQVAVLYQDVNCTEVPVAIHADQLTPTWRVYSTGSNVFQTRAGCLIGAEYVNNSYECDIPIGAGICASYQTQTNSPRRARSVASQSIIAYTMSLGAENSVAYSNNSIAICTNFTISVTTEILPVSMTKTSVDCTMYICGDSTECSNLLLQYGSFCTQLNRALTGIAVEQDKNTQEVFAQVKQIYKTPPIKDFGGFNFSQILPDPSKPSKRSFIEDLLFNKVTLADAGFIKQYGDCLGDIAARDLICAQKFNGLTVLPPLLTDEMIAQYTSALLAGTITSGWTFGAGAALQIPFAMQMAYRFNGIGVTQNVLYENQKLIANQFNSAIGKIQDSLSSTASALGKLQDVVNQNAQALNTLVKQLSSNFGAISSVLNDILSRLDKVEAEVQIDRLITGRLQSLQTYVTQQLIRAAEIRASANLAATKMSECVLGQSKRVDFCGKGYHLMSFPQSAPHGVVFLHVTYVCAQEKNFTTAPAICHDGKAHFPREGVFVSNGTHWFVTQRNFYEPQIITTDNTFVSGNCDVVIGIVNNTVYDPLQPELDSFKEELDKYFKNHTSPDVDLGDISGINASVVNIQKEIDRLNEVAKNLNESLIDLQELGKYEQYIKWPWYIWLGFIAGLIAIVMVTIMLCCMTSCCSCLKGCCSCGSCCKFDEDDSEPVLKGVKLHYT

SEQ ID NO: 767 - protein, 1273 aa, Artificial Sequence
  SARS-CoV-2/England/20102000506/2020__EPI_ISL_415147 spike protein (1-1273)(P715C_P1069C)
MFVFLVLLPLVSSQCVNLTTRTQLPPAYTNSFTRGVYYPDKVFRSSVLHSTQDLFLPFFSNVTWFHAIHVSGTNGTKRFDNPVLPFNDGVYFASTEKSNIIRGWIFGTTLDSKTQSLLIVNNATNVVIKVCEFQFCNDPFLGVYYHKNNKSWMESEFRVYSSANNCTFEYVSQPFLMDLEGKQGNFKNLREFVFKNIDGYFKIYSKHTPINLVRDLPQGFSALEPLVDLPIGINITRFQTLLALHRSYLTPGDSSSGWTAGAAAYYVGYLQPRTFLLKYNENGTITDAVDCALDPLSETKCTLKSFTVEKGIYQTSNFRVQPTESIVRFPNITNLCPFGEVFNATRFASVYAWNRKRISNCVADYSVLYNSASFSTFKCYGVSPTKLNDLCFTNVYADSFVIRGDEVRQIAPGQTGKIADYNYKLPDDFTGCVIAWNSNNLDSKVGGNYNYLYRLFRKSNLKPFERDISTEIYQAGSTPCNGVEGFNCYFPLQSYGFQPTNGVGYQPYRVVVLSFELLHAPATVCGPKKSTNLVKNKCVNFNFNGLTGTGVLTESNKKFLPFQQFGRDIADTTDAVRDPQTLEILDITPCSFGGVSVITPGTNTSNQVAVLYQGVNCTEVPVAIHADQLTPTWRVYSTGSNVFQTRAGCLIGAEHVNNSYECDIPIGAGICASYQTQTNSPRRARSVASQSIIAYTMSLGAENSVAYSNNSIAICTNFTISVTTEILPVSMTKTSVDCTMYICGDSTECSNLLLQYGSFCTQLNRALTGIAVEQDKNTQEVFAQVKQIYKTPPIKDFGGFNFSQILPDPSKPSKRSFIEDLLFNKVTLADAGFIKQYGYCLGDIAARDLICAQKFNGLTVLPPLLTDEMIAQYTSALLAGTITSGWTFGAGAALQIPFAMQMAYRFNGIGVTQNVLYENQKLIANQFNSAIGKIQDSLSSTASALGKLQDVVNQNAQALNTLVKQLSSNFGAISSVLNDILSRLDKVEAEVQIDRLITGRLQSLQTYVTQQLIRAAEIRASANLAATKMSECVLGQSKRVDFCGKGYHLMSFPQSAPHGVVFLHVTYVCAQEKNFTTAPAICHDGKAHFPREGVFVSNGTHWFVTQRNFYEPQIITTDNTFVSGNCDVVIGIVNNTVYDPLQPELDSFKEELDKYFKNHTSPDVDLGDISGINASVVNIQKEIDRLNEVAKNLNESLIDLQELGKYEQYIKWPWYIWLGFIAGLIAIVMVTIMLCCMTSCCSCLKGCCSCGSCCKFDEDDSEPVLKGVKLHYT

SEQ ID NO: 768 - protein, 1273 aa, Artificial Sequence
  SARS-CoV-2/Belgium/VAG-03013/2020__EPI_ISL_415155 spike protein (1-1273)(P715C_P1069C)
MFVFLVLLPLVSSQCVNLTTRTQLPPAYTNSFTRGVYYPDKVFRSSVLHSTQDLFLPFFSNVTWFHAIHVSGTNGTKRFDNPVLPFNDGVYFASTEKSNIIRGWIFGTTLDSKTQSLLIVNNATNVVIKVCEFQFCNDPFLGVYYHKNNKSWMESEFRVYSSANNCTFEYVSQPFLMDLEGKQGNFKNLREFVFKNIDGYFKIYSKHTPINLVRDLPQGFSALEPLVDLPIGINITRFQTLLALHRSYLTPGDSSSGWTAGAAAYYVGYLQPRTFLLKYNENGTITDAVDCALDPLSETKCTLKSFTVEKGIYQTSNFRVQPTESIVRFPNITNLCPFGEVFNATRFASVYAWNRKRISNCVADYSVLYNSASFSTFKCYGVSPTKLNDLCFTNVYADSFVIRGDEVRQIAPGQTGKIADYNYKLPDDFTGCVIAWNSNNLDSKVGGNYNYLYRLFRKSNLKPFERDISTEIYQAGSTPCNGVEGFNCYFPLQSYGFQPTNGVGYQPYRVVVLSFELLHAPATVCGPKKSTNLVKNKCVNFNFNGLTGTGVLTESNKKFLPFQQFGRDIADTTDAVRDPQTLEILDITPCSFGGVSVITPGTNTSNQVAVLYQGVNCTEVPVAIHADQLTPTWRVYSTGSNVFQTRAGCLIGAEHVNNSYECDIPIGAGICASYQTQTNSPRRARSVASQSIIAYTMSLGAENSVAYSNNSIAICTNFTISVTTEILPVSMTKTSVDCTMYICGDSTECSNLLLQYGSFCTQLNRALTGIAVEQDKNTQEVFAQVKQIYKTPPIKDFGGFNFSQILPDPSKPSKRSFIEDLLFNKVTLADAGFIKQYGDCLGDIAARDLICAQKFNGLTVLPPLLTDEMIAQYTSALLAGTITSGWTFGAGAALQIPFAMQMAYRFNGIGVTQNVLYENQKLIANQFNSAIGKIQDSLSSTATALGKLQDVVNQNAQALNTLVKQLSSNFGAISSVLNDILSRLDKVEAEVQIDRLITGRLQSLQTYVTQQLIRAAEIRASANLAATKMSECVLGQSKRVDFCGKGYHLMSFPQSAPHGVVFLHVTYVCAQEKNFTTAPAICHDGKAHFPREGVFVSNGTHWFVTQRNFYEPQIITTDNTFVSGNCDVVIGIVNNTVYDPLQPELDSFKEELDKYFKNHTSPDVDLGDISGINASVVNIQKEIDRLNEVAKNLNESLIDLQELGKYEQYIKWPWYIWLGFIAGLIAIVMVTIMLCCMTSCCSCLKGCCSCGSCCKFDEDDSEPVLKGVKLHYT

SEQ ID NO: 769 - protein, 1273 aa, Artificial Sequence
  SARS-CoV-2/Belgium/BC-03016/2020__EPI_ISL_415157 spike protein (1-1273)(P715C_P1069C)
MFVFLVLLPLVSSQCVNLTTRTQLPPAYTNSFTRGVYYPDKVFRSSVLHSTQDLFLPFFSNVTWFHAIHVSGTNGTKRFDNPVLPFNDGVYFASTEKSNIIRGWIFGTTLDSKTQSLLIVNNATNVVIKVCEFQFCNDPFLGVYYHKNNKSWMESEFRVYSSANNCTFEYVSQPFLMDLEGKQGNFKNLREFVFKNIDGYFKIYSKHTPINLVRDLPQGFSALEPLVDLPIGINITRFQTLLALHRSYLTPGDSSSGWTAGAAAYYVGYLQPRTFLLKYNENGTITDAVDCALDPLSETKCTLKSFTVEKGIYQTSNFRVQPTESIVRFPNITNLCPFGEVFNATRFASVYAWNRKRISNCVADYSVLYNSASFSTFKCYGVSPTKLNDLCFTNVYADSFVIRGDEVRQIAPGQTGKIADYNYKLPDDFTGCVIAWNSNNLDSKVGGNYNYLYRLFRKSNLKPFERDISTEIYQAGSTPCNGVEGFNCYFPLQSYGFQPTNGVGYQPYRVVVLSFELLHAPATVCGPKKSTNLVKNKCVNFNFNGLTGTGVLTESNKKFLPFQQFGRDIADTTDAVRDPQTLEILDITPCSFGGVSVITPGTNTSNQVAVLYQGVNCTEVPVAIHADQLTPTWRVYSTGSNVFQTRAGCLIGAEHVNNSYECDIPIGAGICASYQTQTNSPRRARSVASQSIIAYTMSLGAENSVAYSNNSIAICTNFTISVTTEILPVSMTKTSVDCTMYICGDSTECSNLLLQYGSFCTQLNRALTGIAVEQDKNTQEVFAQVKQIYKTPPIKDFGGFNFSQILPDPSKPSKRSFIEDLLFNKVTLADAGFIKQYGDCLGDIAARDLICAQKFNGLTVLPPLLTDEMIAQYTSALLAGTITSGWTFGAGAALQIPFAMQMAYRFNGIGVTQNVLYENQKLIANQFNSAIGKIQDSLSSTAPALGKLQDVVNQNAQALNTLVKQLSSNFGAISSVLNDILSRLDKVEAEVQIDRLITGRLQSLQTYVTQQLIRAAEIRASANLAATKMSECVLGQSKRVDFCGKGYHLMSFPQSAPHGVVFLHVTYVCAQEKNFTTAPAICHDGKAHFPREGVFVSNGTHWFVTQRNFYEPQIITTDNTFVSGNCDVVIGIVNNTVYDPLQPELDSFKEELDKYFKNHTSPDVDLGDISGINASVVNIQKEIDRLNEVAKNLNESLIDLQELGKYEQYIKWPWYIWLGFIAGLIAIVMVTIMLCCMTSCCSCLKGCCSCGSCCKFDEDDSEPVLKGVKLHYT

SEQ ID NO: 770 - protein, 1273 aa, Artificial Sequence
  SARS-CoV-2/Germany/BavPat3/2020__EPI_ISL_414521 spike protein (1-1273)(P715C_P1069C)
MFVFLVLLPLVSSQCVNLTTRTQLPPAYTNSFTRGVYYPDKVFRSSVLHSTQDLFLPFFSNVTWFHAIHVSGTNGTKRFDNPVLPFNDGVYFASTEKSNIIRGWIFGTTLDSKTQSLLIVNNATNVVIKVCEFQFCNDPFLGVYYHKNNKSWMESEFRVYSSANNCTFEYVSQPFLMDLEGKQGNFKNLREFVFKNIDGYFKIYSKHTPINLVRDLPQGFSALEPLVDLPIGINITRFQTLLALHRSYLTPGDSSSGWTAGAAAYYVGYLQPRTFLLKYNENGTITDAVDCALDPLSETKCTLKSFTVEKGIYQTSNFRVQPTESIVRFPNITNLCPFGEVFNATRFASVYAWNRKRISNCVADYSVLYNSASFSTFKCYGVSPTKLNDLCFTNVYADSFVIRGDEVRQIAPGQTGKIADYNYKLPDDFTGCVIAWNSNNLDSKVGGNYNYLYRLFRKSNLKPFERDISTEIYQAGSTPCNGVEGFNCYFPLQSYGFQPTNGVGYQPYRVVVLSFELLHAPATVCGPKKSTNLVKNKCVNFNFNGLTGTGVLTESNKKFLPFQQFGRDIADTTDAVRDPQTLEILDITPCSFGGVSVITPGTNTSNQVAVLYQDVNCTEVPVAIHADQLTPTWRVYSTGSNVFQTRAGCLIGAEHVNNSYECDIPIGAGICASYQTQTNSPRRARSVASQSIIAYTMSLGAENSVAYSNNSIAICTNFTISVTTEILPVSMTKTSVDCTMYICGDSTECSNLLLQYGSFCTQLNRALTGIAVEQDKNTQQVFAQVKQIYKTPPIKDFGGFNFSQILPDPSKPSKRSFIEDLLFNKVTLADAGFIKQYGDCLGDIAARDLICAQKFNGLTVLPPLLTDEMIAQYTSALLAGTITSGWTFGAGAALQIPFAMQMAYRFNGIGVTQNVLYENQKLIANQFNSAIGKIQDSLSSTASALGKLQDVVNQNAQALNTLVKQLSSNFGAISSVLNDILSRLDKVEAEVQIDRLITGRLQSLQTYVTQQLIRAAEIRASANLAATKMSECVLGQSKRVDFCGKGYHLMSFPQSAPHGVVFLHVTYVCAQEKNFTTAPAICHDGKAHFPREGVFVSNGTHWFVTQRNFYEPQIITTDNTFVSGNCDVVIGIVNNTVYDPLQPELDSFKEELDKYFKNHTSPDVDLGDISGINASVVNIQKEIDRLNEVAKNLNESLIDLQELGKYEQYIKWPWYIWLGFIAGLIAIVMVTIMLCCMTSCCSCLKGCCSCGSCCKFDEDDSEPVLKGVKLHYT

SEQ ID NO: 771 - protein, 1273 aa, Artificial Sequence
  SARS-CoV-2/France/HF1805/2020__EPI_ISL_414628 spike protein (1-1273)(P715C_P1069C)
MFVFLVLLPLVSSQCVNLTTRTQLPPAYTNSFTRGVYYPDKVFRSSVLHSTQDLFLPFFSNVTWFHAIHVSGTNGTKRFDNPVLPFNDGVYFASTEKSNIIRGWIFGTTLDSKTQSLLIVNNATNVVIKVCEFQFCNDPFLGVYYHKNNKSWMESEFRVYSSANNCTFEYVSQPFLMDLEGKQGNFKNLREFVFKNIDGYFKIYSKHTPINLVRDLPQGFSALEPLVDLPIGINITRFQTLLALHRSYLTPGDSSSGWTAGAAAYYVGYLQPRTFLLKYNENGTITDAVDCALDPLSETKCTLKSFTVEKGIYQTSNFRVQPTESIVRFPNITNLCPFGEVFNATRFASVYAWNRKRISNCVADYSVLYNSASFSTFKCYGVSPTKLNDLCFTNVYADSFVIRGDEVRQIAPGQTGKIADYNYKLPDDFTGCVIAWNSNNLDSKVGGNYNYLYRLFRKSNLKPFERDISTEIYQAGSTPCNGVEGFNCYFPLQSYGFQPTNGVGYQPYRVVVLSFELLHAPATVCGPKKSTNLVKNKCVNFNFNGLTGTGVLTESNKKFLPFQQFGRDIADTTDAVRDPQTLEILDITPCSFGGVSVITPGTNTSNQVAVLYQGVNCTEVPVAIHADQLTPTWRVYSTGSNVFQTRAGCLIGAEHVNNSYECDIPIGAGICASYQTQTNSPRRARSVASQSIIAYTMSLGAENSVAYSNNSIAICTNFTISVTTEILPVSMTKTSVDCTMYICGDSTECSNLLLQYGSFCTQLNRALTGIAVEQDKNTQEVFAQVKQIYKTPPIKDFGGFNFSQILPDPSKPSKRSFIEDLLFNKVTLADAGFIKQYGDCLGDIAARDLICAQKFNGLTVLPPLLTDEMIAQYTSALLAGTITSGWTFGAGAALQIPFAMQMAYRFNGIGVTQNVLYENQKLIANQFNSAIGKIQDSLSSTASALGKLQDVVNQNAQALNTLVKQLSSNFGAISSVLNDILSRLDKVEAEVQIDRLITGRLQSLQTYVTQQLIRAAEIRASANLAATKMSECVLGQSKRVDFCGKGYHLMSFPQSAPHGVVFLHVTYVCAQEKNFTTAPAICHDGKAHFPREGVFVSNGTHWFVTQRNFYEPQIITTDNTFVSGNCDVVIGVVNNTVYDPLQPELDSFKEELDKYFKNHTSPDVDLGDISGINASVVNIQKEIDRLNEVAKNLNESLIDLQELGKYEQYIKWPWYIWLGFIAGLIAIVMVTIMLCCMTSCCSCLKGCCSCGSCCKFDEDDSEPVLKGVKLHYT

SEQ ID NO: 772 - protein, 1273 aa, Artificial Sequence
  SARS-CoV-2/Netherlands/ZuidHolland_9/2020__EPI_ISL_414445 spike protein (1-1273)(P715C_P1069C)
MFVFLVLLPLVSSQCVNLTTRTQLPPAYTNSFTRGVYYPDKVFRSSVLHSTQDLFLPFFSNVTWFHAIHVSGTNGTKRFDNPVLPFNDGVYFASTEKSNIIRGWIFGTTLDSKTQSLLIVNNATNVVIKVCEFQFCNDPFLGVYYHKNNKSWMESEFRVYSSANNCTFEYVSQPFLMDLEGKQGNFKNLREFVFKNIDGYFKIYSKHTPINLVRDLPQGFSALEPLVDLPIGINITRFQTLLALHRSYLTPGDSSSGWTAGAAAYYVGYLQPRTFLLKYNENGTITDAVDCALDPLSETKCTLKSFTVEKGIYQTSNFRVQPTESIVRFPNITNLCPFGEVFNATRFASVYAWNRKRISNCVADYSVLYNSASFSTFKCYGVSPTKLNDLCFTNVYADSFVIRGDEVRQIAPGQTGKIADYNYKLPDDFTGCVIAWNSNNLDSKVGGNYNYLYRLFRKSNLKPFERDISTEIYQAGSTPCNGVEGFNCYFPLQSYGFQPTNGVGYQPYRVVVLSFELLHAPATVCGPKKSTNLVKNKCVNFNFNGLTGTGVLTESNKKFLPFQQFGRDIADTTDAVRDPQTLEILDITPCSFGGVSVITPGTNTSNQVAVLYQGVNCTEVPVAIHADQLTPTWRVYSTGSNVFQTRAGCLIGAEHVNNSYECDIPIGAGICASYQTQTNSPRRARSVASQSIIAYTMSLGAENSVAYSNNSIAICTNFTISVTTEILPVSMTKTSVDCTMYICGDSTECSNLLLQYGSFCTQLNRALTGIAVEQDKNTQEVFAQVKQIYKTPPIKDFGGFNFSQILPDPSKPSKRSFIEDLLFNKVTLADAGFIKQYGDCLGDIAARDLICVQKFNGLTVLPPLLTDEMIAQYTSALLAGTITSGWTFGAGAALQIPFAMQMAYRFNGIGVTQNVLYENQKLIANQFNSAIGKIQDSLSSTASALGKLQDVVNQNAQALNTLVKQLSSNFGAISSVLNDILSRLDKVEAEVQIDRLITGRLQSLQTYVTQQLIRAAEIRASANLAATKMSECVLGQSKRVDFCGKGYHLMSFPQSAPHGVVFLHVTYVCAQEKNFTTAPAICHDGKAHFPREGVFVSNGTHWFVTQRNFYEPQIITTDNTFVSGNCDVVIGIVNNTVYDPLQPELDSFKEELDKYFKNHTSPDVDLGDISGINASVVNIQKEIDRLNEVAKNLNESLIDLQELGKYEQYIKWPWYIWLGFIAGLIAIVMVTIMLCCMTSCCSCLKGCCSCGSCCKFDEDDSEPVLKGVKLHYT

SEQ ID NO: 773 - protein, 1273 aa, Artificial Sequence
  SARS-CoV-2/Finland/FIN03032020A/2020__EPI_ISL_413602 spike protein (1-1273)(P715C_P1069C)
MFVFLVLLPLVSSQCVNLTTRTQLPPAYTNSFTRGVYYPDKVFRSSVLHSTQDLFLPFFSNVTWFHAIHVSGTNGTKRFDNPVLPFNDGVYFASTEKSNIIRGWIFGTTLDSKTQSLLIVNNATNVVIKVCEFQFCNDPFLGVYYHKNNKSWMESEFRVYSSANNCTFEYVSQPFLMDLEGKQGNFKNLREFVFKNIDGYFKIYSKHTPINLVRDLPQGFSALEPLVDLPIGINITRFQTLLALHRSYLTPGDSSSGWTAGAAAYYVGYLQPRTFLLKYNENGTITDAVDCALDPLSETKCTLKSFTVEKGIYQTSNFRVQPTESIVRFPNITNLCPFGEVFNATRFASVYAWNRKRISNCVADYSVLYNSASFSTFKCYGVSPTKLNDLCFTNVYADSFVIRGDEVRQIAPGQTGKIADYNYKLPDDFTGCVISWNSNNLDSKVGGNYNYLYRLFRKSNLKPFERDISTEIYQAGSTPCNGVEGFNCYFPLQSYGFQPTNGVGYQPYRVVVLSFELLHAPATVCGPKKSTNLVKNKCVNFNFNGLTGTGVLTESNKKFLPFQQFGRDIADTTDAVRDPQTLEILDITPCSFGGVSVITPGTNTSNQVAVLYQGVNCTEVPVAIHADQLTPTWRVYSTGSNVFQTRAGCLIGAEHVNNSYECDIPIGAGICASYQTQTNSPRRARSVASQSIIAYTMSLGAENSVAYSNNSIAICTNFTISVTTEILPVSMTKTSVDCTMYICGDSTECSNLLLQYGSFCTQLNRALTGIAVEQDKNTQEVFAQVKQIYKTPPIKDFGGFNFSQILPDPSKPSKRSFIEDLLFNKVTLADAGFIKQYGDCLGDIAARDLICAQKFNGLTVLPPLLTDEMIAQYTSALLAGTITSGWTFGAGAALQIPFAMQMAYRFNGIGVTQNVLYENQKLIANQFNSAIGKIQDSLSSTASALGKLQDVVNQNAQALNTLVKQLSSNFGAISSVLNDILSRLDKVEAEVQIDRLITGRLQSLQTYVTQQLIRAAEIRASANLAATKMSECVLGQSKRVDFCGKGYHLMSFPQSAPHGVVFLHVTYVCAQEKNFTTAPAICHDGKAHFPREGVFVSNGTHWFVTQRNFYEPQIITTDNTFVSGNCDVVIGIVNNTVYDPLQPELDSFKEELDKYFKNHTSPDVDLGDISGINASVVNIQKEIDRLNEVAKNLNESLIDLQELGKYEQYIKWPWYIWLGFIAGLIAIVMVTIMLCCMTSCCSCLKGCCSCGSCCKFDEDDSEPVLKGVKLHYT

SEQ ID NO: 774 - protein, 1273 aa, Artificial Sequence
  SARS-CoV-2/France/GE1977/2020__EPI_ISL_414632 spike protein (1-1273)(P715C_P1069C)
MFVFLVLLPLVSSQCVNLTTRTQLPPAYTNSFTRGVYYPDKVFRSSVLHSTQDLFLPFFSNVTWFHAIHVSGTNGTKRFDNPVLPFNDGVYFASTEKSNIIRGWIFGTTLDSKTQSLLIVNNATNVVIKVCEFQFCNDPFLGVYYHKNNKSWMESEFRVYSSANNCTFEYVSQPFLMDLEGKQGNFKNLREFVFKNIDGYFKIYSKHTPINLVRDLPQGFSALEPLVDLPIGINITRFQTLLALHRSYLTPGDSSSGWTAGAAAYYVGYLQPRTFLLKYNENGTITDAVDCALDPLSETKCTLKSFTVEKGIYQTSNFRVQPTESIVRFPNITNLCPFGEVFNATRFASVYAWNRKRISNCVADYSVLYNSASFSTFKCYGVSPTKLNDLCFTNVYADSFVIRGDEVRQIAPGQTGKIADYNYKLPDDFTGCVIAWNSNNLDSKVGGNYNYLYRLFRKSNLKPFERDISTEIYQAGSTPCNGVEGFNCYFPLQSYGFQPTNGVGYQPYRVVVLSFELLHAPATVCGPKKSTNLVKNKCVNFNFNGLTGTGVLTESNKKFLPFQQFGRDIADTTDAVRDPQTLEILDITPCSFGGVSVITPGTNTSNQVAVLYQGVNCTEVPVAIHADQLTPTWRVYSTGSNVFQTRAGCLIGAEHVNNSYECDIPIGAGICASYQTQTNSPRRARSVASQSIIAYTMSLGAENSVAYSNNSIAICTNFTISVTTEILPVSMTKTSVDCTMYICGDSTECSNLLLQYGSFCTQLNRALTGIAVEQDKNTQEVFAQVKQIYKTPPIKDFGGFNFSQILPDPSKPSKRSFIEDLLFNKVTLADAGFIKQYGDCLGDIAARDLICAQKFNGLTVLPPLLTDEMIAQYTSALLAGTITSGWTFGAGAALQIPFAMQMAYRFNGIGVTQNVLYENQKLIANQFNSAIGKIQDSLFSTASALGKLQDVVNQNAQALNTLVKQLSSNFGAISSVLNDILSRLDKVEAEVQIDRLITGRLQSLQTYVTQQLIRAAEIRASANLAATKMSECVLGQSKRVDFCGKGYHLMSFPQSAPHGVVFLHVTYVCAQEKNFTTAPAICHDGKAHFPREGVFVSNGTHWFVTQRNFYEPQIITTDNTFVSGNCDVVIGIVNNTVYDPLQPELDSFKEELDKYFKNHTSPDVDLGDISGINASVVNIQKEIDRLNEVAKNLNESLIDLQELGKYEQYIKWPWYIWLGFIAGLIAIVMVTIMLCCMTSCCSCLKGCCSCGSCCKFDEDDSEPVLKGVKLHYT

SEQ ID NO: 775 - protein, 1273 aa, Artificial Sequence
  SARS-CoV-2/Finland/FIN-313/2020__EPI_ISL_414641 spike protein (1-1273)(P715C_P1069C)
MFVFLVLLPLVSSQCVNLTTRTQLPPAYTNSFTRGVYYPDKVFRSSVLHSTQDLFLPFFSNVTWFHAIHVSGTNGTKRFDNPVLPFNDGVYFASTEKSNIIRGWIFGTTLDSKTQSLLIVNNATNVVIKVCEFQFCNDPFLGVYYHKNNKSWMESEFRVYSSANNCTFEYVSQPFLMDLEGKQGNFKNLREFVFKNIDGYFKIYSKHTPINLVRDLPQGFSALEPLVDLPIGINITRFKTLLALHRSYLTPGDSSSGWTAGAAAYYVGYLQPRTFLLKYNENGTITDAVDCALDPLSETKCTLKSFTVEKGIYQTSNFRVQPTESIVRFPNITNLCPFGEVFNATRFASVYAWNRKRISNCVADYSVLYNSASFSTFKCYGVSPTKLNDLCFTNVYADSFVIRGDEVRQIAPGQTGKIADYNYKLPDDFTGCVIAWNSNNLDSKVGGNYNYLYRLFRKSNLKPFERDISTEIYQAGSTPCNGVEGFNCYFPLQSYGFQPTNGVGYQPYRVVVLSFELLHAPATVCGPKKSTNLVKNKCVNFNFNGLTGTGVLTESNKKFLPFQQFGRDIADTTDAVRDPQTLEILDITPCSFGGVSVITPGTNTSNQVAVLYQGVNCTEVPVAIHADQLTPTWRVYSTGSNVFQTRAGCLIGAEHVNNSYECDIPIGAGICASYQTQTNSPRRARSVASQSIIAYTMSLGAENSVAYSNNSIAICTNFTISVTTEILPVSMTKTSVDCTMYICGDSTECSNLLLQYGSFCTQLNRALTGIAVEQDKNTQEVFAQVKQIYKTPPIKDFGGFNFSQILPDPSKPSKRSFIEDLLFNKVTLADAGFIKQYGDCLGDIAARDLICAQKFNGLTVLPPLLTDEMIAQYTSALLAGTITSGWTFGAGAALQIPFAMQMAYRFNGIGVTQNVLYENQKLIANQFNSAIGKIQDSLSSTASALGKLQDVVNQNAQALNTLVKQLSSNFGAISSVLNDILSRLDKVEAEVQIDRLITGRLQSLQTYVTQQLIRAAEIRASANLAATKMSECVLGQSKRVDFCGKGYHLMSFPQSAPHGVVFLHVTYVCAQEKNFTTAPAICHDGKAHFPREGVFVSNGTHWFVTQRNFYEPQIITTDNTFVSGNCDVVIGIVNNTVYDPLQPELDSFKEELDKYFKNHTSPDVDLGDISGINASVVNIQKEIDRLNEVAKNLNESLIDLQELGKYEQYIKWPWYIWLGFIAGLIAIVMVTIMLCCMTSCCSCLKGCCSCGSCCKFDEDDSEPVLKGVKLHYT

SEQ ID NO: 776 - protein, 1273 aa, Artificial Sequence
  SARS-CoV-2/Netherlands/ZuidHolland_2/2020__EPI_ISL_414556 spike protein (1-1273)(P715C_P1069C)
MFVFLVLLPLVSSQCVNLTTRTQLPPAYTNSFTRGVYYPDKVFRSSVLHSTQDLFLPFFSNVTWFHAIHVSGTNGTKRFDNPVLPFNDGVYFASTEKSNIIRGWIFGTTLDSKTQSLLIVNNATNVVIKVCEFQFCNDPFLGVYYHKNNKSWMESEFRVYSSANNCTFEYVSQPFLMDLEGKQGNFKNLREFVFKNIDGYFKIYSKHTPINLVRDLPQGFSALEPLVDLPIGINITRFQTLLALHRSYLTPGDSSSGWTAGAAAYYVGYLQPRTFLLKYNENGTITDAVDCALDPLSETKCTLKSFTVEKGIYQTSNFRVQPTESIVRFPNITNLCPFGEVFNATRFASVYAWNRKRISNCVADYSVLYNSASFSTFKCYGVSPTKLNDLCFTNVYADSFVIRGDEVRQIAPGQTGKIADYNYKLPDDFTGCVIAWNSNNLDSKVGGNYNYLYRLFRKSNLKPFERDISTEIYQAGSTPCNGVEGFNCYFPLQSYGFQPTNGVGYQPYRVVVLSFELLHAPATVCGPKKSTNLVKNKCVNFNFNGLTGTGVLTESNKKFLPFQQFGRDIADTTDAVRDPQTLEILDITPCSFGGVSVITPGTNTSNQVAVLYQGVNCTEVPVAIHADQLTPTWRVYSTGSNVFQTRAGCLIGAEHVNNSYECDIPIGAGICASYQTQTNSPRRARSVASQSIIAYTMSLGAENSVAYSNNSIAICTNFTISVTTEILPVSMTKTSVDCTMYICGDSTECSNLLLQYGSFCTQLNRALTGIALEQDKNTQEVFAQVKQIYKTPPIKDFGGFNFSQILPDPSKPSKRSFIEDLLFNKVTLADAGFIKQYGDCLGDIAARDLICAQKFNGLTVLPPLLTDEMIAQYTSALLAGTITSGWTFGAGAALQIPFAMQMAYRFNGIGVTQNVLYENQKLIANQFNSAIGKIQDSLSSTASALGKLQDVVNQNAQALNTLVKQLSSNFGAISSVLNDILSRLDKVEAEVQIDRLITGRLQSLQTYVTQQLIRAAEIRASANLAATKMSECVLGQSKRVDFCGKGYHLMSFPQSAPHGVVFLHVTYVCAQEKNFTTAPAICHDGKAHFPREGVFVSNGTHWFVTQRNFYEPQIITTDNTFVSGNCDVVIGIVNNTVYDPLQPELDSFKEELDKYFKNHTSPDVDLGDISGINASVVNIQKEIDRLNEVAKNLNESLIDLQELGKYEQYIKWPWYIWLGFIAGLIAIVMVTIMLCCMTSCCSCLKGCCSCGSCCKFDEDDSEPVLKGVKLHYT

SEQ ID NO: 777 - protein, 1273 aa, Artificial Sequence
  SARS-CoV-2/USA/WA-UW31/2020__EPI_ISL_414618 spike protein (1-1273)(P715C_P1069C)
MFVFLVLLPLVSSQCVNLTTRTQLPPAYTNSFTRGVYYPDKVFRSSVLHSTQDLFLPFFSNVTWFHAIHVSGTNGTKRFDNPVLPFNDGVYFASTEKSNIIRGWIFGTTLDSKTQSLLIVNNATNVVIKVCEFQFCNDPFLGVYYHKNNKSWMESEFRVYSSANNCTFEYVSQPFLMDLEGKQGNFKNLREFVFKNIDGYFKIYSKHTPINLVRDLPQGFSALEPLVDLPIGINITRFQTLLALHRSYLTPGDSSSGWTAGAAAYYVGYLQPRTFLLKYNENGTITDAVDCALDPLSETKCTLKSFTVEKGIYQTSNFRVQPTESIVRFPNITNLCPFGEVFNATRFASVYAWNRKRISNCVADYSVLYNSASFSTFKCYGVSPTKLNDLCFTNVYADSFVIRGDEVRQIAPGQTGKIADYNYKLPDDFTGCVIAWNSNNLDSKVGGNYNYLYRLFRKSNLKPFERDISTEIYQAGSTPCNGAEGFNCYFPLQSYGFQPTNGVGYQPYRVVVLSFELLHAPATVCGPKKSTNLVKNKCVNFNFNGLTGTGVLTESNKKFLPFQQFGRDIADTTDAVRDPQTLEILDITPCSFGGVSVITPGTNTSNQVAVLYQDVNCTEVPVAIHADQLTPTWRVYSTGSNVFQTRAGCLIGAEHVNNSYECDIPIGAGICASYQTQTNSPRRARSVASQSIIAYTMSLGAENSVAYSNNSIAICTNFTISVTTEILPVSMTKTSVDCTMYICGDSTECSNLLLQYGSFCTQLNRALTGIAVEQDKNTQEVFAQVKQIYKTPPIKDFGGFNFSQILPDPSKPSKRSFIEDLLFNKVTLADAGFIKQYGDCLGDIAARDLICAQKFNGLTVLPPLLTDEMIAQYTSALLAGTITSGWTFGAGAALQIPFAMQMAYRFNGIGVTQNVLYENQKLIANQFNSAIGKIQDSLSSTASALGKLQDVVNQNAQALNTLVKQLSSNFGAISSVLNDILSRLDKVEAEVQIDRLITGRLQSLQTYVTQQLIRAAEIRASANLAATKMSECVLGQSKRVDFCGKGYHLMSFPQSAPHGVVFLHVTYVCAQEKNFTTAPAICHDGKAHFPREGVFVSNGTHWFVTQRNFYEPQIITTDNTFVSGNCDVVIGIVNNTVYDPLQPELDSFKEELDKYFKNHTSPDVDLGDISGINASVVNIQKEIDRLNEVAKNLNESLIDLQELGKYEQYIKWPWYIWLGFIAGLIAIVMVTIMLCCMTSCCSCLKGCCSCGSCCKFDEDDSEPVLKGVKLHYT

SEQ ID NO: 778 - protein, 1273 aa, Artificial Sequence
  SARS-CoV-2/South Korea/SNU01/2020__EPI_ISL_411929 spike protein (1-1273)(P715C_P1069C)
MFVFLVLLPLVSSQCVNLTTRTQLPPAYTNSFTRGVYYPDKVFRSSVLHSTQDLFLPFFSNVTWFHAIHVSGTNGTKRFDNPVLPFNDGVYFASTEKSNIIRGWIFGTTLDSKTQSLLIVNNATNVVIKVCEFQFCNDPFLGVYYHKNNKSWMESEFRVYSSANNCTFEYVSQPFLMDLEGKQGNFKNLREFVFKNIDGYFKIYSKHTPINLVRDLPQGFWALEPLVDLPIGINITRFQTLLALHRSYLTPGDSSSGWTAGAAAYYVGYLQPRTFLLKYNENGTITDAVDCALDPLSETKCTLKSFTVEKGIYQTSNFRVQPTESIVRFPNITNLCPFGEVFNATRFASVYAWNRKRISNCVADYSVLYNSASFSTFKCYGVSPTKLNDLCFTNVYADSFVIRGDEVRQIAPGQTGKIADYNYKLPDDFTGCVIAWNSNNLDSKVGGNYNYLYRLFRKSNLKPFERDISTEIYQAGSTPCNGVEGFNCYFPLQSYGFQPTNGVGYQPYRVVVLSFELLHAPATVCGPKKSTNLVKNKCVNFNFNGLTGTGVLTESNKKFLPFQQFGRDIADTTDAVRDPQTLEILDITPCSFGGVSVITPGTNTSNQVAVLYQDVNCTEVPVAIHADQLTPTWRVYSTGSNVFQTRAGCLIGAEHVNNSYECDIPIGAGICASYQTQTNSPRRARSVASQSIIAYTMSLGAENSVAYSNNSIAICTNFTISVTTEILPVSMTKTSVDCTMYICGDSTECSNLLLQYGSFCTQLNRALTGIAVEQDKNTQEVFAQVKQIYKTPPIKDFGGFNFSQILPDPSKPSKRSFIEDLLFNKVTLADAGFIKQYGDCLGDIAARDLICAQKFNGLTVLPPLLTDEMIAQYTSALLAGTITSGWTFGAGAALQIPFAMQMAYRFNGIGVTQNVLYENQKLIANQFNSAIGKIQDSLSSTASALGKLQDVVNQNAQALNTLVKQLSSNFGAISSVLNDILSRLDKVEAEVQIDRLITGRLQSLQTYVTQQLIRAAEIRASANLAATKMSECVLGQSKRVDFCGKGYHLMSFPQSAPHGVVFLHVTYVCAQEKNFTTAPAICHDGKAHFPREGVFVSNGTHWFVTQRNFYEPQIITTDNTFVSGNCDVVIGIVNNTVYDPLQPELDSFKEELDKYFKNHTSPDVDLGDISGINASVVNIQKEIDRLNEVAKNLNESLIDLQELGKYEQYIKWPWYIWLGFIAGLIAIVMVTIMLCCMTSCCSCLKGCCSCGSCCKFDEDDSEPVLKGVKLHYT

SEQ ID NO: 779 - protein, 1273 aa, Artificial Sequence
  SARS-CoV-2/China/WF0004/2020__EPI_ISL_413694 spike protein (1-1273)(P715C_P1069C)
MFVFLVLLPLVSSQCVNLTTRTQLPPAYTNSFTRGVYYPDKVFRSSVLHSTQDLFLPFFSNVTWFHAIHVSGTNGTKRFDNPVLPFNDGVYFASTEKSNIIRGWIFGTTLDSKTQSLLIVNNATNVVIKVCEFQFCNDPFLGVYYHKNNKSWTESEFRVYSSANNCTFEYVSQPFLMDLEGKQGNFKNLREFVFKNIDGYFKIYSKHTPINLVRDLPQGFSALEPLVDLPIGINITRFQTLLALHRSYLTPGDSSSGWTAGAAAYYVGYLQPRTFLLKYNENGTITDAVDCALDPLSETKCTLKSFTVEKGIYQTSNFRVQPTESIVRFPNITNLCPFGEVFNATRFASVYAWNRKRISNCVADYSVLYNSASFSTFKCYGVSPTKLNDLCFTNVYADSFVIRGDEVRQIAPGQTGKIADYNYKLPDDFTGCVIAWNSNNLDSKVGGNYNYLYRLFRKSNLKPFERDISTEIYQAGSTPCNGVEGFNCYFPLQSYGFQPTNGVGYQPYRVVVLSFELLHAPATVCGPKKSTNLVKNKCVNFNFNGLTGTGVLTESNKKFLPFQQFGRDIADTTDAVRDPQTLEILDITPCSFGGVSVITPGTNTSNQVAVLYQDVNCTEVPVAIHADQLTPTWRVYSTGSNVFQTRAGCLIGAEHVNNSYECDIPIGAGICASYQTQTNSPRRARSVASQSIIAYTMSLGAENSVAYSNNSIAICTNFTISVTTEILPVSMTKTSVDCTMYICGDSTECSNLLLQYGSFCTQLNRALTGIAVEQDKNTQEVFAQVKQIYKTPPIKDFGGFNFSQILPDPSKPSKRSFIEDLLFNKVTLADAGFIKQYGDCLGDIAARDLICAQKFNGLTVLPPLLTDEMIAQYTSALLAGTITSGWTFGAGAALQIPFAMQMAYRFNGIGVTQNVLYENQKLIANQFNSAIGKIQDSLSSTASALGKLQDVVNQNAQALNTLVKQLSSNFGAISSVLNDILSRLDKVEAEVQIDRLITGRLQSLQTYVTQQLIRAAEIRASANLAATKMSECVLGQSKRFDFCGKGYHLMSFPQSAPHGVVFLHVTYVCAQEKNFTTAPAICHDGKAHFPREGVFVSNGTHWFVTQRNFYEPQIITTDNTFVSGNCDVVIGIVNNTVYDPLQPELDSFKEELDKYFKNHTSPDVDLGDISGINASVVNIQKEIDRLNEVAKNLNESLIDLQELGKYEQYIKWPWYIWLGFIAGLIAIVMVTIMLCCMTSCCSCLKGCCSCGSCCKFDEDDSEPVLKGVKLHYT

SEQ ID NO: 780 - protein, 1273 aa, Artificial Sequence
  SARS-CoV-2/China/WF0028/2020__EPI_ISL_413791 spike protein (1-1273)(P715C_P1069C)
MFVFLVLLPLVSSQCVNLTTRTQLPPAYTNSFTRGVYYPDKVFRSSVLHSTQDLFLPFFSNVTWFHAIHVSGTNGTKRFDNPVLPFNDGVYFASTEKSNIIRGWIFGTTLDSKTQSLLIVNNATNVVIKVCEFQFCNDPFLGVYYHKNNKSWMESEFRVYSSANNCTFEYVSQPFLMDLEGKQGNFKNLREFVFKNIDGYFKIYSKHTPINLVRDLPQGFSALEPLVDLPIGINITRFQTLLALHRSYLTPGDSSSGWTAGAAAYYVGYLQPRTFLLKYNENGTITDAVDCALDPLSETKCTLKSFTVEKGIYQTSNFRVQPTESIVRFPNITNLCPFGEVFNATRFASVYAWNRKRISNCVADYSVLYNSASFSTFKCYGVSPTKLNDLCFTNVYADSFVIRGDEVRQIAPGQTGKIADYNYKLPDDFTGCVIAWNSNNLDSKVGGNYNYLYRLFRKSNLKPFERDISTEIYQAGSTPCNGVEGFNCYFPLQSYGFQPTNGVGYQPYRVVVLSFELLHAPATVCGPKKSTNLVKNKCVNFNFNGLTGTGVLTESNKKFLPFQQFGRDIADTTDAVRDPQTLEILDITPCSFGGVSVITPGTNTSNQVAVLYQDVNCTEVPVAIHADQLTPTWRVYSTGSNVFQTRAGCLIGAEHVNNSYECDIPIGAGICASYQTQTNSPRRARSVASQSIIAYTMSLGAENSVAYSNNSIAICTNFTISVTTEILPVSMTKTSVDCTMYICGDSTECSNLLLQYGSFCTQLNRALTGIAVEQDKNTQEVFAQVKQIYKTPPIKDFGGFNFSQILPDPSKPSKRSFIEDLLFNKVTLADAGFIKQYGDCLGDIAARDLICAQKFNGLTVLPPLLTDEMIAQYTSALLAGTITSGWTFGAGAALQIPFAMQMAYRFNGIGVTQNVLYENQKLIANQFNSAIGKIQDSLSSTASALGKLQDVVNQNAQALNTLVKQLSSNFGAISSVLNDILSRLDKVEAEVQIDRLITGRLQSLQTYVTQQLIRAAEIRASANLAATKMSECVLGQSKRVDFCGKGYHLMSFPQSAPHGVVFLHVTYVCAQEKNFTTAPAICHDGKAHFPREGVFVSNGTHWFVTQRNFYEPQIITTDNTFVSGNCDVVIGIVNNTVYDPLQPELESFKEELDKYFKNHTSPDVDLGDISGINASVVNIQKEIDRLNEVAKNLNESLIDLQELGKYEQYIKWPWYIWLGFIAGLIAIVMVTIMLCCMTSCCSCLKGCCSCGSCCKFDEDDSEPVLKGVKLHYT

SEQ ID NO: 781 - protein, 1273 aa, Artificial Sequence
  SARS-CoV-2/2019-nCoV/USA-CruiseA-18/2020__MT159716.1 spike protein (1-1273)(P715C_P1069C)
MFVFLVLLPLVSSQCVNLTTRTQLPPAYTNSFTRGVYYPDKVFRSSVLHSTQDLFLPFFSNVTWFHAIHVSGTNGTKRFDNPVLPFNDGVYFASTEKSNIIRGWIFGTTLDSKTQSLLIVNNATNVVIKVCEFQFCNDPFLGVYYHKNNKSWMESELRVYSSANNCTFEYVSQPFLMDLEGKQGNFKNLREFVFKNIDGYFKIYSKHTPINLVRDLPQGFSALEPLVDLPIGINITRFQTLLALHRSYLTPGDSSSGWTAGAAAYYVGYLQPRTFLLKYNENGTITDAVDCALDPLSETKCTLKSFTVEKGIYQTSNFRVQPTESIVRFPNITNLCPFGEVFNATRFASVYAWNRKRISNCVADYSVLYNSASFSTFKCYGVSPTKLNDLCFTNVYADSFVIRGDEVRQIAPGQTGKIADYNYKLPDDFTGCVIAWNSNNLDSKVGGNYNYLYRLFRKSNLKPFERDISTEIYQAGSTPCNGVEGFNCYFPLQSYGFQPTNGVGYQPYRVVVLSFELLHAPATVCGPKKSTNLVKNKCVNFNFNGLTGTGVLTESNKKFLPFQQFGRDIADTTDAVRDPQTLEILDITPCSFGGVSVITPGTNTSNQVAVLYQDVNCTEVPVAIHADQLTPTWRVYSTGSNVFQTRAGCLIGAEHVNNSYECDIPIGAGICASYQTQTNSPRRARSVASQSIIAYTMSLGAENSVAYSNNSIAICTNFTISVTTEILPVSMTKTSVDCTMYICGDSTECSNLLLQYGSFCTQLNRALTGIAVEQDKNTQEVFAQVKQIYKTPPIKDFGGFNFSQILPDPSKPSKRSFIEDLLFNKVTLADAGFIKQYGDCLGDIAARDLICAQKFNGLTVLPPLLTDEMIAQYTSALLAGTITSGWTFGAGAALQIPFAMQMAYRFNGIGVTQNVLYENQKLIANQFNSAIGKIQDSLSSTASALGKLQDVVNQNAQALNTLVKQLSSNFGAISSVLNDILSRLDKVEAEVQIDRLITGRLQSLQTYVTQQLIRAAEIRASANLAATKMSECVLGQSKRVDFCGKGYHLMSFPQSAPHGVVFLHVTYVCAQEKNFTTAPAICHDGKAHFPREGVFVSNGTHWFVTQRNFYEPQIITTDNTFVSGNCDVVIGIVNNTVYDPLQPELDSFKEELDKYFKNHTSPDVDLGDISGINASVVNIQKEIDRLNEVAKNLNESLIDLQELGKYEQYIKWPWYIWLGFIAGLIAIVMVTIMLCCMTSCCSCLKGCCSCGSCCKFDEDDSEPVLKGVKLHYT

SEQ ID NO: 782 - protein, 1273 aa, Artificial Sequence
  SARS-CoV-2/SARS-CoV-2/Yunnan-01/human/2020/CHN__MT049951.1 spike protein (1-1273)(P715C_P1069C)
MFVFLVLLPLVSSQCVNLTTRTQLPPANTNSFTRGVYYPDKVFRSSVLHSTQDLFLPFFSNVTWFHAIHVSGTNGTKRFDNPVLPFNDGVYFASTEKSNIIRGWIFGTTLDSKTQSLLIVNNATNVVIKVCEFQFCNDPFLGVYYHKNNKSWMESEFRVYSSANNCTFEYVSQPFLMDLEGKQGNFKNLREFVFKNIDGYFKIYSKHTPINLVRDLPQGFSALEPLVDLPIGINITRFQTLLALHRSYLTPGDSSSGWTAGAAAYYVGYLQPRTFLLKYNENGTITDAVDCALDPLSETKCTLKSFTVEKGIYQTSNFRVQPTESIVRFPNITNLCPFGEVFNATRFASVYAWNRKRISNCVADYSVLYNSASFSTFKCYGVSPTKLNDLCFTNVYADSFVIRGDEVRQIAPGQTGKIADYNYKLPDDFTGCVIAWNSNNLDSKVGGNYNYLYRLFRKSNLKPFERDISTEIYQAGSTPCNGVEGFNCYFPLQSYGFQPTNGVGYQPYRVVVLSFELLHAPATVCGPKKSTNLVKNKCVNFNFNGLTGTGVLTESNKKFLPFQQFGRDIADTTDAVRDPQTLEILDITPCSFGGVSVITPGTNTSNQVAVLYQDVNCTEVPVAIHADQLTPTWRVYSTGSNVFQTRAGCLIGAEHVNNSYECDIPIGAGICASYQTQTNSPRRARSVASQSIIAYTMSLGAENSVAYSNNSIAICTNFTISVTTEILPVSMTKTSVDCTMYICGDSTECSNLLLQYGSFCTQLNRALTGIAVEQDKNTQEVFAQVKQIYKTPPIKDFGGFNFSQILPDPSKPSKRSFIEDLLFNKVTLADAGFIKQYGDCLGDIAARDLICAQKFNGLTVLPPLLTDEMIAQYTSALLAGTITSGWTFGAGAALQIPFAMQMAYRFNGIGVTQNVLYENQKLIANQFNSAIGKIQDSLSSTASALGKLQDVVNQNAQALNTLVKQLSSNFGAISSVLNDILSRLDKVEAEVQIDRLITGRLQSLQTYVTQQLIRAAEIRASANLAATKMSECVLGQSKRVDFCGKGYHLMSFPQSAPHGVVFLHVTYVCAQEKNFTTAPAICHDGKAHFPREGVFVSNGTHWFVTQRNFYEPQIITTDNTFVSGNCDVVIGIVNNTVYDPLQPELDSFKEELDKYFKNHTSPDVDLGDISGINASVVNIQKEIDRLNEVAKNLNESLIDLQELGKYEQYIKWPWYIWLGFIAGLIAIVMVTIMLCCMTSCCSCLKGCCSCGSCCKFDEDDSEPVLKGVKLHYT

SEQ ID NO: 783 - protein, 1273 aa, Artificial Sequence
  SARS-CoV-2/USA/WA-UW292/2020__EPI_ISL_418077 spike protein (1-1273)(P715C_P1069C)
MFVFLVLLPLVSSQCVNLTTRTQLPPAYTNSFTRGVYYPDKVFRSSVLHSTQDLFLPFFSNVTWFHAIHVSGTNGTKRFDNPVLPFNDGVYFASTEKSNIIRGWIFGTTLDSKTQSLLIVNNATNVVIKVCEFQFCNDPFLGVYYHKNNKSWMESEFRVYSSANNCTFEYVSQPFLMDLEGKQGNFKNLREFVFKNIDGYFKIYSKHTPINLVRDLPQGFSALEPLVDLPIGINITRFQTLLALHRSYLTPGDSSSGWTAGAAAYYVGYLQPRTFLLKYNENGTITDAVDCALDPLSETKCTLKSFTVEKGIYQTSNFRVQPTESIVRFPNITNLCPFGEVFNATRFASVYAWNRKRISNCVADYSVLYNSASFSTFKCYGVSPTKLNDLCFTNVYADSFVIRGDEVRQIAPGQTGKIADYNYKLPDDFTGCVIAWNSNNLDSKVGGNYNYLYRLFRKSNLKPFERDISTEIYQASSTPCNGVEGFNCYFPLQSYGFQPTNGVGYQPYRVVVLSFELLHAPATVCGPKKSTNLVKNKCVNFNFNGLTGTGVLTESNKKFLPFQQFGRDIADTTDAVRDPQTLEILDITPCSFGGVSVITPGTNTSNQVAVLYQDVNCTEVPVAIHADQLTPTWRVYSTGSNVFQTRAGCLIGAEHVNNSYECDIPIGAGICASYQTQTNSPRRARSVASQSIIAYTMSLGAENSVAYSNNSIAICTNFTISVTTEILPVSMTKTSVDCTMYICGDSTECSNLLLQYGSFCTQLNRALTGIAVEQDKNTQEVFAQVKQIYKTPPIKDFGGFNFSQILPDPSKPSKRSFIEDLLFNKVTLADAGFIKQYGDCLGDIAARDLICAQKFNGLTVLPPLLTDEMIAQYTSALLAGTITSGWTFGAGAALQIPFAMQMAYRFNGIGVTQNVLYENQKLIANQFNSAIGKIQDSLSSTASALGKLQDVVNQNAQALNTLVKQLSSNFGAISSVLNDILSRLDKVEAEVQIDRLITGRLQSLQTYVTQQLIRAAEIRASANLAATKMSECVLGQSKRVDFCGKGYHLMSFPQSAPHGVVFLHVTYVCAQEKNFTTAPAICHDGKAHFPREGVFVSNGTHWFVTQRNFYEPQIITTDNTFVSGNCDVVIGIVNNTVYDPLQPELDSFKEELDKYFKNHTSPDVDLGDISGINASVVNIQKEIDRLNEVAKNLNESLIDLQELGKYEQYIKWPWYIWLGFIAGLIAIVMVTIMLCCMTSCCSCLKGCCSCGSCCKFDEDDSEPVLKGVKLHYT

SEQ ID NO: 784 - protein, 1273 aa, Artificial Sequence
  SARS-CoV-2/Iceland/192/2020__EPI_ISL_417819 spike protein (1-1273)(P715C_P1069C)
MFVFFVLLPLVSSQCVNLTTRTQLPPAYTNSFTRGVYYPDKVFRSSVLHSTQDLFLPFFSNVTWFHAIHVSGTNGTKRFDNPVLPFNDGVYFASTEKSNIIRGWIFGTTLDSKTQSLLIVNNATNVVIKVCEFQFCNDPFLGVYYHKNNKSWMESEFRVYSSANNCTFEYVSQPFLMDLEGKQGNFKNLREFVFKNIDGYFKIYSKHTPINLVRDLPQGFSALEPLVDLPIGINITRFQTLLALHRSYLTPGDSSSGWTAGAAAYYVGYLQPRTFLLKYNENGTITDAVDCALDPLSETKCTLKSFTVEKGIYQTSNFRVQPTESIVRFPNITNLCPFGEVFNATRFASVYAWNRKRISNCVADYSVLYNSASFSTFKCYGVSPTKLNDLCFTNVYADSFVIRGDEVRQIAPGQTGKIADYNYKLPDDFTGCVIAWNSNNLDSKVGGNYNYLYRLFRKSNLKPFERDISTEIYQAGSTPCNGVEGFNCYFPLQSYGFQPTNGVGYQPYRVVVLSFELLHAPATVCGPKKSTNLVKNKCVNFNFNGLTGTGVLTESNKKFLPFQQFGRDIADTTDAVRDPQTLEILDITPCSFGGVSVITPGTNTSNQVAVLYQGVNCTEVPVAIHADQLTPTWRVYSTGSNVFQTRAGCLIGAEHVNNSYECDIPIGAGICASYQTQTNSPRRARSVASQSIIAYTMSLGAENSVAYSNNSIAICTNFTISVTTEILPVSMTKTSVDCTMYICGDSTECSNLLLQYGSFCTQLNRALTGIAVEQDKNTQEVFAQVKQIYKTPPIKDFGGFNFSQILPDPSKPSKRSFIEDLLFNKVTLADAGFIKQYGDCLGDIAARDLICAQKFNGLTVLPPLLTDEMIAQYTSALLAGTITSGWTFGAGAALQIPFAMQMAYRFNGIGVTQNVLYENQKLIANQFNSAIGKIQDSLSSTASALGKLQDVVNQNAQALNTLVKQLSSNFGAISSVLNDILSRLDKVEAEVQIDRLITGRLQSLQTYVTQQLIRAAEIRASANLAATKMSECVLGQSKRVDFCGKGYHLMSFPQSAPHGVVFLHVTYVCAQEKNFTTAPAICHDGKAHFPREGVFVSNGTHWFVTQRNFYEPQIITTDNTFVSGNCDVVIGIVNNTVYDPLQPELDSFKEELDKYFKNHTSPDVDLGDISGINASVVNIQKEIDRLNEVAKNLNESLIDLQELGKYEQYIKWPWYIWLGFIAGLIAIVMVTIMLCCMTSCCSCLKGCCSCGSCCKFDEDDSEPVLKGVKLHYT

SEQ ID NO: 785 - protein, 1273 aa, Artificial Sequence
  SARS-CoV-2/Belgium/ULG-6939/2020__EPI_ISL_417020 spike protein (1-1273)(P715C_P1069C)
MFVFLVLLPLVSSQCVNLTTRTQLPPAYTNSFTRGVYYPDKVFRSSVLHSTQDLFLPFFSNVTWFHAIHVSGTNGTKRFDNPVLPFNDGVYFASTEKSNIIRGWIFGTTLDSKTQSLLIVNNATNVVIKVCEFQFCNDPFLGVYYHKNNKSWMESEFRVYSSANNCTFEYVSQPFLMDLEGKQGNFKNLREFVFKNIDGYFKIYSKHTPINLVRDLPQGFSALEPLVDLPIGINITRFQTLLALHRSYLTPGDSSSGWTAGAAAYYVGYLQPRTFLLKYNENGTITDAVDCALDPLSETKCTLKSFTVEKGIYQTSNFRVQPTESIVRFPNITNLCPFGEVFNATRFASVYAWNRKRISNCVADYSVLYNSASFSTFKCYGVSPTKLNDLCFTNVYADSFVIRGDEVRQIAPGQTGKIADYNYKLPDDFTGCVIAWNSNNLDSKVGGNYNYLYRLFRKSNLKPFERDISTEIYQAGSTPCNGVEGFNCYFPLQSYGFQPTNGVGYQPYRVVVLSFELLHAPATVCGPKKSTNLVKNKCVNFNFNGLTGTGVLTESNKKFLPFQQFGRDIADTTDAVRDPQTLEILDITPCSFGGVSVITPGTNTSNQVAVLYQGVNCTEVPVAIHADQLTPTWRVYSTGSNVFQTRAGCLIGAEHVNNSYECDIPIGAGICASYQTQTNSPRRARSVASQSIIAYTMSLGAENSVVYSNNSIAICTNFTISVTTEILPVSMTKTSVDCTMYICGDSTECSNLLLQYGSFCTQLNRALTGIAVEQDKNTQEVFAQVKQIYKTPPIKDFGGFNFSQILPDPSKPSKRSFIEDLLFNKVTLADAGFIKQYGDCLGDIAARDLICAQKFNGLTVLPPLLTDEMIAQYTSALLAGTITSGWTFGAGAALQIPFAMQMAYRFNGIGVTQNVLYENQKLIANQFNSAIGKIQDSLSSTASALGKLQDVVNQNAQALNTLVKQLSSNFGAISSVLNDILSRLDKVEAEVQIDRLITGRLQSLQTYVTQQLIRAAEIRASANLAATKMSECVLGQSKRVDFCGKGYHLMSFPQSAPHGVVFLHVTYVCAQEKNFTTAPAICHDGKAHFPREGVFVSNGTHWFVTQRNFYEPQIITTDNTFVSGNCDVVIGIVNNTVYDPLQPELDSFKEELDKYFKNHTSPDVDLGDISGINASVVNIQKEIDRLNEVAKNLNESLIDLQELGKYEQYIKWPWYIWLGFIAGLIAIVMVTIMLCCMTSCCSCLKGCCSCGSCCKFDEDDSEPVLKGVKLHYT

SEQ ID NO: 786 - protein, 1273 aa, Artificial Sequence
  SARS-CoV-2/France/HF2496/2020__EPI_ISL_418231 spike protein (1-1273)(P715C_P1069C)
MFVFLVLLPLVSSQCVNLTTRTQLPPAYTNSFTRGVYYPDKVFRSSVLHSTQDLFLPFFSNVTWFHAIHVSGTNGTKRFDNPVLPFNDGVYFASTEKSNIIRGWIFGTTLDSKTQSLLIVNNATNVVIKVCEFQFCNDPFLGVYYHKNNKSWMESEFRVYSSANNCTFEYVSQPFLMDLEGKQGNFKNLREFVFKNIDGYFKIYSKHTPINLVRDLPQGFSALEPLVDLPIGINITRFQTLLALHRSYLTPGDSSSGWTAGAAAYYVGYLQPRTFLLKYNENGTITDAVDCALDPLSETKCTLKSFTVEKGIYQTSNFRVQPTESIVRFPNITNLCPFGEVFNATRFASVYAWNRKRISNCVADYSVLYNSASFSTFKCYGVSPTKLNDLCFTNVYADSFVIRGDEVRQIAPGQTGKIADYNYKLPDDFTGCVIAWNSNNLDSKVGGNYNYLYRLFRKSNLKPFERDISTEIYQAGSTPCNGVEGFNCYFPLQSYGFQPTNGVGYQPYRVVVLSFELLHAPATVCGPKKSTNLVKNKCVNFNFNGLTGTGVLTESNKKFLPFQQFGRDIADTTDAVRDPQTLEILDITPCSFGGVSVITPGTNTSNQVAVLYQGVNCTEVPVAIHADQLTPTWRVYSTGSNVFQTRAGCLIGAEHVNNSYECDIPIGAGICASYQTQTNSPRRARSVASQSIIAYTMSLGAENSVAYSNNSIAICTNFTISVTTEILPVSMTKTSVDCTMYICGDSTECSNLLLQYGSFCTQLNRALTGIAVEQDKNTQEVFAQVKQIYKTPPIKDFGGFNFSQILPDPSKPSKRSFIEDLLFNKVTLADAGFIKQYGDCLGDIVARDLICAQKFNGLTVLPPLLTDEMIAQYTSALLAGTITSGWTFGAGAALQIPFAMQMAYRFNGIGVTQNVLYENQKLIANQFNSAIGKIQDSLSSTASALGKLQDVVNQNAQALNTLVKQLSSNFGAISSVLNDILSRLDKVEAEVQIDRLITGRLQSLQTYVTQQLIRAAEIRASANLAATKMSECVLGQSKRVDFCGKGYHLMSFPQSAPHGVVFLHVTYVCAQEKNFTTAPAICHDGKAHFPREGVFVSNGTHWFVTQRNFYEPQIITTDNTFVSGNCDVVIGIVNNTVYDPLQPELDSFKEELDKYFKNHTSPDVDLGDISGINASVVNIQKEIDRLNEVAKNLNESLIDLQELGKYEQYIKWPWYIWLGFIAGLIAIVMVTIMLCCMTSCCSCLKGCCSCGSCCKFDEDDSEPVLKGVKLHYT

SEQ ID NO: 787 - protein, 1273 aa, Artificial Sequence
  SARS-CoV-2/USA/WA-UW291/2020__EPI_ISL_418076 spike protein (1-1273)(P715C_P1069C)
MFVFLVLLPLVSSQCVNLTTRTQLPPAYTNSFTRGVYYPDKVFRSSVLHSTQDLFLPFFSNVTWFHAIHVSGTNGTKRFDNPVLPFNDGVYFASTEKSNIIRGWIFGTTLDSKTQSLLIVNNATNVVIKVCEFQFCNDPFLGVYYHKNNKSWMESEFRVYSSANNCTFEYVSQPFLMDLEGKQGNFKNLREFVFKNIDGYFKIYSKHTPINLVRDLPQGFSALEPLVDLPIGINITRFQTLLALHRSYLTPGDSSSGWTAGAAAYYVGYLQPRTFLLKYNENGTITDAVDCALDPLSETKCTLKSFTVEKGIYQTSNFRVQPTESIVRFPNITNLCPFGEVFNATRFASVYAWNRKRISNCVADYSVLYNSASFSTFKCYGVSPTKLNDLCFTNVYADSFVIRGDEVRQIAPGQTGKIADYNYKLPDDFTGCVIAWNSNNLDSKVGGNYNYLYRLFRKSNLKPFERDISTEIYQAGSTPCNGVEGFNCYFPLQSYGFQPTNGVGYQPYRVVVLSFELLHAPATVCGPKKSTNLVKNKCVNFNFNGLTGTGVLTESNKKFLPFQQFGRDIADTTDAVRDPQTLEILDITPCSFGGVSVITPGTNTSNQVAVLYQGVNCTEVPVAIHADQLTPTWRVYSTGSNVFQTRAGCLIGAEHVNNSYECDIPIGAGICASYQTQTNSPRRARSVASQSIIAYTMSLGAENSVAYSNNSIAICTNFTISVTTEILPVSMTKTSVDCTMYICGDSTECSNLLLQYGSFCTQLNRALTGIAVEQDKNTQEVFAQVKQIYKTPPIKDFGGFNFSQILPDPSKPSKRSFIEDLLFNKVTLADAGFIKQYGDCLGDIAARDLICAQKFNGLTVLPPLLTDEMIAQYTSALLAGTITSGWTFGAGAALQIPFAMQMAYRFNGIGVTQNVLYENQKLIANQFNSAIGKIQYSLSSTASALGKLQDVVNQNAQALNTLVKQLSSNFGAISSVLNDILSRLDKVEAEVQIDRLITGRLQSLQTYVTQQLIRAAEIRASANLAATKMSECVLGQSKRVDFCGKGYHLMSFPQSAPHGVVFLHVTYVCAQEKNFTTAPAICHDGKAHFPREGVFVSNGTHWFVTQRNFYEPQIITTDNTFVSGNCDVVIGIVNNTVYDPLQPELDSFKEELDKYFKNHTSPDVDLGDISGINASVVNIQKEIDRLNEVAKNLNESLIDLQELGKYEQYIKWPWYIWLGFIAGLIAIVMVTIMLCCMTSCCSCLKGCCSCGSCCKFDEDDSEPVLKGVKLHYT

SEQ ID NO: 788 - protein, 1273 aa, Artificial Sequence
  SARS-CoV-2/Portugal/PT0034/2020__EPI_ISL_418019 spike protein (1-1273)(P715C_P1069C)
MFVFLVLLPLVSSQCVNLTTRTQLPPAYTNSFTRGVYYPDKVFRSSVLHSTQDLFLPFFSNVTWFHAIHVSGTNGTKRFDNPVLPFNDGVYFASTEKSNIIRGWIFGTTLDSKTQSLLIVNNATNVVIKVCEFQFCNDPFLGVYYHKNNKSWMESEFRVYSSANNCTFEYVSQPFLMDLEGKQGNFKNLREFVFKNIDGYFKIYSKHTPINLVRDLPQGFSALEPLVDLPIGINITRFQTLLALHRSYLTPGDSSSGWTAGAAAYYVGYLQPRTFLLKYNENGTITDAVDCALDPLSETKCTLKSFTVEKGIYQTSNFRVQPTESIVRFPNITNLCPFGEVFNATRFASVYAWNRKRISNCVADYSVLYNSASFSTFKCYGVSPTKLNDLCFTNVYADSFVIRGDEVRQIAPGQTGKIADYNYKLPDDFTGCVIAWNSNNLDSKVGGNYNYLYRLFRKSNLKPFERDISTEIYQAGSTPCNGVEGFNCYFPLQSYGFQPTNGVGYQPYRVVVLSFELLHAPATVCGPKKSTNLVKNKCVNFNFNGLTGTGVLTESNKKFLPFQQFGRDIADTTDAVRDPQTLEILDITPCSFGGVSVITPGTNTSNQVAVLYQGVNCTEVPVAIHADQLTPTWRVYSTGSNVFQTRAGCLIGAEHVNNSYECDIPIGAGICASYQTQTNSPRRARSVASQSIIAYTMSLGAENSVAYSNNSIAICTNFTISVTTEILPVSMTKTSVDCTMYICGDSTECSNLLLQYGSFCTQLNRALTGIAVEQDKNTQEVFAQVKQIYKTPPIKDFGGFNFSQILPDPSKPSKRSFIEDLLFNKVTLADAGFIKQYGDCLGDIAARDLICAQKFNGLTVLPPLLTDEMIAQYTSALLAGTITSGWTFGAGAALQIPFAMQMAYRFNGIGVTQNVLYENQKLIANQFNSAIGKIQDSLSSTASALGKLQDVVNQNAQALNTLVKQLSSNFGAISSVLNDILSRLDKVEAEVQIDRLITGRLQSLQTYVTQQLIRAAEIRASANLAATKMSECVLGQSKRVDFCGKGYHLMSFPQSAPHGVVFLHVTYVCAQEKNFTTAPAICHDGKAHFPREGVFVSNGTHWFVTQRNFYEPQIITTDNTFVSGNCDVVIGIVNNTVYDPLQPELDSFKEELDKYFKNHTSPDVDLGDISGINASVVNIQKEIDRLNEVAKNLNESLIDLQELGKYEQYIKWPWYIWLGFIAGLIAIVMVTIMLCCITSCCSCLKGCCSCGSCCKFDEDDSEPVLKGVKLHYT

SEQ ID NO: 789 - protein, 1273 aa, Artificial Sequence
  SARS-CoV-2/Iceland/202/2020__EPI_ISL_417750 spike protein (1-1273)(P715C_P1069C)
MFVFLVLLPLVSSQCVNLTTRTQLPPAYTNSFTRGVYYPDKVFRSSVLHSTQDLFLPFFSNVTWFHAIHVSGTNGTKRFDNPVLPFNDGVYFASTEKSNIIRGWIFGTTLDSKTQSLLIVNNATNVVIKVCEFQFCNDPFLGVYYHKNNKSWMESEFRVYSSANNCTFEYVSQPFLMDLEGKQGNFKNLREFVFKNIDGYFKIYSKHTPINLVRDLPQGFSALEPLVDLPIGINITRFQTLLALHRSYLTPGDSSSGWTAGAAAYYVGYLQPRTFLLKYNENGTITDAVDCALDPLSETKCTLKSFTVEKGIYQTSNFRVQPTESIVRFPNITNLCPFGEVFNATRFASVYAWNRKRISNCVADYSVLYNSASFSTFKCYGVSPTKLNDLCFTNVYADSFVIRGDEVRQIAPGQTGKIADYNYKLPDDFTGCVIAWNSNNLDSKVGGNYNYLYRLFRKSNLKPFERDISTEIYQAGSTPCNGVEGFNCYFPLQSYGFQPTNGVGYQPYRVVVLSFELLHAPATVCGPKKSTNLVKNKCVNFNFNGLTGTGVLTESNKKFLPFQQFGRDIADTTDAVRDPQTLEILDITPCSFGGVSVITPGTNTSNQVAVLYQDVNCTEVPVAIHADQLTPTWRVYSTGSNVFQTRAGCLIGAEHVNNSYECDIPIGAGICASYQTQTNSPRRARSVASQSIIAYTMSLGAENSVAYSNNSIAICTNFTISVTTEILPVSMTKTSVDCTMYICGDSTECSNLLLQYGSFCTQLNRALTGIAVEQDKNTQEVFAQVKQIYKTPPIKDFGGFNFSQILPDPSKPSKRSFIEDLLFNKVTLADAGFIKQYGDCLGDIAARDLICAQKFNGLTVLPPLLTDEMIAQYTSALLAGTITSGWTFGAGAALQIPFAMQMAYRFNGIGVTQNVLYENQKLIANQFNSAIGKIQDSLSSTASALGKLQDVVNQNAQALNTLVKQLSSNFGAISSVLNDILSRLDKVEAEVQIDRLITGRLQSLQTYVTQQLIRAAEIRASANLAATKMSECVLGQSKRVDFCGKGYHLMSFPQSAPHGVVFLHVTYVCAQEKNFTTAPAICHDGKAHFPREGVFVSNGTHWFVTQRNFYEPQIITTDNTFVSGNCDVVIGIVNNTVYDPLQPELDSFKEELDKYFKNHTSPDVDLGDIPGINASVVNIQKEIDRLNEVAKNLNESLIDLQELGKYEQYIKWPWYIWLGFIAGLIAIVMVTIMLCCMTSCCSCLKGCCSCGSCCKFDEDDSEPVLKGVKLHYT

SEQ ID NO: 790 - protein, 1273 aa, Artificial Sequence
  SARS-CoV-2/USA/WA-UW261/2020__EPI_ISL_418046 spike protein (1-1273)(P715C_P1069C)
MFVFLVLLPLVSSQCVNLTTRTQLPPAYTNSFTRGVYYPDKVFRSSVLHSTQDLFLPFFSNVTWFHAIHVSGTNGTKRFDNPVLPFNDGVYFASTEKSNIIRGWIFGTTLDSKTQSLLIVNNATNVVIKVCEFQFCNDPFLGVYYHKNNKSWMESEFRVYSSANNCTFEYVSQPFLMDLEGKQGNFKNLREFVFKNIDGYFKIYSKHTPINLVRDLPQGFSALEPLVDLPIGINITRFQTLLALHRSYLTPGDSSSGWTAGAAAYYVGYLQPRTFLLKYNENGTITDAVDCALDPLSETKCTLKSFTVEKGIYQTSNFRVQPTESIVRFPNITNLCPFGEVFNATRFTSVYAWNRKRISNCVADYSVLYNSASFSTFKCYGVSPTKLNDLCFTNVYADSFVIRGDEVRQIAPGQTGKIADYNYKLPDDFTGCVIAWNSNNLDSKVGGNYNYLYRLFRKSNLKPFERDISTEIYQAGSTPCNGVEGFNCYFPLQSYGFQPTNGVGYQPYRVVVLSFELLHAPATVCGPKKSTNLVKNKCVNFNFNGLTGTGVLTESNKKFLPFQQFGRDIADTTDAVRDPQTLEILDITPCSFGGVSVITPGTNTSNQVAVLYQDVNCTEVPVAIHADQLTPTWRVYSTGSNVFQTRAGCLIGAEHVNNSYECDIPIGAGICASYQTQTNSPRRARSVASQSIIAYTMSLGAENSVAYSNNSIAICTNFTISVTTEILPVSMTKTSVDCTMYICGDSTECSNLLLQYGSFCTQLNRALTGIAVEQDKNTQEVFAQVKQIYKTPPIKDFGGFNFSQILPDPSKPSKRSFIEDLLFNKVTLADAGFIKQYGDCLGDIAARDLICAQKFNGLTVLPPLLTDEMIAQYTSALLAGTITSGWTFGAGAALQIPFAMQMAYRFNGIGVTQNVLYENQKLIANQFNSAIGKIQDSLSSTASALGKLQDVVNQNAQALNTLVKQLSSNFGAISSVLNDILSRLDKVEAEVQIDRLITGRLQSLQTYVTQQLIRAAEIRASANLAATKMSECVLGQSKRVDFCGKGYHLMSFPQSAPHGVVFLHVTYVCAQEKNFTTAPAICHDGKAHFPREGVFVSNGTHWFVTQRNFYEPQIITTDNTFVSGNCDVVIGIVNNTVYDPLQPELDSFKEELDKYFKNHTSPDVDLGDISGINASVVNIQKEIDRLNEVAKNLNESLIDLQELGKYEQYIKWPWYIWLGFIAGLIAIVMVTIMLCCMTSCCSCLKGCCSCGSCCKFDEDDSEPVLKGVKLHYT

SEQ ID NO: 791 - protein, 1273 aa, Artificial Sequence
  SARS-CoV-2/Portugal/PT0035/2020__EPI_ISL_418020 spike protein (1-1273)(P715C_P1069C)
MFVFLVLLPLVSSQCVNLTTRTQLPPAYTNSFTRGVYYPDKVFRSSVLHSTQDLFLPFFSNVTWFHAIHVSGTNGTKRFDNPVLPFNDGVYFASTEKSNIIRGWIFGTTLDSKTQSLLIVNNATNVVIKVCEFQFCNDPFLGVYYHKNNKSWMESEFRVYSSANNCTFEYVSQPFLMDLEGKQGNFKNLREFVFKNIDGYFKIYSKHTPINLVRDLPQGFSALEPLVDLPIGINITRFQTLLALHRSYLTPGDSSSGWTAGAAAYYVGYLQPRTFLLKYNENGTITDAVDCALDPLSETKCTLKSFTVEKGIYQTSNFRVQPTESIVRFPNITNLCPFGEVFNATRFASVYAWNRKRISNCVADYSVLYNSASFSTFKCYGVSPTKLNDLCFTNVYADSFVIRGDEVRQIAPGQTGKIADYNYKLPDDFTGCVIAWNSNNLDSKVGGNYNYLYRLFRKSNLKPFERDISTEIYQAGSTPCNGVEGFNCYFPLQSYGFQPTNGVGYQPYRVVVLSFELLHAPATVCGPKKSTNLVKNKCVNFNFNGLTGTGVLTESNKKFLPFQQFGRDIADTTDAVRDPQTLEILDITPCSFGGVSVITPGTNTSNQVAVLYQDVNCTEVPVAIHADQLTPTWRVYSTGSNVFQTRAGCLIGAEHVNNSYECDIPIGAGICASYQTQTNSPRRARSVASQSIIAYTMSLGAENSVAYSNNSIAICTNFTISVTTEILPVSMTKTSVDCTMYICGDSTECSNLLLQYGSFCTQLNRALTGIAVEQDKNTQEVFAQVKQIYKTPPIKDFGGFNFSQILPDPSKPSKRSFIEDLLFNKVTLADAGFIKQYGDCLGDISARDLICAQKFNGLTVLPPLLTDEMIAQYTSALLAGTITSGWTFGAGAALQIPFAMQMAYRFNGIGVTQNVLYENQKLIANQFNSAIGKIQDSLSSTASALGKLQDVVNQNAQALNTLVKQLSSNFGAISSVLNDILSRLDKVEAEVQIDRLITGRLQSLQTYVTQQLIRAAEIRASANLAATKMSECVLGQSKRVDFCGKGYHLMSFPQSAPHGVVFLHVTYVCAQEKNFTTAPAICHDGKAHFPREGVFVSNGTHWFVTQRNFYEPQIITTDNTFVSGNCDVVIGIVNNTVYDPLQPELDSFKEELDKYFKNHTSPDVDLGDISGINASVVNIQKEIDRLNEVAKNLNESLIDLQELGKYEQYIKWPWYIWLGFIAGLIAIVMVTIMLCCMTSCCSCLKGCCSCGSCCKFDEDDSEPVLKGVKLHYT

SEQ ID NO: 792 - protein, 1273 aa, Artificial Sequence
  SARS-CoV-2/USA/NY-NYUMC7/2020__EPI_ISL_418192 spike protein (1-1273)(P715C_P1069C)
MFVFLVLLPLVSSQCVNLTTRTQLPPAYTNSFTRGVYYPDKVFRSSVLHSTQDLFLPFFSNVTWFHAIHVSGTNGTKRFDNPVLPFNDGVYFASTEKSNIIRGWIFGTTLDSKTQSLLIVNNATNVVIKVCEFQFCNDPFLGVYHHKNNKSWMESEFRVYSSANNCTFEYVSQPFLMDLEGKQGNFKNLREFVFKNIDGYFKIYSKHTPINLVRDLPQGFSALEPLVDLPIGINITRFQTLLALHRSYLTPGDSSSGWTAGAAAYYVGYLQPRTFLLKYNENGTITDAVDCALDPLSETKCTLKSFTVEKGIYQTSNFRVQPTESIVRFPNITNLCPFGEVFNATRFASVYAWNRKRISNCVADYSVLYNSASFSTFKCYGVSPTKLNDLCFTNVYADSFVIRGDEVRQIAPGQTGKIADYNYKLPDDFTGCVIAWNSNNLDSKVGGNYNYLYRLFRKSNLKPFERDISTEIYQAGSTPCNGVEGFNCYFPLQSYGFQPTNGVGYQPYRVVVLSFELLHAPATVCGPKKSTNLVKNKCVNFNFNGLTGTGVLTESNKKFLPFQQFGRDIADTTDAVRDPQTLEILDITPCSFGGVSVITPGTNTSNQVAVLYQGVNCTEVPVAIHADQLTPTWRVYSTGSNVFQTRAGCLIGAEHVNNSYECDIPIGAGICASYQTQTNSPRRARSVASQSIIAYTMSLGAENSVAYSNNSIAICTNFTISVTTEILPVSMTKTSVDCTMYICGDSTECSNLLLQYGSFCTQLNRALTGIAVEQDKNTQEVFAQVKQIYKTPPIKDFGGFNFSQILPDPSKPSKRSFIEDLLFNKVTLADAGFIKQYGDCLGDIAARDLICAQKFNGLTVLPPLLTDEMIAQYTSALLAGTITSGWTFGAGAALQIPFAMQMAYRFNGIGVTQNVLYENQKLIANQFNSAIGKIQDSLSSTASALGKLQDVVNQNAQALNTLVKQLSSNFGAISSVLNDILSRLDKVEAEVQIDRLITGRLQSLQTYVTQQLIRAAEIRASANLAATKMSECVLGQSKRVDFCGKGYHLMSFPQSAPHGVVFLHVTYVCAQEKNFTTAPAICHDGKAHFPREGVFVSNGTHWFVTQRNFYEPQIITTDNTFVSGNCDVVIGIVNNTVYDPLQPELDSFKEELDKYFKNHTSPDVDLGDISGINASVVNIQKEIDRLNEVAKNLNESLIDLQELGKYEQYIKWPWYIWLGFIAGLIAIVMVTIMLCCMTSCCSCLKGCCSCGSCCKFDEDDSEPVLKGVKLHYT

SEQ ID NO: 793 - protein, 1273 aa, Artificial Sequence
  SARS-CoV-2/Iceland/189/2020__EPI_ISL_417709 spike protein (1-1273)(P715C_P1069C)
MFVFLVLLPLVSSQCVNLTTRTQLPPAYTNSFTRGVYYPDKVFRSSVLHSTQDLFLPFFSNVTWFHAIHVSGTNGTKRFDNPVLPFNDGVYFASTEKSNIIRGWIFGTTLDSKTQSLLIVNNATNVVIKVCEFQFCNDPFLGVYYHKNNKSWMESEFRVYSSANNCTFEYVSQPFLMDLEGKQGNFKNLREFVFKNIDGYFKIYSKHTPINLVRDLPQGFSALEPLVDLPIGINITRFQTLLALHRSYLTPGDSSSGWTAGAAAYYVGYLQPRTFLLKYNENGTITDAVDCALDPLSETKCTLKSFTVEKGIYQTSNFRVQPTESIVRFPNITNLCPFGEVFNATRFASVYAWNRKRISNCVADYSVLYNSASFSTFKCYGVSPTKLNDLCFTNVYADSFVIRGDEVRQIAPGQTGKIADYNYKLPDDFTGCVIAWNSNNLDSKVGGNYNYLYRLFRKSNLKPFERDISTEIYQAGSTPCNGVEGFNCYFPLQSYGFQPTNGVGYQPYRVVVLSFELLHAPATVCGPKKSTNLVKNKCVNFNFNGLTGTGVLTESNKKFLPFQQFGRDIADTTDAVRDPQTLEILDITPCSFGGVSVITPGTNTSNQVAVLYQGVNCTEVPVAIHADQLTPTWRVYSTGSNVFQTRAGCLIGAEHVNNSYECDIPIGAGICASYQTQTNSPRRARSVASQSIIAYTMSLGAENSVAYSNNSIAICTNFTISVTTEILPVSMTKTSVDCTMYICGDSTECSNLLLQYGSFCTQLNRALTGIAVEQDKNTQEVFAQVKQIYKTPPIKDFGGFNFSQILPDPSKPSKRSFIEDLLFNKVTLADAGFTKQYGDCLGDIAARDLICAQKFNGLTVLPPLLTDEMIAQYTSALLAGTITSGWTFGAGAALQIPFAMQMAYRFNGIGVTQNVLYENQKLIANQFNSAIGKIQDSLSSTASALGKLQDVVNQNAQALNTLVKQLSSNFGAISSVLNDILSRLDKVEAEVQIDRLITGRLQSLQTYVTQQLIRAAEIRASANLAATKMSECVLGQSKRVDFCGKGYHLMSFPQSAPHGVVFLHVTYVCAQEKNFTTAPAICHDGKAHFPREGVFVSNGTHWFVTQRNFYEPQIITTDNTFVSGNCDVVIGIVNNTVYDPLQPELDSFKEELDKYFKNHTSPDVDLGDISGINASVVNIQKEIDRLNEVAKNLNESLIDLQELGKYEQYIKWPWYIWLGFIAGLIAIVMVTIMLCCMTSCCSCLKGCCSCGSCCKFDEDDSEPVLKGVKLHYT

SEQ ID NO: 794 - protein, 1273 aa, Artificial Sequence
  SARS-CoV-2/Australia/NSW56/2020__EPI_ISL_417408 spike protein (1-1273)(P715C_P1069C)
MFVFLVLLPLVSSQCVNLTTRTQLPPAYTNSFTRGVYYPDKVFRSSVLHSTQDLFLPFFSNVTWFHAIHVSGTNGTKRFDNPVLPFNDGVYFASTEKSNIIRGWIFGTTLDSKTQSLLIVNNATNVVIKVCEFQFCNDPFLGVYYHKNNKSWMESEFRVYSSANNCTFEYVSQPFLMDLEGKQGNFKNLREFVFKNIDGYFKIYSKHTPINLVRDLPQGFSALEPLVDLPIGINITRFQTLLALHRSYLTPGDSSSGWTAGAAAYYVGYLQPRTFLLKYNENGTITDAVDCALDPLSETKCTLKSFTVEKGIYQTSNFRVQPTESIVRFPNITNLCPFGEVFNATRFASVYAWNRKRISNCVADYSVLYNSASFSTFKCYGVSPTKLNDLCFTNVYADSFVIRGDEVRQIAPGQTGKIADYNYKLPDDFTGCVIAWNSNNLDSKVGGNYNYLYRLFRKSNLKPFERDISTEIYQAGSTPCNGVEGFNCYFPLQSYGFQPTNGVGYQPYRVVVLSFELLHAPATVCGPKKSTNLVKNKCVNFNFNGLTGTGVLTESNKKFLPFQQFGRDIADTTDAVRDPQTLEILDITPCSFGGVSVITPGTNTSNQVAVLYQDVNCTEVPVAIHADQLTPTWRVYSTGSNVFQTRAGCLIGAEHVNNSYECDIPIGAGICASYQTQTNSPRRARSVASQSIIAYTMSLGAENSVAYSNNSIAICTNFTISVTTEILPVSMTKTSVDCTMYICGDSTECSNLLLQYGSFCTQLNRALTGIAVEQDKNTQEVFAQVKQIYKTPPIKDFGGFNFSQILPDSSKPSKRSFIEDLLFNKVTLADAGFIKQYGDCLGDIAARDLICAQKFNGLTVLPPLLTDEMIAQYTSALLAGTITSGWTFGAGAALQIPFAMQMAYRFNGIGVTQNVLYENQKLIANQFNSAIGKIQDSLSSTASALGKLQDVVNQNAQALNTLVKQLSSNFGAISSVLNDILSRLDKVEAEVQIDRLITGRLQSLQTYVTQQLIRAAEIRASANLAATKMSECVLGQSKRVDFCGKGYHLMSFPQSAPHGVVFLHVTYVCAQEKNFTTAPAICHDGKAHFPREGVFVSNGTHWFVTQRNFYEPQIITTDNTFVSGNCDVVIGIVNNTVYDPLQPELDSFKEELDKYFKNHTSPDVDLGDISGINASVVNIQKEIDRLNEVAKNLNESLIDLQELGKYEQYIKWPWYIWLGFIAGLIAIVMVTIMLCCMTSCCSCLKGCCSCGSCCKFDEDDSEPVLKGVKLHYT

SEQ ID NO: 795 - protein, 1273 aa, Artificial Sequence
  SARS-CoV-2/Iceland/280/2020__EPI_ISL_417608 spike protein (1-1273)(P715C_P1069C)
MFVFLVLLPLVSSQCVNLTTRTQLPPAYTNSFTRGVYYPDKVFRSSVLHSTQDLFLPFFSNVTWFHAIHVSGTNGTKRFDNPVLPFNDGVYFASTEKSNIIRGWIFGTTLDSKTQSLLIVNNATNVVIKVCEFQFCNDPFLGVYYHKNNKSWMESEFRVYSSANNCTFEYVSQPFLMDLEGKQGNFKNLREFVFKNIDGYFKIYSKHTPINLVRDLPQGFSALEPLVDLPIGINITRFQTLLALHRSYLTPGDSSSGWTAGAAAYYVGYLQPRTFLLKYNENGTITDAVDCALDPLSETKCTLKSFTVEKGIYQTSNFRVQPTESIVRFPNITNLCPFGEVFNATRFASVYAWNRKRISNCVADYSVLYNSASFSTFKCYGVSPTKLNDLCFTNVYADSFVIRGDEVRQIAPGQTGKIADYNYKLPDDFTGCVIAWNSNNLDSKVGGNYNYLYRLFRKSNLKPFERDISTEIYQAGSTPCNGVEGFNCYFPLQSYGFQPTNGVGYQPYRVVVLSFELLHAPATVCGPKKSTNLVKNKCVNFNFNGLTGTGVLTESNKKFLPFQQFGRDIADTTDAVRDPQTLEILDITPCSFGGVSVITPGTNTSNQVAVLYQGVNCTEVPVAIHADQLTPTWRVYSTGSNVFQTRAGCLIGAEHVNNSYECDIPIGAGICASYHTQTNSPRRARSVASQSIIAYTMSLGAENSVAYSNNSIAICTNFTISVTTEILPVSMTKTSVDCTMYICGDSTECSNLLLQYGSFCTQLNRALTGIAVEQDKNTQEVFAQVKQIYKTPPIKDFGGFNFSQILPDPSKPSKRSFIEDLLFNKVTLADAGFIKQYGDCLGDIAARDLICAQKFNGLTVLPPLLTDEMIAQYTSALLAGTITSGWTFGAGAALQIPFAMQMAYRFNGIGVTQNVLYENQKLIANQFNSAIGKIQDSLSSTASALGKLQDVVNQNAQALNTLVKQLSSNFGAISSVLNDILSRLDKVEAEVQIDRLITGRLQSLQTYVTQQLIRAAEIRASANLAATKMSECVLGQSKRVDFCGKGYHLMSFPQSAPHGVVFLHVTYVCAQEKNFTTAPAICHDGKAHFPREGVFVSNGTHWFVTQRNFYEPQIITTDNTFVSGNCDVVIGIVNNTVYDPLQPELDSFKEELDKYFKNHTSPDVDLGDISGINASVVNIQKEIDRLNEVAKNLNESLIDLQELGKYEQYIKWPWYIWLGFIAGLIAIVMVTIMLCCMTSCCSCLKGCCSCGSCCKFDEDDSEPVLKGVKLHYT

SEQ ID NO: 796 - protein, 1273 aa, Artificial Sequence
  SARS-CoV-2/Iceland/247/2020__EPI_ISL_417575 spike protein (1-1273)(P715C_P1069C)
MFVFLVLLPLVSSQCVNLTTRTQLPPAYTNSFTRGVYYPDKVFRSSVLHSTQDLFLPFFSNVTWFHAIHVSGTNGTKRFDNPVLPFNDGVYFASTEKSNIIRGWIFGTTLDSKTQSLLIVNNATNVVIKVCEFQFCNDPFLGVYYHKNNKSWMESEFRVYSSANNCTFEYVSQPFLMDLEGKQGNFKNLREFVFKNIDGYFKIYSKHTPINLVRDLPQGFSALEPLVDLPIGINITRFQTLLALHRSYLTPGDSSSGWTAGAAAYYVGYLQPRTFLLKYNENGTITDAVDCALDPLSETKCTLKSFTVEKGIYQTSNFRVQPTESIVRFPNITNLCPFGEVFNATRFASVYAWNRKRISNCVADYSVLYNSASFSTFKCYGVSPTKLNDLCFTNVYADSFVIRGDEVRQIAPGQTGKIADYNYKLPDDFTGCVIAWNSNNLDSKVGGNYNYLYRLFRKSNLKPFERDISTEIYQAGSTPCNGVEGFNCYFPLQSYGFQPTNGVGYQPYRVVVLSFELLHAPATVCGPKKSTNLVKNKCVNFNFNGLTGTGVLTESNKKFLPFQQFGRDIADTTDAVRDPQTLEILDITPCSFGGVSVITPGTNTSNQVAVLYQGVNCTEVPVAIHADQLTPTWRVYSTGSNVFQTRAGCLIGAEHVNNSYECDIPIGAGICASYQTQTNSPRRARSVASQSIIAYTMSLGAENSVAYSNNSIAICTNFTISVTTEILPVSMTKTSVDCTMYICGDSTECSNLLLQYGSFCTQLNRALTGIAVEQDKNTQEVFAQVKQIYKTPPIKDFGGFNFSQILPDPSKPSKRSFIEDLLFNKVTLADAGFIKQYGDCLGDIAARDLICAQKFNGLTVLPPLLTDEMIAQYTSALLAGTITSGWTFGAGAALQIPFAMQMAYRFNGIGVTQNVLYENQKLIANQFNSAIGKIQDSLSSTASALGKLQDVVNQNAQALNTLVKQLSSNFGAISSVLNDILSRLDKVEAEVQIDRLITGRLQSLQTYVTQQLIRAAEIRASANLAATKMSECVLGQSKRVDFCGKGYHLMSFPQSAPHGVVFLHVTYVCAQEKNFTTAPAICHDGKAHFPREGVFVSNGTHWFVTQRNFYEPQIITTDNTFVSGNCDVVIGIVNNTVYDPLQPELDSFKEELDKYFKNHTSPDVDLGDISGINASVVNIQKEIDRLNEVAKNLNESLIDLQELGKYEQYIKWPWYIWLGFIAGLIAIVIVTIMLCCMTSCCSCLKGCCSCGSCCKFDEDDSEPVLKGVKLHYT

SEQ ID NO: 797 - protein, 1273 aa, Artificial Sequence
  SARS-CoV-2/Iceland/238/2020__EPI_ISL_417566 spike protein (1-1273)(P715C_P1069C)
MFVFLVLLPLVSSQCVNLTTRTQLPPAYTNSFTRGVYYPDKVFRSSVLHSTQDLFLPFFSNVTWFHAIHVSGTNGTKRFDNPVLPFNDGVYFASTEKSNIIRGWIFGTTLDSKTQSLLIVNNATNVVIKVCEFQFCNDPFLGVYYHKNNKSWMESEFRVYSSANNCTFEYVSQPFLMDLEGKQGNFKNLREFVFKNIDGYFKIYSKHTPINLVRDLPQGFSALEPLVDLPIGINITRFQTLLALHRSYLTPGDSSSGWTAGAAAYYVGYLQPRTFLLKYNENGTITDAVDCALDPLSETKCTLKSFTVEKGIYQTSNFRVQPTESIVRFPNITNLCPFGEVFNATRFASVYAWNRKRISNCVADYSVLYNSASFSTFKCYGVSPTKLNDLCFTNVYADSFVIRGDEVRQIAPGQTGKIADYNYKLPDDFTGCVIAWNSNNLDSKVGGNYNYLYRLFRKSNLKPFERDISTEIYQAGSTPCNGVEGFNCYFPLQSYGFQPTNGVGYQPYRVVVLSFELLHAPATVCGPKKSTNLVKNKCVNFNFNGLTGTGVLTESNKKFLPFQQFGRDIADTTDAVRDPQTLEILDITPCSFGGVSVITPGTNTSNQVAVLYQGVNCTEVPVAIHADQLTPTWRVYSTGSNVFQTRAGCLIGAEHVNNSYECDIPIGAGICASYQTQTNSPRRARSVASQSIIAYTMSLGAENSVAYSNNSIAICTNFTISVTTEILPVSMTKTSVDCTMYICGDSTECSNLLLQYGSFCTQLNRALTGIAVEQDKNTQEVFAQVKQIYKTPPIKDFGGFNFSQILPDPSKPSKRSFIEDLLFNKVTLADVGFIKQYGDCLGDIAARDLICAQKFNGLTVLPPLLTDEMIAQYTSALLAGTITSGWTFGAGAALQIPFAMQMAYRFNGIGVTQNVLYENQKLIANQFNSAIGKIQDSLSSTASALGKLQDVVNQNAQALNTLVKQLSSNFGAISSVLNDILSRLDKVEAEVQIDRLITGRLQSLQTYVTQQLIRAAEIRASANLAATKMSECVLGQSKRVDFCGKGYHLMSFPQSAPHGVVFLHVTYVCAQEKNFTTAPAICHDGKAHFPREGVFVSNGTHWFVTQRNFYEPQIITTDNTFVSGNCDVVIGIVNNTVYDPLQPELDSFKEELDKYFKNHTSPDVDLGDISGINASVVNIQKEIDRLNEVAKNLNESLIDLQELGKYEQYIKWPWYIWLGFIAGLIAIVMVTIMLCCMTSCCSCLKGCCSCGSCCKFDEDDSEPVLKGVKLHYT

SEQ ID NO: 798 - protein, 1273 aa, Artificial Sequence
  SARS-CoV-2/Greece/16/2020__EPI_ISL_418265 spike protein (1-1273)(P715C_P1069C)
MFVFLVLLPLVSSQCVNLTTRTQLPPAYTNSFTRGVYYPDKVFRSSVLHSTQDLFLPFFSNVTWFHAIHVSGTNGTKRFDNPVLPFNDGVYFASTEKSNIIRGWIFGTTLDSKTQSLLIVNNATNVVIKVCEFQFCNDPFLGVYYHKNNKSWMESEFRVYSSANNCTFEYVSQPFLMDLEGKQGNFKNLREFVFKNVDGYFKIYSKHTPINLVRDLPQGFSALEPLVDLPIGINITRFQTLLALHRSYLTPGDSSSGWTAGAAAYYVGYLQPRTFLLKYNENGTITDAVDCALDPLSETKCTLKSFTVEKGIYQTSNFRVQPTESIVRFPNITNLCPFGEVFNATRFASVYAWNRKRISNCVADYSVLYNSASFSTFKCYGVSPTKLNDLCFTNVYADSFVIRGDEVRQIAPGQTGKIADYNYKLPDDFTGCVIAWNSNNLDSKVGGNYNYLYRLFRKSNLKPFERDISTEIYQAGSTPCNGVEGFNCYFPLQSYGFQPTNGVGYQPYRVVVLSFELLHAPATVCGPKKSTNLVKNKCVNFNFNGLTGTGVLTESNKKFLPFQQFGRDIADTTDAVRDPQTLEILDITPCSFGGVSVITPGTNTSNQVAVLYQDVNCTEVPVAIHADQLTPTWRVYSTGSNVFQTRAGCLIGAEHVNNSYECDIPIGAGICASYQTQTNSPRRARSVASQSIIAYTMSLGAENSVAYSNNSIAICTNFTISVTTEILPVSMTKTSVDCTMYICGDSTECSNLLLQYGSFCTQLNRALTGIAVEQDKNTQEVFAQVKQIYKTPPIKDFGGFNFSQILPDPSKPSKRSFIEDLLFNKVTLADAGFIKQYGDCLGDIAARDLICAQKFNGLTVLPPLLTDEMIAQYTSALLAGTITSGWTFGAGAALQIPFAMQMAYRFNGIGVTQNVLYENQKLIANQFNSAIGKIQDSLSSTASALGKLQDVVNQNAQALNTLVKQLSSNFGAISSVLNDILSRLDKVEAEVQIDRLITGRLQSLQTYVTQQLIRAAEIRASANLAATKMSECVLGQSKRVDFCGKGYHLMSFPQSAPHGVVFLHVTYVCAQEKNFTTAPAICHDGKAHFPREGVFVSNGTHWFVTQRNFYEPQIITTDNTFVSGNCDVVIGIVNNTVYDPLQPELDSFKEELDKYFKNHTSPDVDLGDISGINASVVNIQKEIDRLNEVAKNLNESLIDLQELGKYEQYIKWPWYIWLGFIAGLIAIVMVTIMLCCMTSCCSCLKGCCSCGSCCKFDEDDSEPVLKGVKLHYT

SEQ ID NO: 799 - protein, 1273 aa, Artificial Sequence
  SARS-CoV-2/Iceland/319/2020__EPI_ISL_417648 spike protein (1-1273)(P715C_P1069C)
MFVFLVLLPLVSSQCVNLTTRTQLPPAYTNSFTRGVYYPDKVFRSSVLHSTQDLFLPFFSNVTWFHAIHVSGTNGTKRFDNPVLPFNDGVYFASTEKSNIIRGWIFGTTLDSKTQSLLIVNNATNVVIKVCEFQFCNDPFLGVYYHKNNKSWMESEFRVYSSANNCTFEYVSQPFLIDLEGKQGNFKNLREFVFKNIDGYFKIYSKHTPINLVRDLPQGFSALEPLVDLPIGINITRFQTLLALHRSYLTPGDSSSGWTAGAAAYYVGYLQPRTFLLKYNENGTITDAVDCALDPLSETKCTLKSFTVEKGIYQTSNFRVQPTESIVRFPNITNLCPFGEVFNATRFASVYAWNRKRISNCVADYSVLYNSASFSTFKCYGVSPTKLNDLCFTNVYADSFVIRGDEVRQIAPGQTGKIADYNYKLPDDFTGCVIAWNSNNLDSKVGGNYNYLYRLFRKSNLKPFERDISTEIYQAGSTPCNGVEGFNCYFPLQSYGFQPTNGVGYQPYRVVVLSFELLHAPATVCGPKKSTNLVKNKCVNFNFNGLTGTGVLTESNKKFLPFQQFGRDIADTTDAVRDPQTLEILDITPCSFGGVSVITPGTNTSNQVAVLYQGVNCTEVPVAIHADQLTPTWRVYSTGSNVFQTRAGCLIGAEHVNNSYECDIPIGAGICASYQTQTNSPRRARSVASQSIIAYTMSLGAENSVAYSNNSIAICTNFTISVTTEILPVSMTKTSVDCTMYICGDSTECSNLLLQYGSFCTQLNRALTGIAVEQDKNTQEVFAQVKQIYKTPPIKDFGGFNFSQILPDPSKPSKRSFIEDLLFNKVTLADAGFIKQYGDCLGDIAARDLICAQKFNGLTVLPPLLTDEMIAQYTSALLAGTITSGWTFGAGAALQIPFAMQMAYRFNGIGVTQNVLYENQKLIANQFNSAIGKIQDSLSSTASALGKLQDVVNQNAQALNTLVKQLSSNFGAISSVLNDILSRLDKVEAEVQIDRLITGRLQSLQTYVTQQLIRAAEIRASANLAATKMSECVLGQSKRVDFCGKGYHLMSFPQSAPHGVVFLHVTYVCAQEKNFTTAPAICHDGKAHFPREGVFVSNGTHWFVTQRNFYEPQIITTDNTFVSGNCDVVIGIVNNTVYDPLQPELDSFKEELDKYFKNHTSPDVDLGDISGINASVVNIQKEIDRLNEVAKNLNESLIDLQELGKYEQYIKWPWYIWLGFIAGLIAIVMVTIMLCCMTSCCSCLKGCCSCGSCCKFDEDDSEPVLKGVKLHYT

SEQ ID NO: 800 - protein, 1273 aa, Artificial Sequence
  SARS-CoV-2/Congo/94/2020__EPI_ISL_417947 spike protein (1-1273)(P715C_P1069C)
MFVFLVLLPLVSSQCVNLTTRTQLPPAYTNSFTRGVYYPDKVFRSSVLHSTQDLFLPFFSNVTWFHAIHVSGTNGTKRFDNPVLPFNDGVYFASTEKSNIIRGWIFGTTLDSKTQSLLIVNNATNVVIKVCEFQFCNDPFLGVYYHKNNKSWMESEFRVYSSANNCTFEYVSQPFLMDLEGKQGNFKNLREFVFKNIDGYFKIYSKHTPINLVRDLPQGFSALEPLVDLPIGINITRFQTLLALHRSYLTPGDSSSGWTAGAAAYYVGYLQPRTFLLKYNENGTITDAVDCALDPLSETKCTLKSFTVEKGIYQTSNFRVQPTESIVRFPNITNLCPFGEVFNATRFASVYAWNRKRISNCVADYSVLYNSASFSTFKCYGVSPTKLNDLCFTNVYADSFVIRGDEVRQIAPGQTGKIADYNYKLPDDFTGCVIAWNSNNLDSKVGGNYNYLYRLFRKSNLKPFERDISTEIYQAGSTPCNGVEGFNCYFPLQSYGFQPTNGVGYQPYRVVVLSFELLHAPATVCGPKKSTNLVKNKCVNFNFNGLTGTGVLTESNKKFLPFQQFGRDIADTTDAVRDPQTLEILDITPCSFGGVSVITPGTNTSNQVAVLYQGVNCTEVPVAIHADQLTPTWRVYSTGSNVFQTRAGCLIGAEHVNNSYECDIPIGAGICASYQTQTNSPRRARSVASQSIIAYTMSLGAENSVAYSNNSIAICTNFTISVTTEILPVSMTKTSVDCTMYICGDSTECSNLLLQYGSFCTQLNRALTGIAVEQDKNTQEVFAQVKQIYKTPPIKDFGGFNFSQILPDPSKPSKRSFIEDILFNKVTLADAGFIKQYGDCLGDIAARDLICAQKFNGLTVLPPLLTDEMIAQYTSALLAGTITSGWTFGAGAALQIPFAMQMAYRFNGIGVTQNVLYENQKLIANQFNSAIGKIQDSLSSTASALGKLQDVVNQNAQALNTLVKQLSSNFGAISSVLNDILSRLDKVEAEVQIDRLITGRLQSLQTYVTQQLIRAAEIRASANLAATKMSECVLGQSKRVDFCGKGYHLMSFPQSAPHGVVFLHVTYVCAQEKNFTTAPAICHDGKAHFPREGVFVSNGTHWFVTQRNFYEPQIITTDNTFVSGNCDVVIGIVNNTVYDPLQPELDSFKEELDKYFKNHTSPDVDLGDISGINASVVNIQKEIDRLNEVAKNLNESLIDLQELGKYEQYIKWPWYIWLGFIAGLIAIVMVTIMLCCMTSCCSCLKGCCSCGSCCKFDEDDSEPVLKGVKLHYT

SEQ ID NO: 801 - protein, 1273 aa, Artificial Sequence
  SARS-CoV-2/Congo/158/2020__EPI_ISL_417950 spike protein (1-1273)(P715C_P1069C)
MFVFLVLLPLVSSQCVNLTTRTQLPPAYTNSFTRGVYYPDKVFRSSVLHSTQDLFLPFFSNVTWFHAIHVSGTNGTKRFDNPVLPFNDGVYFASTEKSNIIRGWIFGTTLDSKTQSLLIVNNATNVVIKVCEFQFCNDPFLGVYYHKNNKSWMESEFRVYSSANNCTFEYVSQPFLMDLEGKQGNFKNLREFVFKNIDGYFKIYSKHTPINLVRDLPQGFSALEPLVDLPIGINITRFQTLLALHRSYLTPGDSSSGWTAGAAAYYVGYLQPRTFLLKYNENGTITDAVDCALDPLSETKCTLKSFTVEKGIYQTSNFRVQPTESIVRFPNITNLCPFGEVFNATRFASVYAWNRKRISNCVADYSVLYNSASFSTFKCYGVSPTKLNDLCFTNVYADSFVIRGDEVRQIAPGQTGKIADYNYKLPDDFTGCVIAWNSNNLDSKVGGNYNYLYRLFRKSNLKPFERDISTEIYQAGSTPCNGVEGFNCYFPLQSYGFQPTNGVGYQPYRVVVLSFELLHAPATVCGPKKSTNLVKNKCVNFNFNGLTGTGVLTESNKKFLPFQQFGRDIADTTDAVRDPQTLEILDITPCSFGGVSVITPGTNTSNQVAVLYQDVNCTEVPVAIHADQLTPTWRVYSTGSNVFQTRAGCLIGAEHVNNSYECDIPIGAGICASYQTQTNSPRRARSVASQSIIAYTMSLGAENSVAYSNNSIAICTNFTISVTTEILPVSMTKTSVDCTMYICGDSTECSNLLLQYGSFCTQLNRALTGIAVEQDKNTQEVFAQVKQIYKTPPIKDFGGFNFSQILPDPSKPSKRSFIEDLLFNKVTLADAGFIKQYGDCLGDIAARDLICAQKFNGLTVLPPLLTDEMIAQYTSALLAGTITSGWTFGAGAALQIPFAMQMAYRFNGIGVTQNVLYENQKLIANQFNSAIGKIQDSLSSTASALGKLQDVVNQNAQALNTLVKQLSSNFGAISSVLNDILSRLDKVEAEVQIDRLITGRLQSLQTYVTQQLIRAAEIRASANLAATKMSECVLGQSKRVDFCGKGYHLMSFPQSAPHGVVFLHVTYVCAQEKNFTTAPAICHDGKAHFPREGVFVSNGTHWFVTQRNFYEPQIITTDNTFLSGNCDVVIGIVNNTVYDPLQPELDSFKEELDKYFKNHTSPDVDLGDISGINASVVNIQKEIDRLNEVAKNLNESLIDLQELGKYEQYIKWPWYIWLGFIAGLIAIVMVTIMLCCMTSCCSCLKGCCSCGSCCKFDEDDSEPVLKGVKLHYT

SEQ ID NO: 802 - protein, 1273 aa, Artificial Sequence
  SARS-CoV-2/USA/UT-00034/2020__EPI_ISL_417977 spike protein (1-1273)(P715C_P1069C)
MFVFLVLLPLVSSQCVNLTTRTQLPPAYTNSFTRGVYYPDKVFRSSVLHSTQDLFLPFFSNVTWFHAIHVSGTNGTKRFDNPVLPFNDGVYFASTEKSNIIRGWIFGTTLDSKTQSLLIVNNATNVVIKVCEFQFCNDPFLGVYYYKNNKSWMESEFRVYSSANNCTFEYVSQPFLMDLEGKQGNFKNLREFVFKNIDGYFKIYSKHTPINLVRDLPQGFSALEPLVDLPIGINITRFQTLLALHRSYLTPGDSSSGWTAGAAAYYVGYLQPRTFLLKYNENGTITDAVDCALDPLSETKCTLKSFTVEKGIYQTSNFRVQPTESIVRFPNITNLCPFGEVFNATRFASVYAWNRKRISNCVADYSVLYNSASFSTFKCYGVSPTKLNDLCFTNVYADSFVIRGDEVRQIAPGQTGKIADYNYKLPDDFTGCVIAWNSNNLDSKVGGNYNYLYRLFRKSNLKPFERDISTEIYQAGSTPCNGVEGFNCYFPLQSYGFQPTNGVGYQPYRVVVLSFELLHAPATVCGPKKSTNLVKNKCVNFNFNGLTGTGVLTESNKKFLPFQQFGRDIADTTDAVRDPQTLEILDITPCSFGGVSVITPGTNTSNQVAVLYQGVNCTEVPVAIHADQLTPTWRVYSTGSNVFQTRAGCLIGAEHVNNSYECDIPIGAGICASYQTQTNSPRRARSVASQSIIAYTMSLGAENSVAYSNNSIAICTNFTISVTTEILPVSMTKTSVDCTMYICGDSTECSNLLLQYGSFCTQLNRALTGIAVEQDKNTQEVFAQVKQIYKTPPIKDFGGFNFSQILPDPSKPSKRSFIEDLLFNKVTLADAGFIKQYGDCLGDIAARDLICAQKFNGLTVLPPLLTDEMIAQYTSALLAGTITSGWTFGAGAALQIPFAMQMAYRFNGIGVTQNVLYENQKLIANQFNSAIGKIQDSLSSTASALGKLQDVVNQNAQALNTLVKQLSSNFGAISSVLNDILSRLDKVEAEVQIDRLITGRLQSLQTYVTQQLIRAAEIRASANLAATKMSECVLGQSKRVDFCGKGYHLMSFPQSAPHGVVFLHVTYVCAQEKNFTTAPAICHDGKAHFPREGVFVSNGTHWFVTQRNFYEPQIITTDNTFVSGNCDVVIGIVNNTVYDPLQPELDSFKEELDKYFKNHTSPDVDLGDISGINASVVNIQKEIDRLNEVAKNLNESLIDLQELGKYEQYIKWPWYIWLGFIAGLIAIVMVTIMLCCMTSCCSCLKGCCSCGSCCKFDEDDSEPVLKGVKLHYT

SEQ ID NO: 803 - protein, 1273 aa, Artificial Sequence
  SARS-CoV-2/USA/UT-00033/2020__EPI_ISL_417976 spike protein (1-1273)(P715C_P1069C)
MFVFLVLLPLVSSQCVNLTTRTQLPPAYTNSFTRGVYYPDKVFRSSVLHSTQDLFLPFFSNVTWFHAIHVSGTNGTKRFDNPVLPFNDGVYFASTEKSNIIRGWIFGTTLDSKTQSLLIVNNATNVVIKVCEFQFCNDPFLGVYYHKNNKSWMESEFRVYSSANNCTFEYVSQPFLMDLEGKQGNFKNLREFVFKNIDGYFKIYSKHTPINLVRDLPQGFSALEPLVDLPIGINITRFQTLLALHRSYLTPGDSSSGLTAGAAAYYVGYLQPRTFLLKYNENGTITDAVDCALDPLSETKCTLKSFTVEKGIYQTSNFRVQPTESIVRFPNITNLCPFGEVFNATRFASVYAWNRKRISNCVADYSVLYNSASFSTFKCYGVSPTKLNDLCFTNVYADSFVIRGDEVRQIAPGQTGKIADYNYKLPDDFTGCVIAWNSNNLDSKVGGNYNYLYRLFRKSNLKPFERDISTEIYQAGSTPCNGVEGFNCYFPLQSYGFQPTNGVGYQPYRVVVLSFELLHAPATVCGPKKSTNLVKNKCVNFNFNGLTGTGVLTESNKKFLPFQQFGRDIADTTDAVRDPQTLEILDITPCSFGGVSVITPGTNTSNQVAVLYQGVNCTEVPVAIHADQLTPTWRVYSTGSNVFQTRAGCLIGAEHVNNSYECDIPIGAGICASYQTQTNSPRRARSVASQSIIAYTMSLGAENSVAYSNNSIAICTNFTISVTTEILPVSMTKTSVDCTMYICGDSTECSNLLLQYGSFCTQLNRALTGIAVEQDKNTQEVFAQVKQIYKTPPIKDFGGFNFSQILPDPSKPSKRSFIEDLLFNKVTLADAGFIKQYGDCLGDIAARDLICAQKFNGLTVLPPLLTDEMIAQYTSALLAGTITSGWTFGAGAALQIPFAMQMAYRFNGIGVTQNVLYENQKLIANQFNSAIGKIQDSLSSTASALGKLQDVVNQNAQALNTLVKQLSSNFGAISSVLNDILSRLDKVEAEVQIDRLITGRLQSLQTYVTQQLIRAAEIRASANLAATKMSECVLGQSKRVDFCGKGYHLMSFPQSAPHGVVFLHVTYVCAQEKNFTTAPAICHDGKAHFPREGVFVSNGTHWFVTQRNFYEPQIITTDNTFVSGNCDVVIGIVNNTVYDPLQPELDSFKEELDKYFKNHTSPDVDLGDISGINASVVNIQKEIDRLNEVAKNLNESLIDLQELGKYEQYIKWPWYIWLGFIAGLIAIVMVTIMLCCMTSCCSCLKGCCSCGSCCKFDEDDSEPVLKGVKLHYT

SEQ ID NO: 804 - protein, 1273 aa, Artificial Sequence
  SARS-CoV-2/USA/WI-13/2020__EPI_ISL_417516 spike protein (1-1273)(P715C_P1069C)
MFVFLVLLPLVSSQCVNLTTRTQLPPAYTNSFTRGVYYPDKVFRSSVLHSTQDLFLPFFSNVTWFHAIHVSGTNGTKRFDNPVLPFNDGVYFASTEKSNIIRGWIFGTTLDSKTQSLLIVNNATNVVIKVCEFQFCNDPFLGVYYHKNNKSWMESEFRVYSSANNCTFEYVSQPFLMDLEGKQGNFKNLREFVFKNIDGYFKIYSKHTPINLVRDLPQGFSALEPLVDLPIGINITRFQTLLALHRSYLTPGDSSSGWTAGAAAYYVGYLQPRTFLLKYNENGTITDAVDCALDPLSETKCTLKSFTVEKGIYQTSNFRVLPTESIVRFPNITNLCPFGEVFNATRFASVYAWNRKRISNCVADYSVLYNSASFSTFKCYGVSPTKLNDLCFTNVYADSFVIRGDEVRQIAPGQTGKIADYNYKLPDDFTGCVIAWNSNNLDSKVGGNYNYLYRLFRKSNLKPFERDISTEIYQAGSTPCNGVEGFNCYFPLQSYGFQPTNGVGYQPYRVVVLSFELLHAPATVCGPKKSTNLVKNKCVNFNFNGLTGTGVLTESNKKFLPFQQFGRDIADTTDAVRDPQTLEILDITPCSFGGVSVITPGTNTSNQVAVLYQGVNCTEVPVAIHADQLTPTWRVYSTGSNVFQTRAGCLIGAEHVNNSYECDIPIGAGICASYQTQTNSPRRARSVASQSIIAYTMSLGAENSVAYSNNSIAICTNFTISVTTEILPVSMTKTSVDCTMYICGDSTECSNLLLQYGSFCTQLNRALTGIAVEQDKNTQEVFAQVKQIYKTPPIKDFGGFNFSQILPDPSKPSKRSFIEDLLFNKVTLADAGFIKQYGDCLGDIAARDLICAQKFNGLTVLPPLLTDEMIAQYTSALLAGTITSGWTFGAGAALQIPFAMQMAYRFNGIGVTQNVLYENQKLIANQFNSAIGKIQDSLSSTASALGKLQDVVNQNAQALNTLVKQLSSNFGAISSVLNDILSRLDKVEAEVQIDRLITGRLQSLQTYVTQQLIRAAEIRASANLAATKMSECVLGQSKRVDFCGKGYHLMSFPQSAPHGVVFLHVTYVCAQEKNFTTAPAICHDGKAHFPREGVFVSNGTHWFVTQRNFYEPQIITTDNTFVSGNCDVVIGIVNNTVYDPLQPELDSFKEELDKYFKNHTSPDVDLGDISGINASVVNIQKEIDRLNEVAKNLNESLIDLQELGKYEQYIKWPWYIWLGFIAGLIAIVMVTIMLCCMTSCCSCLKGCCSCGSCCKFDEDDSEPVLKGVKLHYT

SEQ ID NO: 805 - protein, 1272 aa, Artificial Sequence
  SARS-CoV-2/India/1-27/2020__EPI_ISL_413522 spike protein (1-1272)(P714C_P1068C)
MFVFLVLLPLVSSQCVNLTTRTQLPPAYTNSFTRGVYYPDKVFRSSVLHSTQDLFLPFFSNVTWFHAIHVSGTNGTKRFDNPVLPFNDGVYFASTEKSNIIRGWIFGTTLDSKTQSLLIVNNATNVVIKVCEFQFCNDPFLGVYHKNNKSWMESEFRVYSSANNCTFEYVSQPFLMDLEGKQGNFKNLREFVFKNIDGYFKIYSKHTPINLVRDLPQGFSALEPLVDLPIGINITRFQTLLALHRSYLTPGDSSSGWTAGAAAYYVGYLQPRTFLLKYNENGTITDAVDCALDPLSETKCTLKSFTVEKGIYQTSNFRVQPTESIVRFPNITNLCPFGEVFNATRFASVYAWNRKRISNCVADYSVLYNSASFSTFKCYGVSPTKLNDLCFTNVYADSFVIRGDEVIQIAPGQTGKIADYNYKLPDDFTGCVIAWNSNNLDSKVGGNYNYLYRLFRKSNLKPFERDISTEIYQAGSTPCNGVEGFNCYFPLQSYGFQPTNGVGYQPYRVVVLSFELLHAPATVCGPKKSTNLVKNKCVNFNFNGLTGTGVLTESNKKFLPFQQFGRDIADTTDAVRDPQTLEILDITPCSFGGVSVITPGTNTSNQVAVLYQDVNCTEVPVAIHADQLTPTWRVYSTGSNVFQTRAGCLIGAEHVNNSYECDIPIGAGICASYQTQTNSPRRARSVASQSIIAYTMSLGAENSVAYSNNSIAICTNFTISVTTEILPVSMTKTSVDCTMYICGDSTECSNLLLQYGSFCTQLNRALTGIAVEQDKNTQEVFAQVKQIYKTPPIKDFGGFNFSQILPDPSKPSKRSFIEDLLFNKVTLADAGFIKQYGDCLGDIAARDLICAQKFNGLTVLPPLLTDEMIAQYTSALLAGTITSGWTFGAGAALQIPFAMQMAYRFNGIGVTQNVLYENQKLIANQFNSAIGKIQDSLSSTASALGKLQDVVNQNAQALNTLVKQLSSNFGAISSVLNDILSRLDKVEAEVQIDRLITGRLQSLQTYVTQQLIRAAEIRASANLAATKMSECVLGQSKRVDFCGKGYHLMSFPQSAPHGVVFLHVTYVCAQEKNFTTAPAICHDGKAHFPREGVFVSNGTHWFVTQRNFYEPQIITTDNTFVSGNCDVVIGIVNNTVYDPLQPELDSFKEELDKYFKNHTSPDVDLGDISGINASVVNIQKEIDRLNEVAKNLNESLIDLQELGKYEQYIKWPWYIWLGFIAGLIAIVMVTIMLCCMTSCCSCLKGCCSCGSCCKFDEDDSEPVLKGVKLHYT

SEQ ID NO: 806 - protein, 1267 aa, Artificial Sequence
  SARS-CoV-2/pangolin/Guangxi/P4L/2017__EPI_ISL_410538 spike protein (1-1267)(P709C_P1063C)
MFVFLFVLPLVSSQCVNLTTRTGIPPGYTNSSTRGVYYPDKVFRSSILHLTQDLFLPFFSNVTWFNTINYQGGFKKFDNPVLPFNDGVYFASTEKSNIIRGWIFGTTLDARTQSLLIVNNATNVVIKVCEFQFCTDPFLGVYYHNNNKTWVENEFRVYSSANNCTFEYISQPFLMDLEGKQGNFKNLREFVFKNVDGYFKIYSKHTPIDLVRDLPRGFAALEPLVDLPIGINITRFQTLLALHRSYLTPGNLESGWTTGAAAYYVGYLQQRTFLLSYNQNGTITDAVDCSLDPLSETKCTLKSLTVEKGIYQTSNFRVQPTISIVRFPNITNLCPFGEVFNASKFASVYAWNRKRISNCVADYSVLYNSTSFSTFKCYGVSPTKLNDLCFTNVYADSFVVKGDEVRQIAPGQTGVIADYNYKLPDDFTGCVIAWNSVKQDALTGGNYGYLYRLFRKSKLKPFERDISTEIYQAGSTPCNGQVGLNCYYPLERYGFHPTTGVNYQPFRVVVLSFELLNGPATVCGPKLSTTLVKDKCVNFNFNGLTGTGVLTTSKKQFLPFQQFGRDISDTTDAVRDPQTLEILDITPCSFGGVSVITPGTNTSNQVAVLYQDVNCTEVPMAIHAEQLTPAWRVYSAGANVFQTRAGCLVGAEHVNNSYECDIPVGAGICASYHSMSSLRSVNQRSIIAYTMSLGAENSVAYSNNSIAICTNFTISVTTEILPVSMTKTSVDCTMYICGDSIECSNLLLQYGSFCTQLNRALTGIAVEQDKNTQEVFAQVKQIYKTPPIKDFGGFNFSQILPDPSKPSKRSFIEDLLFNKVTLADAGFIKQYGDCLGDIAARDLICAQKFNGLTVLPPLLTDEMIAQYTSALLAGTITSGWTFGAGAALQIPFAMQMAYRFNGIGVTQNVLYENQKLIANQFNSAIGKIQDSLSSTASALGKLQDVVNQNAQALNTLVKQLSSNFGAISSVLNDILSRLDKVEAEVQIDRLITGRLQSLQTYVTQQLIRAAEIRASANLAATKMSECVLGQSKRVDFCGKGYHLMSFPQSAPHGVVFLHVTYVCAQEKNFTTAPAICHEGKAHFPREGVFVSNGTHWFITQRNFYEPQIITTDNTFVSGSCDVVIGIVNNTVYDPLQPELDSFKEELDKYFKNHTSPDVDLGDISGINASVVNIQKEIDRLNEVAKNLNESPIDLQELGKYEQYIKWPWYIWLGFIAGLIAIIMVTIMLCCMTSCCSCLKGCCSCGSCCKFDEDDSEPVLKGVKLHYT

SEQ ID NO: 807 - protein, 1267 aa, Artificial Sequence
  SARS-CoV-2/pangolin/Guangxi/P5L/2017__EPI_ISL_410540 spike protein (1-1267)(P709C_P1063C)
MFVFLFVLPLVSSQCVNLTTRTGIPPGYTNSSTRGVYYPDKVFRSSILHLTQDLFLPFFSNVTWFNTINYQGGFKKFDNPVLPFNDGVYFASTEKSNIIRGWIFGTTLDARTQSLLIVNNATNVVIKVCEFQFCTDPFLGVYYHNNNKTWVENEFRVYSSANNCTFEYISQPFLMDLEGKQGNFKNLREFVFKNVDGYFKIYSKHTPIDLVRDLPRGFAALEPLVDLPIGINITRFQTLLALHRSYLTPGKLESGWTTGAAAYYVGYLQQRTFLLSYNQNGTITDAVDCSLDPLSETKCTLKSLTVEKGIYQTSNFRVQPTISIVRFPNITNLCPFGEVFNASKFASVYAWNRKRISNCVADYSVLYNSTSFSTFKCYGVSPTKLNDLCFTNVYADSFVVKGDEVRQIAPGQTGVIADYNYKLPDDFTGCVIAWNSVKQDALTGGNYGYLYRLFRKSKLKPFERDISTEIYQAGSTPCNGQVGLNCYYPLERYGFHPTTGVNYQPFRVVVLSFELLNGPATVCGPKLSTTLVKDKCVNFNFNGLTGTGVLTTSKKQFLPFQQFGRDISDTTDAVRDPQTLEILDITPCSFGGVSVITPGTNTSNQVAVLYQDVNCTEVPMAIHAEQLTPAWRVYSAGANVFQTRAGCLVGAEHVNNSYECDIPVGAGICASYHSMSSFRSVNQRSIIAYTMSLGAENSVAYSNNSIAICTNFTISVTTEILPVSMTKTSVDCTMYICGDSIECSNLLLQYGSFCTQLNRALTGIAVEQDKNTQEVFAQVKQIYKTPPIKDFGGFNFSQILPDPSKPSKRSFIEDLLFNKVTLADAGFIKQYGDCLGDIAARDLICAQKFNGLTVLPPLLTDEMIAQYTSALLAGTITSGWTFGAGAALQIPFAMQMAYRFNGIGVTQNVLYENQKLIANQFNSAIGKIQDSLSSTASALGKLQDVVNQNAQALNTLVKQLSSNFGAISSVLNDILSRLDKVEAEVQIDRLITGRLQSLQTYVTQQLIRAAEIRASANLAATKMSECVLGQSKRVDFCGKGYHLMSFPQSAPHGVVFLHVTYVCAQEKNFTTAPAICHEGKAHFPREGVFVSNGTHWFITQRNFYEPQIITTDNTFVSGSCDVVIGIVNNTVYDPLQPELDSFKEELDKYFKNHTSPDVDLGDISGINASVVNIQKEIDRLNEVAKNLNESLIDLQELGKYEQYIKWPWYIWLGFIAGLIAIIMVTIMLCCMTSCCSCLKGCCSCGSCCKFDEDDSEPVLKGVKLHYT

SEQ ID NO: 808 - protein, 1267 aa, Artificial Sequence
  SARS-CoV-2/pangolin/Guangxi/P5E/2017__EPI_ISL_410541 spike protein (1-1267)(P709C_P1063C)
MFVFLFVLPLVSSQCVNLTTRTGIPPGYTNSSTRGVYYPDKVFRSSILHLTQDLFLPFFSNVTWFNTITYQGGSKKFDNPVLPFNDGVYFASTEKSNIIRGWIFGTTLDARTQSLLIVNNATNVVIKVCEFQFCTDPFLGVYYHNNNKTWVENEFRVYSSANNCTFEYISQPFLMDLEGKQGNFKNLREFVFKNVDGYFKIYSKHTPIDLVRDLPRGFAALEPLVDLPIGINITRFQTLLALHRSYLTPGKLESGWTTGAAAYYVGYLQQRTFLLSYNQNGTITDAVDCSLDPLSETKCTLKSLTVEKGIYQTSNFRVQPTISIVRFPNITNLCPFGEVFNASKFASVYAWNRKRISNCVADYSVLYNSTSFSTFKCYGVSPTKLNDLCFTNVYADSFVVKGDEVRQIAPGQTGVIADYNYKLPDDFTGCVIAWNSVKQDALTGDNYGYLYRLFRKSKLKPFERDISTEIYQAGSTPCNGQVGLNCYYPLERYGFHPTTGVNYQPFRVVVLSFELLNGPATVCGPKLSTTLVKDKCVNFNFNGLTGTGVLTTSKKQFLPFQQFGRDISDTTDAVRDPQTLEILDITPCSFGGVSVITPGTNTSNQVAVLYQDVNCTEVPMAIHAEQLTPAWRVYSAGANVFQTRAGCLVGAEHVNNSYECDIPVGAGICASYHSMSSFRSVNQRSIIAYTMSLGAENSVAYSNNSIAICTNFTISVTTEILPVSMTKTSVDCTMYICGDSIECSNLLLQYGSFCTQLNRALTGIAVEQDKNTQEVFAQVKQIYKTPPIKDFGGFNFSQILPDPSKPSKRSFIEDLLFNKVTLADAGFIKQYGDCLGDIAARDLICAQKFNGLTVLPPLLTDEMIAQYTSALLAGTITSGWTFGAGAALQIPFAMQMAYRFNGIGVTQNVLYENQKLIANQFNSAIGKIQDSLSSTASALGKLQDVVNQNAQALNTLVKQLSSNFGAISSVLNDILSRLDKVEAEVQIDRLITGRLQSLQTYVTQQLIRAAEIRASANLAATKMSECVLGQSKRVDFCGKGYHLMSFPQSAPHGVVFLHVTYVCAQEKNFTTAPAICHEGKAHFPREGVFVSNGTHWFITQRNFYEPQIITTDNTFVSGSCDVVIGIVNNTVYDPLQPELDSFKEELDKYFKNHTSPDVDLGDISGINASVVNIQKEIDRLNEVAKNLNESLIDLQELGKYEQYIKWPWYIWLGFIAGLIAIIMVTIMLCCMTSCCSCLKGCCSCGSCCKFDEDDSEPVLKGVKLHYT

SEQ ID NO: 809 - protein, 1265 aa, Artificial Sequence
  SARS-CoV-2/pangolin/Guangxi/P1E/2017__EPI_ISL_410539 spike protein (1-1265)(P707C_P1061C)
MFVFLFVLPLVSSQCVNLTTRTGIQPGYTNSSTRGVYYPDKVFRSSILHLTQDLFLPFFSNVTWFNTINYQGGFKKFDNPVLPFNDGVYFASTEKSNIIRGWIFGTTLDARTQSLLIVNNATNVVIKVCEFQFCTDPFLGVYYHNNNKTWVENEFRVYSSANNCTFEYISQPFLMDLEGKQGNFKNLREFVFKNVDGYFKIYSKHTPIDLVRDLPRGFAALEPLVDLPIGINITRFQTLLALHRSYLTPGKLESGWTTGAAAYYVGYLQQRTFLLSYNQNGTITDAVDCSLDPLSETKCTLKSLTVEKGIYQTSNFRVQPTISIVRFPNITNLCPFGEVFNASKFASVYAWNRKRISNCVADYSVLYNSTSFSTFKCYGVSPTKLNDLCFTNVYADSFVVKGDEVRQIAPGQTGVIADYNYKLPDDFTGCVIAWNSVKQDALTGGNYLYRLFRKSKLKPFERDISTEIYQAGSTPCNGQVGLNCYYPLERYGFHPTTGVNYQPFRVVVLSFELLNGPATVCGPKLSTTLVKDKCVNFNFNGLTGTGVLTTSKKQFLPFQQFGRDISDTTDAVRDPQTLEILDITPCSFGGVSVITPGTNTSNQVAVLYQDVNCTEVPMAIHAEQLTPAWRVYSAGANVFQTRAGCLVGAEHVNNSYECDIPVGAGICASYHSMSSLRSVNQRSIIAYTMSLGAENSVAYSNNSIAICTNFTISVTTEILPVSMTKTSVDCTMYICGDSIECSNLLLQYGSFCTQLNRALTGIAVEQDKNTQEVFAQVKQIYKTPPIKDFGGFNFSQILPDPSKPSKRSFIEDLLFNKVTLADAGFIKQYGDCLGDIAARDLICAQKFNGLTVLPPLLTDEMIAQYTSALLAGTITSGWTFGAGAALQIPFAMQMAYRFNGIGVTQNVLYENQKLIANQFNSAIGKIQDSLSSTASALGKLQDVVNQNAQALNTLVKQLSSNFGAISSVLNDILSRLDKVEAEVQIDRLITGRLQSLQTYVTQQLIRAAEIRASANLAATKMSECVLGQSKRVDFCGKGYHLMSFPQSAPHGVVFLHVTYVCAQEKNFTTAPAICHEGKAHFPREGVFVSNGTHWFITQRNFYEPQIITTDNTFVSGSCDVVIGIVNNTVYDPLQPELDSFKEELDKYFKNHTSPDVDLGDISGINASVVNIQKEIDRLNEVAKNLNESLIDLQELGKYEQYIKWPWYIWLGFIAGLIAIIMVTIMLCCMTSCCSCLKGCCSCGSCCKFDEDDSEPVLKGVKLHYT

SEQ ID NO: 810 - protein, 1273 aa, Artificial Sequence; identical to SEQ ID NO: 22
  SARS-CoV-2/Wuhan/WIV05/2019__EPI_ISL_402128 spike protein (1-1273)(G889C_L1034C)

SEQ ID NO: 811 - protein, 1269 aa, Artificial Sequence
  SARS-CoV-2/bat/Yunnan/RaTG13/2013__EPI_ISL_402131 spike protein (1-1269)(G885C_L1030C)
MFVFLVLLPLVSSQCVNLTTRTQLPPAYTNSSTRGVYYPDKVFRSSVLHLTQDLFLPFFSNVTWFHAIHVSGTNGIKRFDNPVLPFNDGVYFASTEKSNIIRGWIFGTTLDSKTQSLLIVNNATNVVIKVCEFQFCNDPFLGVYYHKNNKSWMESEFRVYSSANNCTFEYVSQPFLMDLEGKQGNFKNLREFVFKNIDGYFKIYSKHTPINLVRDLPPGFSALEPLVDLPIGINITRFQTLLALHRSYLTPGDSSSGWTAGAAAYYVGYLQPRTFLLKYNENGTITDAVDCALDPLSETKCTLKSFTVEKGIYQTSNFRVQPTDSIVRFPNITNLCPFGEVFNATTFASVYAWNRKRISNCVADYSVLYNSTSFSTFKCYGVSPTKLNDLCFTNVYADSFVITGDEVRQIAPGQTGKIADYNYKLPDDFTGCVIAWNSKHIDAKEGGNFNYLYRLFRKANLKPFERDISTEIYQAGSKPCNGQTGLNCYYPLYRYGFYPTDGVGHQPYRVVVLSFELLNAPATVCGPKKSTNLVKNKCVNFNFNGLTGTGVLTESNKKFLPFQQFGRDIADTTDAVRDPQTLEILDITPCSFGGVSVITPGTNASNQVAVLYQDVNCTEVPVAIHADQLTPTWRVYSTGSNVFQTRAGCLIGAEHVNNSYECDIPIGAGICASYQTQTNSRSVASQSIIAYTMSLGAENSVAYSNNSIAIPTNFTISVTTEILPVSMTKTSVDCTMYICGDSTECSNLLLQYGSFCTQLNRALTGIAVEQDKNTQEVFAQVKQIYKTPPIKDFGGFNFSQILPDPSKPSKRSFIEDLLFNKVTLADAGFIKQYGDCLGDIAARDLICAQKFNGLTVLPPLLTDEMIAQYTSALLAGTITSGWTFCAGAALQIPFAMQMAYRFNGIGVTQNVLYENQKLIANQFNSAIGKIQDSLSSTASALGKLQDVVNQNAQALNTLVKQLSSNFGAISSVLNDILSRLDKVEAEVQIDRLITGRLQSLQTYVTQQLIRAAEIRASANLAATKMSECVCGQSKRVDFCGKGYHLMSFPQSAPHGVVFLHVTYVPAQEKNFTTAPAICHDGKAHFPREGVFVSNGTHWFVTQRNFYEPQIITTDNTFVSGSCDVVIGIVNNTVYDPLQPELDSFKEELDKYFKNHTSPDVDLGDISGINASVVNIQKEIDRLNEVAKNLNESLIDLQELGKYEQYIKWPWYIWLGFIAGLIAIIMVTIMLCCMTSCCSCLKGCCSCGSCCKFDEDDSEPVLKGVKLHYT

SEQ ID NO: 812 - protein, 1273 aa, Artificial Sequence
  SARS-CoV-2/Wuhan/HBCDC-HB-01/2019__EPI_ISL_402132 spike protein (1-1273)(G889C_L1034C)
MFVFLVLLPLVSSQCVNLTTRTQLPPAYTNSITRGVYYPDKVFRSSVLHSTQDLFLPFFSNVTWFHAIHVSGTNGTKRFDNPVLPFNDGVYFASTEKSNIIRGWIFGTTLDSKTQSLLIVNNATNVVIKVCEFQFCNDPFLGVYYHKNNKSWMESEFRVYSSANNCTFEYVSQPFLMDLEGKQGNFKNLREFVFKNIDGYFKIYSKHTPINLVRDLPQGFSALEPLVDLPIGINITRFQTLLALHRSYLTPGDSSSGWTAGAAAYYVGYLQPRTFLLKYNENGTITDAVDCALDPLSETKCTLKSFTVEKGIYQTSNFRVQPTESIVRFPNITNLCPFGEVFNATRFASVYAWNRKRISNCVADYSVLYNSASFSTFKCYGVSPTKLNDLCFTNVYADSFVIRGDEVRQIAPGQTGKIADYNYKLPDDFTGCVIAWNSNNLDSKVGGNYNYLYRLFRKSNLKPFERDISTEIYQAGSTPCNGVEGFNCYFPLQSYGFQPTNGVGYQPYRVVVLSFELLHAPATVCGPKKSTNLVKNKCVNFNFNGLTGTGVLTESNKKFLPFQQFGRDIADTTDAVRDPQTLEILDITPCSFGGVSVITPGTNTSNQVAVLYQDVNCTEVPVAIHADQLTPTWRVYSTGSNVFQTRAGCLIGAEHVNNSYECDIPIGAGICASYQTQTNSPRRARSVASQSIIAYTMSLGAENSVAYSNNSIAIPTNFTISVTTEILPVSMTKTSVDCTMYICGDSTECSNLLLQYGSFCTQLNRALTGIAVEQDKNTQEVFAQVKQIYKTPPIKDFGGFNFSQILPDPSKPSKRSFIEDLLFNKVTLADAGFIKQYGDCLGDIAARDLICAQKFNGLTVLPPLLTDEMIAQYTSALLAGTITSGWTFCAGAALQIPFAMQMAYRFNGIGVTQNVLYENQKLIANQFNSAIGKIQDSLSSTASALGKLQDVVNQNAQALNTLVKQLSSNFGAISSVLNDILSRLDKVEAEVQIDRLITGRLQSLQTYVTQQLIRAAEIRASANLAATKMSECVCGQSKRVDFCGKGYHLMSFPQSAPHGVVFLHVTYVPAQEKNFTTAPAICHDGKAHFPREGVFVSNGTHWFVTQRNFYEPQIITTDNTFVSGNCDVVIGIVNNTVYDPLQPELDSFKEELDKYFKNHTSPDVDLGDISGINASVVNIQKEIDRLNEVAKNLNESLIDLQELGKYEQYIKWPWYIWLGFIAGLIAIVMVTIMLCCMTSCCSCLKGCCSCGSCCKFDEDDSEPVLKGVKLHYT

SEQ ID NO: 813 - protein, 1273 aa, Artificial Sequence
  SARS-CoV-2/Guangdong/20SF028/2020__EPI_ISL_403936 spike protein (1-1273)(G889C_L1034C)
MFVFLVLLPLVSSQCVNLTTRTQLPPAYTNSFTRGVYYPDKVFRSSVLYSTQDLFLPFFSNVTWFHAIHVSGTNGTKRFDNPVLPFNDGVYFASTEKSNIIRGWIFGTTLDSKTQSLLIVNNATNVVIKVCEFQFCNDPFLGVYYHKNNKSWMESEFRVYSSANNCTFEYVSQPFLMDLEGKQGNFKNLREFVFKNIDGYFKIYSKHTPINLVRDLPQGFSALEPLVDLPIGINITRFQTLLALHRSYLTPGDSSSGWTAGAAAYYVGYLQPRTFLLKYNENGTITDAVDCALDPLSETKCTLKSFTVEKGIYQTSNFRVQPTESIVRFPNITNLCPFGEVFNATRFASVYAWNRKRISNCVADYSVLYNSASFSTFKCYGVSPTKLNDLCFTNVYADSFVIRGDEVRQIAPGQTGKIADYNYKLPDDFTGCVIAWNSNNLDSKVGGNYNYLYRLFRKSNLKPFERDISTEIYQAGSTPCNGVEGFNCYFPLQSYGFQPTNGVGYQPYRVVVLSFELLHAPATVCGPKKSTNLVKNKCVNFNFNGLTGTGVLTESNKKFLPFQQFGRDIADTTDAVRDPQTLEILDITPCSFGGVSVITPGTNTSNQVAVLYQDVNCTEVPVAIHADQLTPTWRVYSTGSNVFQTRAGCLIGAEHVNNSYECDIPIGAGICASYQTQTNSPRRARSVASQSIIAYTMSLGAENSVAYSNNSIAIPTNFTISVTTEILPVSMTKTSVDCTMYICGDSTECSNLLLQYGSFCTQLNRALTGIAVEQDKNTQEVFAQVKQIYKTPPIKDFGGFNFSQILPDPSKPSKRSFIEDLLFNKVTLADAGFIKQYGDCLGDIAARDLICAQKFNGLTVLPPLLTDEMIAQYTSALLAGTITSGWTFCAGAALQIPFAMQMAYRFNGIGVTQNVLYENQKLIANQFNSAIGKIQDSLSSTASALGKLQDVVNQNAQALNTLVKQLSSNFGAISSVLNDILSRLDKVEAEVQIDRLITGRLQSLQTYVTQQLIRAAEIRASANLAATKMSECVCGQSKRVDFCGKGYHLMSFPQSAPHGVVFLHVTYVPAQEKNFTTAPAICHDGKAHFPREGVFVSNGTHWFVTQRNFYEPQIITTDNTFVSGNCDVVIGIVNNTVYDPLQPELDSFKEELDKYFKNHTSPDVDLGDISGINASVVNIQKEIDRLNEVAKNLNESLIDLQELGKYEQYIKWPWYIWLGFIAGLIAIVMVTIMLCCMTSCCSCLKGCCSCGSCCKFDEDDSEPVLKGVKLHYT

SEQ ID NO: 814 - protein, 1273 aa, Artificial Sequence
  SARS-CoV-2/Shenzhen/SZTH-001/2020__EPI_ISL_406592 spike protein (1-1273)(G889C_L1034C)
MFVFLVLLPLVSSQCVNLTTRTQLPPAYTNSFTRGVYYPDKVFRSSVLHSTQDLFLPFFSNVTWFHAIHVSGTNGTKRFDNPVLPFNDGVYFASTEKSNIIRGWIFGTTLDSKTQSLLIVNNATNVVIKVCEFQFCNDPFLGVYYHKNNKSWMESEFRVYSSANNCTFEYVSQPFLMDLEGKQGNFKNLREFVFKNIDGYFKIYSKHTPINLVRDLPQGFSALEPLVDLPIGINITRFQTLLALHRSYLTPGDSSSGWTAGAAAYYVGYLQPRTFLLKYNENGTITDAVDCALDPLSETKCTLKSFTVEKGIYQTSNFRVQPTESIVRFPNITNLCPFGEVFNATRFASVYAWNRKRISNCVADYSVLYNSASFSTFKCYGVSPTKLNDLCFTNVYADSFVIRGDEVRQIAPGQTGKIADYNYKLPDDFTGCVIAWNSNNLDSKVGGNYNYLYRLFRKSNLKPFERDISTEIYQAGSTPCNGVEGFNCYFPLQSYGFQPTNGVGYQPYRVVVLSFELLHAPATVCGPKKSTNLVKNKCVNFNFNGLTGTGVLTESNKKFLPFQQFGRDIADTTDAVRDPQTLEILDITPCSFGGVSVITPGTNTSNQVAVLYQDVNCTEVPVAIHADQLTPTWRVYSTGSNVFQTRAGCLIGAEHVNNSYECDIPIGAGICASYQTQTNSPRRARSVASQSIIAYTMSLGAENSVAYSNNSIAIPTNFTISVTTEILPVSMTKTSVDCTMYICGDSTECSNLLLQYGSFCTQLNRALTGIAVEQDKNTQEVFAQVKQIYKTPPIKDFGGFNFSQILPDPSKPSKRSFIEDLLFNKVTLADAGFIKQYGDCLGDIAARDLICAQKFNGLTVLPPLLTDEMIAQYTSALLAGTITSGWTFCAGAALQIPFAMQMAYRFNGIGVTQNVLYENQKLIANQFNSAIGKIQDSLSSTASALGKLQDVVNQNAQALNTLVKQLSSNFGAISSVLNDILSRLDKVEAEVQIDRLITGRLQSLQTYVTQQLIRAAEIRASANLAATKMSECVCGQSKRVDFCGKGYHLMSFPQSAPHGVVFLHVTYVPAQEKNFTTAPAICHDGKAHFPREGVFVSNGTHWFVTQRNFYEPQIITTDNTFVSGNCDVLIGIVNNTVYDPLQPELDSFKEELDKYFKNHTSPDVDLGDISGINASVVNIQKEIDRLNEVAKNLNESLIDLQELGKYEQYIKWPWYIWLGFIAGLIAIVMVTIMLCCMTSCCSCLKGCCSCGSCCKFDEDDSGPVLKGVKLHYT

SEQ ID NO: 815 - protein, 1273 aa, Artificial Sequence
  SARS-CoV-2/Shenzhen/SZTH-004/2020__EPI_ISL_406595 spike protein (1-1273)(G889C_L1034C)
MFVFLVLLPLVSSQCVNLTTRTQLPPAYTNSFTRGVYYPDKVFRSSVLHSTQDLFLPFFSNVTWFHAIHVSGTNGTKRFDNPVLPFNDGVYFASTEKSNIIRGWIFGTTLDSKTQSLLIVNNATNVVIKVCEFQFCNDPFLGVYYHKNNKSWMESEFRVYSSANNCTFEYVSQPFLMDLEGKQGNFKNLREFVFKNIDGYFKIYSKHTPINLVRDLPQGFSALEPLVDLPIGINITRFQTLLALHRSYLTPGDSSSGWTAGAAAYYVGYLQPRTFLLKYNENGTITDAVDCALDPLSETKCTLKSFTVEKGIYQTSNFRVQPTESIVRFPNITNLCPFGEVFNATRFASVYAWDRKRISNCVAYYSVLYNSASFSTFKCYGVSPTKLNDLCFTNVYADSFVIRGDEVRQIAPGQTGKIADYNYKLPDDFTGCVIAWNSNNLDSKVGGNYNYLYRLFRKSNLKPFERDISTEIYQAGSTPCNGVEGFNCYFPLQSYGFQPTNGVGYQPYRVVVLSFELLHAPATVCGPKKSTNLVKNKCVNFNFNGLTGTGVLTESNKKFLPFQQFGRDIADTTDAVRDPQTLEILDITPCSFGGVSVITPGTNTSNQVAVLYQDVNCTEVPVAIHADQLTPTWRVYSTGSNVFQTRAGCLIGAEHVNNSYECDIPIGAGICASYQTQTNSPRRARSVASQSIIAYTMSLGAENSVAYSNNSIAIPTNFTISVTTEILPVSMTKTSVDCTMYICGDSTECSNLLLQYGSFCTQLNRALTGIAVEQDKNTQEVFAQVKQIYKTPPIKDFGGFNFSQILPDPSKPSKRSFIEDLLFNKVTLADAGFIKQYGDCLGDIAARDLICAQKFNGLTVLPPLLTDEMIAQYTSALLAGTITSGWTFCAGAALQIPFAMQMAYRFNGIGVTQNVLYENQKLIANQFNSAIGKIQDSLSSTASALGKLQDVVNQNAQALNTLVKQLSSNFGAISSVLNDILSRLDKVEAEVQIDRLITGRLQSLQTYVTQQLIRAAEIRASANLAATKMSECVCGQSKRVDFCGKGYHLMSFPQSAPHGVVFLHVTYVPAQEKNFTTAPAICHDGKAHFPREGVFVSNGTHWFVTQRNFYEPQIITTDNTFVSGNCDVVIGIVNNTVYDPLQPELDSFKEELDKYFKNHTSPDVDLGDISGINASVVNIQKEIDRLNEVAKNLNESLIDLQELGKYEQYIKWPWYIWLGFIAGLIAIVMVTIMLCCMTSCCSCLKGCCSCGSCCKFDEDDSEPVLKGVKLHYT

SEQ ID NO: 816 - protein, 1273 aa, Artificial Sequence
  SARS-CoV-2/France/IDF0372/2020__EPI_ISL_406596 spike protein (1-1273)(G889C_L1034C)
MFVFLVLLPLVSSQCVNLTTRTQLPPAYTNSFTRGVYYPDKVFRSSVLHSTQDLFLPFFSNVTWFHAIHVSGTNGTKRFDNPVLPFNDGVYFASTEKSNIIRGWIFGTTLDSKTQSLLIVNNATNVVIKVCEFQFCNDPFLGVYYHKNNKSWMESEFRVYSSANNCTFEYVSQPFLMDLEGKQGNFKNLREFVFKNIDGYFKIYSKHTPINLVRDLPQGFSALEPLVDLPIGINITRFQTLLALHRSYLTPGDSSSGWTAGAAAYYVGYLQPRTFLLKYNENGTITDAVDCALDPLSETKCTLKSFTVEKGIYQTSNFRVQPTESIVRFPNITNLCPFGEVFNATRFASVYAWNRKRISNCVADYSFLYNSASFSTFKCYGVSPTKLNDLCFTNVYADSFVIRGDEVRQIAPGQTGKIADYNYKLPDDFTGCVIAWNSNNLDSKVGGNYNYLYRLFRKSNLKPFERDISTEIYQAGSTPCNGVEGFNCYFPLQSYGFQPTNGVGYQPYRVVVLSFELLHAPATVCGPKKSTNLVKNKCVNFNFNGLTGTGVLTESNKKFLPFQQFGRDIADTTDAVRDPQTLEILDITPCSFGGVSVITPGTNTSNQVAVLYQDVNCTEVPVAIHADQLTPTWRVYSTGSNVFQTRAGCLIGAEHVNNSYECDIPIGAGICASYQTQTNSPRRARSVASQSIIAYTMSLGAENSVAYSNNSIAIPTNFTISVTTEILPVSMTKTSVDCTMYICGDSTECSNLLLQYGSFCTQLNRALTGIAVEQDKNTQEVFAQVKQIYKTPPIKDFGGFNFSQILPDPSKPSKRSFIEDLLFNKVTLADAGFIKQYGDCLGDIAARDLICAQKFNGLTVLPPLLTDEMIAQYTSALLAGTITSGWTFCAGAALQIPFAMQMAYRFNGIGVTQNVLYENQKLIANQFNSAIGKIQDSLSSTASALGKLQDVVNQNAQALNTLVKQLSSNFGAISSVLNDILSRLDKVEAEVQIDRLITGRLQSLQTYVTQQLIRAAEIRASANLAATKMSECVCGQSKRVDFCGKGYHLMSFPQSAPHGVVFLHVTYVPAQEKNFTTAPAICHDGKAHFPREGVFVSNGTHWFVTQRNFYEPQIITTDNTFVSGNCDVVIGIVNNTVYDPLQPELDSFKEELDKYFKNHTSPDVDLGDISGINASVVNIQKEIDRLNEVAKNLNESLIDLQELGKYEQYIKWPWYIWLGFIAGLIAIVMVTIMLCCMTSCCSCLKGCCSCGSCCKFDEDDSEPVLKGVKLHYT

SEQ ID NO: 817 - protein, 1273 aa, Artificial Sequence
  SARS-CoV-2/Australia/VIC01/2020__EPI_ISL_406844 spike protein (1-1273)(G889C_L1034C)
MFVFLVLLPLVSSQCVNLTTRTQLPPAYTNSFTRGVYYPDKVFRSSVLHSTQDLFLPFFSNVTWFHAIHVSGTNGTKRFDNPVLPFNDGVYFASTEKSNIIRGWIFGTTLDSKTQSLLIVNNATNVVIKVCEFQFCNDPFLGVYYHKNNKSWMESEFRVYSSANNCTFEYVSQPFLMDLEGKQGNFKNLREFVFKNIDGYFKIYSKHTPINLVRDLPQGFSALEPLVDLPIGINITRFQTLLALHRRYLTPGDSSSGWTAGAAAYYVGYLQPRTFLLKYNENGTITDAVDCALDPLSETKCTLKSFTVEKGIYQTSNFRVQPTESIVRFPNITNLCPFGEVFNATRFASVYAWNRKRISNCVADYSVLYNSASFSTFKCYGVSPTKLNDLCFTNVYADSFVIRGDEVRQIAPGQTGKIADYNYKLPDDFTGCVIAWNSNNLDSKVGGNYNYLYRLFRKSNLKPFERDISTEIYQAGSTPCNGVEGFNCYFPLQSYGFQPTNGVGYQPYRVVVLSFELLHAPATVCGPKKSTNLVKNKCVNFNFNGLTGTGVLTESNKKFLPFQQFGRDIADTTDAVRDPQTLEILDITPCSFGGVSVITPGTNTSNQVAVLYQDVNCTEVPVAIHADQLTPTWRVYSTGSNVFQTRAGCLIGAEHVNNSYECDIPIGAGICASYQTQTNSPRRARSVASQSIIAYTMSLGAENSVAYSNNSIAIPTNFTISVTTEILPVSMTKTSVDCTMYICGDSTECSNLLLQYGSFCTQLNRALTGIAVEQDKNTQEVFAQVKQIYKTPPIKDFGGFNFSQILPDPSKPSKRSFIEDLLFNKVTLADAGFIKQYGDCLGDIAARDLICAQKFNGLTVLPPLLTDEMIAQYTSALLAGTITSGWTFCAGAALQIPFAMQMAYRFNGIGVTQNVLYENQKLIANQFNSAIGKIQDSLSSTASALGKLQDVVNQNAQALNTLVKQLSSNFGAISSVLNDILSRLDKVEAEVQIDRLITGRLQSLQTYVTQQLIRAAEIRASANLAATKMSECVCGQSKRVDFCGKGYHLMSFPQSAPHGVVFLHVTYVPAQEKNFTTAPAICHDGKAHFPREGVFVSNGTHWFVTQRNFYEPQIITTDNTFVSGNCDVVIGIVNNTVYDPLQPELDSFKEELDKYFKNHTSPDVDLGDISGINASVVNIQKEIDRLNEVAKNLNESLIDLQELGKYEQYIKWPWYIWLGFIAGLIAIVMVTIMLCCMTSCCSCLKGCCSCGSCCKFDEDDSEPVLKGVKLHYT

SEQ ID NO: 818 - protein, 1273 aa, Artificial Sequence
  SARS-CoV-2/Germany/BavPat1/2020__EPI_ISL_406862 spike protein (1-1273)(G889C_L1034C)
MFVFLVLLPLVSSQCVNLTTRTQLPPAYTNSFTRGVYYPDKVFRSSVLHSTQDLFLPFFSNVTWFHAIHVSGTNGTKRFDNPVLPFNDGVYFASTEKSNIIRGWIFGTTLDSKTQSLLIVNNATNVVIKVCEFQFCNDPFLGVYYHKNNKSWMESEFRVYSSANNCTFEYVSQPFLMDLEGKQGNFKNLREFVFKNIDGYFKIYSKHTPINLVRDLPQGFSALEPLVDLPIGINITRFQTLLALHRSYLTPGDSSSGWTAGAAAYYVGYLQPRTFLLKYNENGTITDAVDCALDPLSETKCTLKSFTVEKGIYQTSNFRVQPTESIVRFPNITNLCPFGEVFNATRFASVYAWNRKRISNCVADYSVLYNSASFSTFKCYGVSPTKLNDLCFTNVYADSFVIRGDEVRQIAPGQTGKIADYNYKLPDDFTGCVIAWNSNNLDSKVGGNYNYLYRLFRKSNLKPFERDISTEIYQAGSTPCNGVEGFNCYFPLQSYGFQPTNGVGYQPYRVVVLSFELLHAPATVCGPKKSTNLVKNKCVNFNFNGLTGTGVLTESNKKFLPFQQFGRDIADTTDAVRDPQTLEILDITPCSFGGVSVITPGTNTSNQVAVLYQGVNCTEVPVAIHADQLTPTWRVYSTGSNVFQTRAGCLIGAEHVNNSYECDIPIGAGICASYQTQTNSPRRARSVASQSIIAYTMSLGAENSVAYSNNSIAIPTNFTISVTTEILPVSMTKTSVDCTMYICGDSTECSNLLLQYGSFCTQLNRALTGIAVEQDKNTQEVFAQVKQIYKTPPIKDFGGFNFSQILPDPSKPSKRSFIEDLLFNKVTLADAGFIKQYGDCLGDIAARDLICAQKFNGLTVLPPLLTDEMIAQYTSALLAGTITSGWTFCAGAALQIPFAMQMAYRFNGIGVTQNVLYENQKLIANQFNSAIGKIQDSLSSTASALGKLQDVVNQNAQALNTLVKQLSSNFGAISSVLNDILSRLDKVEAEVQIDRLITGRLQSLQTYVTQQLIRAAEIRASANLAATKMSECVCGQSKRVDFCGKGYHLMSFPQSAPHGVVFLHVTYVPAQEKNFTTAPAICHDGKAHFPREGVFVSNGTHWFVTQRNFYEPQIITTDNTFVSGNCDVVIGIVNNTVYDPLQPELDSFKEELDKYFKNHTSPDVDLGDISGINASVVNIQKEIDRLNEVAKNLNESLIDLQELGKYEQYIKWPWYIWLGFIAGLIAIVMVTIMLCCMTSCCSCLKGCCSCGSCCKFDEDDSEPVLKGVKLHYT

SEQ ID NO: 819 - protein, 1273 aa, Artificial Sequence
  SARS-CoV-2/Wuhan/HBCDC-HB-02/2020__EPI_ISL_412978 spike protein (1-1273)(G889C_L1034C)
MFVFLVLLPLVSSQCVNLTTRTQLPPAYTNSFTRGVYYPDKVFRSSVLHSTQDLFLPFFSNVTWFHAIHVSGTNGTKRFDNPVLPFNDGVYFASTEKSNIIRGWIFGTTLDSKTQSLLIVNNATNVVIKVCEFQFCNDPFLGVYYHKNNKSWMESEFRVYSSANNCTFEYVSQPFLMDLEGKQGNFKNLREFVFKNIDGYFKIYSKHTPINLVRDLPQGFSALEPLVDLPIGINITRFQTLLALHRSYLTPGDSSSGWTAGAAAYYVGYLQPRTFLLKYNENGTITDAVDCALDPLSETKCTLKSFTVEKGIYQTSNFRVQPTESIVRFPNITNLCPFGEVFNATRFASVYAWNRKRISNCVADYSVLYNSASFSTFKCYGVSPTKLNDLCFTNVYADSFVIRGDEVRQIAPGQTGKIADYNYKLPDDFTGCVIAWNSNNLDSKVGGNYNYLYRLFRKSNLKPFERDISTEIYQAGSTPCNGVEGFNCYFPLQSYGFQPTNGVGYQPYRVVVLSFELLHAPATVCGPKKSTNLVKNKCVNFNFNGLTGTGVLTESNKKFLPFQQFGRDIADTTDAVRDPQTLEILDITPCSFGGVSVITPGTNTSNQVAVLYQDVNCTEVPVAIHADQLTPTWRVYSTGSNVFQTRAGCLIGAEHVNNSYECDIPIGAGICASYQTQTNSPRRARSVASQSIIAYTMSLGAENSVAYSNNSIAIPTNFTISVTTEILPVSMTKTSVDCTMYICGDSTECSNFLLQYGSFCTQLNRALTGIAVEQDKNTQEVFAQVKQIYKTPPIKDFGGFNFSQILPDPSKPSKRSFIEDLLFNKVTLADAGFIKQYGDCLGDIAARDLICAQKFNGLTVLPPLLTDEMIAQYTSALLAGTITSGWTFCAGAALQIPFAMQMAYRFNGIGVTQNVLYENQKLIANQFNSAIGKIQDSLSSTASALGKLQDVVNQNAQALNTLVKQLSSNFGAISSVLNDILSRLDKVEAEVQIDRLITGRLQSLQTYVTQQLIRAAEIRASANLAATKMSECVCGQSKRVDFCGKGYHLMSFPQSAPHGVVFLHVTYVPAQEKNFTTAPAICHDGKAHFPREGVFVSNGTHWFVTQRNFYEPQIITTDNTFVSGNCDVVIGIVNNTVYDPLQPELDSFKEELDKYFKNHTSPDVDLGDISGINASVVNIQKEIDRLNEVAKNLNESLIDLQELGKYEQYIKWPWYIWLGFIAGLIAIVMVTIMLCCMTSCCSCLKGCCSCGSCCKFDEDDSEPVLKGVKLHYT

SEQ ID NO: 820 - protein, 1273 aa, Artificial Sequence
  SARS-CoV-2/Australia/QLD02/2020__EPI_ISL_407896 spike protein (1-1273)(G889C_L1034C)
MFVFLVLLPLVSSQCVNLTTRTQLPPAYTNSFTRGVYYPDKVFRSSVLHSTQDLFLPFFSNVTWFHAIHVSGTNGTKRFDNPVLPFNDGVYFASTEKSNIIRGWIFGTTLDSKTQSLLIVNNATNVVIKVCEFQFCNDPFLGVYYHKNNKSWMESEFRVYSSANNCTFEYVSQPFLMDLEGKQGNFKNLREFVFKNIDGYFKIYSKHTPINLVRDLPQGFSALEPLVDLPIGINITRFQTLLALHRSYLTPGDSSSGWTAGAAAYYVGYLQPRTFLLKYNENGTITDAVDCALDPLSETKCTLKSFTVEKGIYQTSNFRVQPTESIVRFPNITNLCPFGEVFNATRFASVYAWNRKRISNCVADYSVLYNSASFSTFKCYGVSPTKLNDLCFTNVYADSFVIRGDEVRQIAPGQTGKIADYNYKLPDDFTGCVIAWNSNNLDSKVGGNYNYLYRLFRKSNLKPFERDISTEIYQAGSTPCNGVEGFNCYFPLQSYGFQPTNGVGYQPYRVVVLSFELLHAPATVCGPKKSTNLVKNKCVNFNFNGLTGTGVLTESNKKFLPFQQFGRDIADTTDAVRDPQTLEILDITPCSFGGVSVITPGTNTSNQVAVLYQDVNCTEVPVAIHADQLTPTWRVYSTGSNVFQTRAGCLIGAEHVNNSYECDIPIGAGICASYQTQTNSPRRARSVASQSIIAYTMSLGAENSVAYSNNSIAIPTNFTISVTTEILPVSMTKTSVDCTMYICGDSTECSNLLLQYGSFCTQLNRALTGIAVEQDKNTQEVFAQVKQIYKTPPIKDFGGFNFSQILPDPSKPSKRSFIEDLLFNKVTLADAGFIKQYGDCLGDIAARDLICAQKFNGLTVLPPLLTDEMIAQYTSALLAGTITSGWTFCAGAALQIPFAMQMAYRFNGIGVTQNVLYENQKLIANQFNSAIGKIQDSLSSTASALGKLQDVVNQNAQALNTLVKQLSSNFGAISSVLNDILSRLDKVEAEVQIDRLITGRLQSLQTYVTQQLIRAAEIRASANLAATKMSECVCGQSKRVDFCGKGYHLMSFPQSAPHGVVFLHVTYVPAQEKNFTTAPAICHDGKAHFPREGVFVSNGTHWFVTQRNFYEPQIITTDNTFVSGNCDVVIGIVNNTVYDPLQLELDSFKEELDKYFKNHTSPDVDLGDISGINASVVNIQKEIDRLNEVAKNLNESLIDLQELGKYEQYIKWPWYIWLGFIAGLIAIVMVTIMLCCMTSCCSCLKGCCSCGSCCKFDEDDSEPVLKGVKLHYT

SEQ ID NO: 821 - protein, 1273 aa, Artificial Sequence
  SARS-CoV-2/India/1-31/2020__EPI_ISL_413523 spike protein (1-1273)(G889C_L1034C)
MFVFLVLLPLVSSQCVNLTTRTQLPPAYTNSFTRGVYYPDKVFRSSVLHSTQDLFLPFFSNVTWFHAIHVSGTNGTKRFDNPVLPFNDGVYFASTEKSNIIRGWIFGTTLDSKTQSLLIVNNATNVVIKVCEFQFCNDPFLGVYYHKNNKSWMESEFRVYSSANNCTFEYVSQPFLMDLEGKQGNFKNLREFVFKNIDGYFKIYSKHTPINLVRDLPQGFSALEPLVDLPIGINITRFQTLLALHRSYLTPGDSSSGWTAGAAAYYVGYLQPRTFLLKYNENGTITDAVDCALDPLSETKCTLKSFTVEKGIYQTSNFRVQPTESIVRFPNITNLCPFGEVFNATRFASVYAWNRKRISNCVADYSVLYNSASFSTFKCYGVSPTKLNDLCFTNVYADSFVIRGDEVRQIAPGQTGKIADYNYKLPDDFTGCVIAWNSNNLDSKVGGNYNYLYRLFRKSNLKPFERDISTEIYQAGSTPCNGVEGFNCYFPLQSYGFQPTNGVGYQPYRVVVLSFELLHAPATVCGPKKSTNLVKNKCVNFNFNGLTGTGVLTESNKKFLPFQQFGRDIADTTDAVRDPQTLEILDITPCSFGGVSVITPGTNTSNQVAVLYQDVNCTEVPVAIHADQLTPTWRVYSTGSNVFQTRAGCLIGAEHVNNSYECDIPIGAGICASYQTQTNSPRRARSVASQSIIAYTMSLGAENSVAYSNNSIAIPTNFTISVTTEILPVSMTKTSVDCTMYICGDSTECSNLLLQYGSFCTQLNRALTGIAVEQDKNTQEVFAQVKQIYKTPPIKDFGGFNFSQILPDPSKPSKRSFIEDLLFNKVTLADAGFIKQYGDCLGDIAARDLICAQKFNGLTVLPPLLTDEMIAQYTSALLAGTITSGWTFCAGAALQIPFAMQMAYRFNGIGVTQNVLYENQKLIANQFNSVIGKIQDSLSSTASALGKLQDVVNQNAQALNTLVKQLSSNFGAISSVLNDILSRLDKVEAEVQIDRLITGRLQSLQTYVTQQLIRAAEIRASANLAATKMSECVCGQSKRVDFCGKGYHLMSFPQSAPHGVVFLHVTYVPAQEKNFTTAPAICHDGKAHFPREGVFVSNGTHWFVTQRNFYEPQIITTDNTFVSGNCDVVIGIVNNTVYDPLQPELDSFKEELDKYFKNHTSPDVDLGDISGINASVVNIQKEIDRLNEVAKNLNESLIDLQELGKYEQYIKWPWYIWLGFIAGLIAIVMVTIMLCCMTSCCSCLKGCCSCGSCCKFDEDDSEPVLKGVKLHYT

SEQ ID NO: 822 - protein, 1273 aa, Artificial Sequence
  SARS-CoV-2/Guangdong/GD2020087-P0008/2020__EPI_ISL_413863 spike protein (1-1273)(G889C_L1034C)
MFVFLVLLPLVSSQCVNLTTRTQLPPAYTNSFTRGVYYPDKVFRSSVLHSTQDLFLPFFSNVTWFHAIHVSGTNGTKRFDNPVLPFNDGVYFASTEKSNIIRGWIFGTTLDSKTQSLLIVNNATNVVIKVCEFQFCNDPFLGVYYHKNNKSWMESEFRVYSSANNCTFEYVSQPFLMDLEGKQGNFKNLREFVFKNIDGYFKIYSKHTPINLVRDLPQGFSALEPLVDLPIGINITRFQTLLALHRSYLTPGDSSSGWTAGAAAYYVGYLQPRTFLLKYNENGTITDAVDCALDPLSETKCTLKSFTVEKGIYQTSNFRVQPTESIVRFPNITNLCPFGEVFNATRFASVYAWNRKRISNCVADYSVLYNSASFSTFKCYGVSPTKLNDLCFTNVYADSFVIRGDEVREIAPGQTGKIADYNYKLPDDFTGCVIAWNSNNLDSKVGGNYNYLYRLFRKSNLKPFERDISTEIYQAGSTPCNGVEGFNCYFPLQSYGFQPTNGVGYQPYRVVVLSFELLHAPATVCGPKKSTNLVKNKCVNFNFNGLTGTGVLTESNKKFLPFQQFGRDIADTTDAVRDPQTLEILDITPCSFGGVSVITPGTNTSNQVAVLYQDVNCTEVPVAIHADQLTPTWRVYSTGSNVFQTRAGCLIGAEHVNNSYECDIPIGAGICASYQTQTNSPRRARSVASQSIIAYTMSLGAENSVAYSNNSIAIPTNFTISVTTEILPVSMTKTSVDCTMYICGDSTECSNLLLQYGSFCTQLNRALTGIAVEQDKNTQEVFAQVKQIYKTPPIKDFGGFNFSQILPDPSKPSKRSFIEDLLFNKVTLADAGFIKQYGDCLGDIAARDLICAQKFNGLTVLPPLLTDEMIAQYTSALLAGTITSGWTFCAGAALQIPFAMQMAYRFNGIGVTQNVLYENQKLIANQFNSAIGKIQDSLSSTASALGKLQDVVNQNAQALNTLVKQLSSNFGAISSVLNDILSRLDKVEAEVQIDRLITGRLQSLQTYVTQQLIRAAEIRASANLAATKMSECVCGQSKRVDFCGKGYHLMSFPQSAPHGVVFLHVTYVPAQEKNFTTAPAICHDGKAHFPREGVFVSNGTHWFVTQRNFYEPQIITTDNTFVSGNCDVVIGIVNNTVYDPLQPELDSFKEELDKYFKNHTSPDVDLGDISGINASVVNIQKEIDRLNEVAKNLNESLIDLQELGKYEQYIKWPWYIWLGFIAGLIAIVMVTIMLCCMTSCCSCLKGCCSCGSCCKFDEDDSEPVLKGVKLHYT

SEQ ID NO: 823 - protein, 1273 aa, Artificial Sequence
  SARS-CoV-2/Sweden/01/2020__EPI_ISL_411951 spike protein (1-1273)(G889C_L1034C)
MFVFLVLLPLVSSQCVNLTTRTQLPPAYTNSFTRGVYYPDKVFRSSVLHSTQDLFLPFFSNVTWFHAIHVSGTNGTKRFDNPVLPFNDGVYFASTEKSNIIRGWIFGTTLDSKTQSLLIVNNATNVVIKVCEFQFCNDPFLGVYYHKNNKSWMESEFRVYSSANNCTFEYVSQPFLMDLEGKQGNFKNLREFVFKNIDGYFKIYSKHTPINLVRDLPQGFSALEPLVDLPIGINITRFQTLLALHRSYLTPGDSSSGWTAGAAAYYVGYLQPRTFLLKYNENGTITDAVDCALDPLSETKCTLKSFTVEKGIYQTSNFRVQPTESIVRFPNITNLCPFGEVFNATRFASVYAWNRKRISNCVADYSVLYNSASFSTFKCYGVSPTKLNDLCFTNVYADSFVIRGDEVRQIAPGQTGKIADYNYKLPDDFTGCVIAWNSNNLDSKVGGNYNYLYRLFRKSNLKPFERDISTEIYQAGSTPCNGVEGFNCYFPLQSYGFQPTNGVGYQPYRVVVLSFELLHAPATVCGPKKSTNLVKNKCVNFNFNGLTGTGVLTESNKKFLPFQQFGRDIADTTDAVRDPQTLEILDITPCSFGGVSVITPGTNTSNQVAVLYQDVNCTEVPVAIHADQLTPTWRVYSTGSNVFQTRAGCLIGAEHVNNSYECDIPIGAGICASYQTQTNSPRRARSVASQSIIAYTMSLGAENSVAYSNNSIAIPTNFTISVTTEILPVSMTKTSVDCTMYICGDSTECSNLLLQYGSFCTQLNRALTGIAVEQDKNTQEVFAQVKQIYKTPPIKDCGGFNFSQILPDPSKPSKRSFIEDLLFNKVTLADAGFIKQYGDCLGDIAARDLICAQKFNGLTVLPPLLTDEMIAQYTSALLAGTITSGWTFCAGAALQIPFAMQMAYRFNGIGVTQNVLYENQKLIANQFNSAIGKIQDSLSSTASALGKLQDVVNQNAQALNTLVKQLSSNFGAISSVLNDILSRLDKVEAEVQIDRLITGRLQSLQTYVTQQLIRAAEIRASANLAATKMSECVCGQSKRVDFCGKGYHLMSFPQSAPHGVVFLHVTYVPAQEKNFTTAPAICHDGKAHFPREGVFVSNGTHWFVTQRNFYEPQIITTDNTFVSGNCDVVIGIVNNTVYDPLQPELDSFKEELDKYFKNHTSPDVDLGDISGINASVVNIQKEIDRLNEVAKNLNESLIDLQELGKYEQYIKWPWYIWLGFIAGLIAIVMVTIMLCCMTSCCSCLKGCCSCGSCCKFDEDDSEPVLKGVKLHYT

SEQ ID NO: 824 - protein, 1273 aa, Artificial Sequence
  SARS-CoV-2/Tianmen/HBCDC-HB-07/2020__EPI_ISL_412983 spike protein (1-1273)(G889C_L1034C)
MFVFLVLLPLVSSQCVNLTTRTQLPPAYTNSFTRGVYYPDKVFRSSVLHSTQDLFLPFFSNVTWFHAIHVSGTNGTKRFDNPVLPFNDGVYFASTEKSNIIRGWIFGTTLDSKTQSLLIVNNATNVVIKVCEFQFCNDPFLGVYYHKNNKSWMESEFRVYSSANNCTFEYVSQPFLMDLEGKQGNFKNLREFVFKNIDGYFKIYSKHTPINLVRDLPQGFSALEPLVDLPIGINITRFQTLLALHRSYLTPGDSSSGWTAGAAAYYVGYLQPRTFLLKYNENGTITDAVDCALDPLSETKCTLKSFTVEKGIYQTSNFRVQPTESIVRFPNITNLCPFGEVFNATRFASVYAWNRKRISNCVADYSVLYNSASFSTFKCYGVSPTKLNDLCFTNVYADSFVIRGDEVRQIAPGQTGKIADYNYKLPDDFTGCVIAWNSNNLDSKVGGNYNYLYRLFRKSNLKPFERDISTEIYQAGSTPCNGVEGFNCYFPLQSYGFQPTNGVGYQPYRVVVLSFELLHAPATVCGPKKSTNLVKNKCVNFNFNGLTGTGVLTESNKKFLPFQQFGRDIADTTDAVRDPQTLEILDITPCSFGGVSVITPGTNTSNQVAVLYQDLNCTEVPVAIHADQLTPTWRVYSTGSNVFQTRAGCLIGAEHVNNSYECDIPIGAGICASYQTQTNSPRRARSVASQSIIAYTMSLGAENSVAYSNNSIAIPTNFTISVTTEILPVSMTKTSVDCTMYICGDSTECSNLLLQYGSFCTQLNRALTGIAVEQDKNTQEVFAQVKQIYKTPPIKDFGGFNFSQILPDPSKPSKRSFIEDLLFNKVTLADAGFIKQYGDCLGDIAARDLICAQKFNGLTVLPPLLTDEMIAQYTSALLAGTITSGWTFCAGAALQIPFAMQMAYRFNGIGVTQNVLYENQKLIANQFNSAIGKIQDSLSSTASALGKLQDVVNQNAQALNTLVKQLSSNFGAISSVLNDILSRLDKVEAEVQIDRLITGRLQSLQTYVTQQLIRAAEIRASANLAATKMSECVCGQSKRVDFCGKGYHLMSFPQSAPHGVVFLHVTYVPAQEKNFTTAPAICHDGKAHFPREGVFVSNGTHWFVTQRNFYEPQIITTDNTFVSGNCDVVIGIVNNTVYDPLQPELDSFKEELDKYFKNHTSPDVDLGDISGINASVVNIQKEIDRLNEVAKNLNESLIDLQELGKYEQYIKWPWYIWLGFIAGLIAIVMVTIMLCCMTSCCSCLKGCCSCGSCCKFDEDDSEPVLKGVKLHYT

SEQ ID NO: 825 - protein, 1273 aa, Artificial Sequence
  SARS-CoV-2/Hong Kong/case42_VM20002493/2020__EPI_ISL_414527 spike protein (1-1273)(G889C_L1034C)
MFVFLVLLPLVSSQCVNLTTRTQLPPAYTNSFTRGVYYPDKVFRSSVLHSTQDLFLPFFSNVTWFHAIHVSGTNGTKRFDNPVLPFNDGVYFASTEKSNIIRGWIFGTTLDSKTQSLLIVNNATNVVIKVCEFQFCNDPFLGVYYHKNNKSWMESEFRVYSSANNCTFEYVSQPFLMDLEGKQGNFKNLREFVFKNIDGYFKIYSKHTPINLVRDLPQGFSALEPLVDLPIGINITRFQTLLALHRSYLTPGDSSSGWTAGAAAYYVGYLQPRTFLLKYNENGTITDAVDCALDPLSETKCTLKSFTVEKGIYQTSNFRVQPTESIVRFPNITNLCPFGEVFNATRFASVYAWNRKRISNCVADYSVLYNSASFSTFKCYGVSPTKLNDLCFTNVYADSFVIRGDEVRQIAPGQTGKIADYNYKLPDDFTGCVIAWNSNNLDSKVGGNYNYLYRLFRKSNLKPFERDISTEIYQAGSTPCNGVEGFNCYFPLQSYGFQPTNGVGYQPYRVVVLSFELLHAPATVCGPKKSTNLVKNKCVNFNFNGLTGTGVLTESNKKFLPFQQFGRDIADTTDAVRDPQTLEILDITPCSFGGVSVITPGTNTSNQVAVLYQDVNCTEVPVAIHADQLTPTWRVYSTGSNVFQTRAGCLIGAEHVNNSYECDIPIGAGICASYQTQTNSPRRARSVASQSIIAYTMSLGAENSVAYSNNSIAIPTNFAISVTTEILPVSMTKTSVDCTMYICGDSTECSNLLLQYGSFCTQLNRALTGIAVEQDKNTQEVFAQVKQIYKTPPIKDFGGFNFSQILPDPSKPSKRSFIEDLLFNKVTLADAGFIKQYGDCLGDIAARDLICAQKFNGLTVLPPLLTDEMIAQYTSALLAGTITSGWTFCAGAALQIPFAMQMAYRFNGIGVTQNVLYENQKLIANQFNSAIGKIQDSLSSTASALGKLQDVVNQNAQALNTLVKQLSSNFGAISSVLNDILSRLDKVEAEVQIDRLITGRLQSLQTYVTQQLIRAAEIRASANLAATKMSECVCGQSKRVDFCGKGYHLMSFPQSAPHGVVFLHVTYVPAQEKNFTTAPAICHDGKAHFPREGVFVSNGTHWFVTQRNFYEPQIITTDNTFVSGNCDVVIGIVNNTVYDPLQPELDSFKEELDKYFKNHTSPDVDLGDISGINASVVNIQKEIDRLNEVAKNLNESLIDLQELGKYEQYIKWPWYIWLGFIAGLIAIVMVTIMLCCMTSCCSCLKGCCSCGSCCKFDEDDSEPVLKGVKLHYT

SEQ ID NO: 826 - protein, 1273 aa, Artificial Sequence
  SARS-CoV-2/USA/CruiseA-23/2020__EPI_ISL_414482 spike protein (1-1273)(G889C_L1034C)
MFVFLVLLPLVSSQCVNLTTRTQLPPAYTNSFTRGVYYPDKVFRSSVLHSTQDLFLPFFSNVTWFHAIHVSGTNGTKRFDNPVLPFNDGVYFASTEKSNIIRGWIFGTTLDSKTQSLLIVNNATNVVIKVCEFQFCNDPFLGVYYHKNNKSWMESEFRVYSSANNCTFEYVSQPFLMDLEVKQGNFKNLREFVFKNIDGYFKIYSKHTPINLVRDLPQGFSALEPLVDLPIGINITRFQTLLALHRSYLTPGDSSSGWTAGAAAYYVGYLQPRTFLLKYNENGTITDAVDCALDPLSETKCTLKSFTVEKGIYQTSNFRVQPTESIVRFPNITNLCPFGEVFNATRFASVYAWNRKRISNCVADYSVLYNSASFSTFKCYGVSPTKLNDLCFTNVYADSFVIRGDEVRQIAPGQTGKIADYNYKLPDDFTGCVIAWNSNNLDSKVGGNYNYLYRLFRKSNLKPFERDISTEIYQAGSTPCNGVEGFNCYFPLQSYGFQPTNGVGYQPYRVVVLSFELLHAPATVCGPKKSTNLVKNKCVNFNFNGLTGTGVLTESNKKFLPFQQFGRDIADTTDAVRDPQTLEILDITPCSFGGVSVITPGTNTSNQVAVLYQDVNCTEVPVAIHADQLTPTWRVYSTGSNVFQTRAGCLIGAEHVNNSYECDIPIGAGICASYQTQTNSPRRARSVASQSIIAYTMSLGAENSVAYSNNSIAIPTNFTISVTTEILPVSMTKTSVDCTMYICGDSTECSNLLLQYGSFCTQLNRALTGIAVEQDKNTQEVFAQVKQIYKTPPIKDFGGFNFSQILPDPSKPSKRSFIEDLLFNKVTLADAGFIKQYGDCLGDIAARDLICAQKFNGLTVLPPLLTDEMIAQYTSALLAGTITSGWTFCAGAALQIPFAMQMAYRFNGIGVTQNVLYENQKLIANQFNSAIGKIQDSLSSTASALGKLQDVVNQNAQALNTLVKQLSSNFGAISSVLNDILSRLDKVEAEVQIDRLITGRLQSLQTYVTQQLIRAAEIRASANLAATKMSECVCGQSKRVDFCGKGYHLMSFPQSAPHGVVFLHVTYVPAQEKNFTTAPAICHDGKAHFPREGVFVSNGTHWFVTQRNFYEPQIITTDNTFVSGNCDVVIGIVNNTVYDPLQPELDSFKEELDKYFKNHTSPDVDLGDISGINASVVNIQKEIDRLNEVAKNLNESLIDLQELGKYEQYIKWPWYIWLGFIAGLIAIVMVTIMLCCMTSCCSCLKGCCSCGSCCKFDEDDSEPVLKGVKLHYT

SEQ ID NO: 827 - protein, 1273 aa, Artificial Sequence
  SARS-CoV-2/Hong Kong/case85_VM20002868/2020__EPI_ISL_414519 spike protein (1-1273)(G889C_L1034C)
MFVFLVLVPLVSSQCVNLTTRTQLPPAYTNSFTRGVYYPDKVFRSSVLHSTQDLFLPFFSNVTWFHAIHVSGTNGTKRFDNPVLPFNDGVYFASTEKSNIIRGWIFGTTLDSKTQSLLIVNNATNVVIKVCEFQFCNDPFLGVYYHKNNKSWMESEFRVYSSANNCTFEYVSQPFLMDLEGKQGNFKNLREFVFKNIDGYFKIYSKHTPINLVRDLPQGFSALEPLVDLPIGINITRFQTLLALHRSYLTPGDSSSGWTAGAAAYYVGYLQPRTFLLKYNENGTITDAVDCALDPLSETKCTLKSFTVEKGIYQTSNFRVQPTESIVRFPNITNLCPFGEVFNATRFASVYAWNRKRISNCVADYSVLYNSASFSTFKCYGVSPTKLNDLCFTNVYADSFVIRGDEVRQIAPGQTGKIADYNYKLPDDFTGCVIAWNSNNLDSKVGGNYNYLYRLFRKSNLKPFERDISTEIYQAGSTPCNGVEGFNCYFPLQSYGFQPTNGVGYQPYRVVVLSFELLHAPATVCGPKKSTNLVKNKCVNFNFNGLTGTGVLTESNKKFLPFQQFGRDIADTTDAVRDPQTLEILDITPCSFGGVSVITPGTNTSNQVAVLYQDVNCTEVPVAIHADQLTPTWRVYSTGSNVFQTRAGCLIGAEHVNNSYECDIPIGAGICASYQTQTNSPRRARSVASQSIIAYTMSLGAENSVAYSNNSIAIPTNFTISVTTEILPVSMTKTSVDCTMYICGDSTECSNLLLQYGSFCTQLNRALTGIAVEQDKNTQEVFAQVKQIYKTPPIKDFGGFNFSQILPDPSKPSKRSFIEDLLFNKVTLADAGFIKQYGDCLGDIAARDLICAQKFNGLTVLPPLLTDEMIAQYTSALLAGTITSGWTFCAGAALQIPFAMQMAYRFNGIGVTQNVLYENQKLIANQFNSAIGKIQDSLSSTASALGKLQDVVNQNAQALNTLVKQLSSNFGAISSVLNDILSRLDKVEAEVQIDRLITGRLQSLQTYVTQQLIRAAEIRASANLAATKMSECVCGQSKRVDFCGKGYHLMSFPQSAPHGVVFLHVTYVPAQEKNFTTAPAICHDGKAHFPREGVFVSNGTHWFVTQRNFYEPQIITTDNTFVSGNCDVVIGIVNNTVYDPLQPELDSFKEELDKYFKNHTSPDVDLGDISGINASVVNIQKEIDRLNEVAKNLNESLIDLQELGKYEQYIKWPWYIWLGFIAGLIAIVMVTIMLCCMTSCCSCLKGCCSCGSCCKFDEDDSEPVLKGVKLHYT

SEQ ID NO: 828 - protein, 1273 aa, Artificial Sequence
  SARS-CoV-2/England/200990660/2020__EPI_ISL_414523 spike protein (1-1273)(G889C_L1034C)
MFVFLVLLPLVSSQCVNLTTRTQLPPAYTNSFTRGVYYPDKVFRSSVLHSTQDLFLPFFSNVTWFHAIHVSGTNGTKRFDNPVLPFNDGVYFASTEKSNIIRGWIFGTTLDSKTQSLLIVNNATNVVIKVCEFQFCNDPFLGVYYHKNNKSWMESEFRVYSSANNCTFEYVSQPFLMDLEGKQGNFKNLREFVFKNIDGYFKIYSKHTPINLVRDLPQGFSALEPLVDLPIGINITRFQTLLALHRSYLTPGDSSSGWTAGAAAYYVGYLQPRTFLLKYNENGTITDAVDCALDPLSETKCTLKSFTVEKGIYQTSNFRVQPTESIVRFPNITNLCPFGEVFNATRFASVYAWNRKRISNCVADYSVLYNSASFSTFKCYGVSPTKLNDLCFTNVYADSFVIRGDEVRQIAPGQTGKIADYNYKLPDDFTGCVIAWNSNNLDSKVGGNYNYLYRLFRKSNLKPFERDISTEIYQAGSTPCNGVEGFNCYFPLQSYGFQPTNGVGYQPYRVVVLSFELLHAPATVCGPKKSTNLVKNKCVNFNFNGLTGTGVLTESNKKFLPFQQFGRDIADTTDAVRDPQTLEILDITPCSFGGVSVITPGTNTSNQVAVLYQGVNCTEVPVAIHADQLTPTWRVYSTGSNVFQTRAGCLIGAEHVNNSYECDIPIGAGICASYQTQTNSPRRARSVASQSIIAYTMSLGAENSVAYSNNSIAIPTNFTISVTTEILPVSMTKTSVDCTMYICGDSTECSNLLLQYGSFCTQLNRALTGIAVEQDKNTQEVFAQVKQIYKTPPIKDFGGFNFSQILPDPSKPSKRSFIEDLLFNKVTLADAGFIKQYGDCLGDIAARDLICAQKFNGLTVLPPLLTDEMIAQYTSALLAGTITSGWTFCAGAALQIPFAMQMAYRFNGIGVTQNVLYENQKLIANQFNSAIGKIQDSLSSTASALGKLQDVVNQNAQALNTLVKQLSSNFGAISSVLNDILSRLDKVEAEVQIDRLITGRLQSLQTYVTQQLIRAAEIRASANLAATKMSECVCGQSKRVDFCGKGYHLMSFPQSAPHGVVFLHVTYVPAQEKNFTTAPAICHDGKAHFPREGVFVSNGTHWFVTQRNFYEPQIITTDNTFVSGNCDVVIGIVNNTVYDPLQPELDSFKEELDKYFKNHTSPDVDLGDISGINASVVNIQKEIDRLNEVAKNLNESLIDLQELGKYEQYIKWPWYIWLGFIAGLIAIVMVTIMLCCMTSCCSCLKGCCSCGSCCKFDEDDSELVLKGVKLHYT

SEQ ID NO: 829 - protein, 1273 aa, Artificial Sequence
  SARS-CoV-2/Australia/NSW09/2020__EPI_ISL_413595 spike protein (1-1273)(G889C_L1034C)
MFVFLVLLPLVSSQCVNLTTRTQLPPAYTNSFTRGVYYPDKVFRSSVLHSTQDLFLPFFSNVTWFHAIHVSGTNGTKRFDNPVLPFNDGVYFASTEKSNIIRGWIFGTTLDSKTQSLLIVNNATNVVIKVCEFQFCNDPFLGVYYHKNNKSWMESEFRVYSSANNCTFEYVSQPFLMDLEGKQGNFKNLREFVFKNIDGYFKIYSKHTPINLVRDLPQGFSALEPLVDLPIGINITRFQTLLALHRSYLTPGDSSSGWTAGAAAYYVGYLQPRTFLLKYNENGTITDAVDCALDPLSETKCTLKSFTVEKGIYQTSNFRVQPTESIVRFPNITNLCPFGEVFNATRFASVYAWNRKRISNCVADYSVLYNSASFSTFKCYGVSPTKLNDLCFTNVYADSFVIRGDEVRQIAPGQTGKIADYNYKLPDDFTGCVIAWNSNNLDSKVGGNYNYLYRLFRKSNLKPFERDISTEIYQAGSTPCNGVEGFNCYFPLQSYGFQPTNGVGYQPYRVVVLSFELLHAPATVCGPKKSTNLVKNKCVNFNFNGLTGTGVLTESNKKFLPFQQFGRDIADTTDAVRDPQTLEILDITPCSFGGVSVITPGTNTSNQVAVLYQDVNCTEVPVAIHADQLTPTWRVYSTGSNVFQTRAGCLIGAEHVNNSYECDIPIGAGICASYQTQTNSPRRARSVASQSIIAYTMSLGAENSVAYSNNSIAIPTNFTISVTTEILPVSMTKTSVDCTMYICGDSTECSNLLLQYGSFCTQLNRALTGIAVEQDKNTQEVFAQVKQIYKTPPIKDFGGFNFSQILPDPSKPSKRSFIEDLLFNKVTLADAGFIKQYGDCLGDIAARDLICAQKFNGLTVLPPLLTDEMIAQYTSALLAGTITSGWTFCAGAALQIPFAMQMAYRFNGIGVTQNVLYENQKLIANQFNSAIGKIQDSLSFTASALGKLQDVVNQNAQALNTLVKQLSSNFGAISSVLNDILSRLDKVEAEVQIDRLITGRLQSLQTYVTQQLIRAAEIRASANLAATKMSECVCGQSKRVDFCGKGYHLMSFPQSAPHGVVFLHVTYVPAQEKNFTTAPAICHDGKAHFPREGVFVSNGTHWFVTQRNFYEPQIITTDNTFVSGNCDVVIGIVNNTVYDPLQPELDSFKEELDKYFKNHTSPDVDLGDISGINASVVNIQKEIDRLNEVAKNLNESLIDLQELGKYEQYIKWPWYIWLGFIAGLIAIVMVTIMLCCMTSCCSCLKGCCSCGSCCKFDEDDSEPVLKGVKLHYT

SEQ ID NO: 830 - protein, 1273 aa, Artificial Sequence
  SARS-CoV-2/Australia/NSW10/2020__EPI_ISL_413596 spike protein (1-1273)(G889C_L1034C)
MFVFLVLLPLVSSQCVNLTTRTQLPPAYTNSFTRGVYYPDKVFRSSVLHSTQDLFLPFFSNVTWFHAIHVSGTNGTKRFDNPVLPFNDGVYFASTEKSNIIRGWIFGTTLDSKTQSLLIVNNATNVVIKVCEFQFCNDPFLGVYYHKNNKSWMESEFRVYSSANNCTFEYVSQPFLMDLEGKQGNFKNLREFVFKNIDGYFKIYSKHTPINLVRDLPQGFSALEPLVDLPIGINITRFQTLLALHRSYLTPGDSSSGWTAGAAAYYVGYLQPRTFLLKYNENGTITDAVDCALDPLSETKCTLKSFTVEKGIYQTSNFRVQPTESIVRFPNITNLCPFGEVFNATRFASVYAWNRKRISNCVADYSVLYNSASFSTFKCYGVSPTKLNDLCFTNVYADSFVIRGDEVRQIAPGQTGKIADYNYKLPDDFTGCVIAWNSNNLDSKVGGNYNYLYRLFRKSNLKPFERDISTEIYQAGSTPCNGVEGFNCYFPLQSYGFQPTNGVGYQPYRVVVLSFELLHAPATVCGPKKSTNLVKNKCVNFNFNGLTGTGVLTESNKKFLPFQQFGRDIADTTDAVRDPQTLEILDITPCSFGGVSVITPGTNTSNQVAVLYQDVNCTEVPVAIHADQLTPTWRVYSTGSNVFQTRAGCLIGAEHVNNSYECDIPIGAGICASYQTQTNSPRRARSVASQSIIAYTMSLGAENSVAYSNNSIAIPTNFTISVTTEILPVSMTKTSVDCTMYICGDSTECSNLLLQYGSFCTQLNRALTGIAVEQDKNTQEVFAQVKQIYKTPPIKDFGGFNFSQILPDPSKPSKRSFIEDLLFNKVTLADAGFIKQYGDCLGDIAARDLICAQKFNGLTVLPPLLTDEMIAQYTSALLAGTITSGWTFCAGAALQIPFAMQMAYRFNGIGVTQNVLYENQKLIANQFNSAIGKIQDSLSSTASALGKLQDVVNQNAQALNTLVKQLSSNFGAISSVLNDILSRLDKVEAEVQIDRLITGRLQSLQTYVTQQLIRAAEIRASANLAATKMSECVCGQSKRVDFCGKGYHLMSFPQSAPHGVVFLHVTYVPAQEKNFTTAPAICHDGKAHFPREGVFVSNGTHWFVTQRNFYEPQIITTDNTFVSGNCDVVIGIVNNTVYDPLQPELDSFKEELDKYFKNHTSPDVDLGDISGINASVVNIQKEIDRLNEVAKNLNESLIDLQELGKYEQYIKWPWYIWLGFIAGLIAIVMVTIMLCCMTSCCSCLKGCCSCGSCFKFDEDDSEPVLKGVKLHYT

SEQ ID NO: 831 - protein, 1273 aa, Artificial Sequence
  SARS-CoV-2/Switzerland/1000477797/2020__EPI_ISL_413023 spike protein (1-1273)(G889C_L1034C)
MFVFLVLLPLVSSQCVNLTTRTQLPPAYTNSFTRGVYYPDKVFRSSVLHSTQDLFLPFFSNVTWFHAIHVSGTNGTKRFDNPVLPFNDGVYFASTEKSNIIRGWIFGTTLDSKTQSLLIVNNATNVVIKVCEFQFCNDPFLGVYYHKNNKSWMESEFRVYSSANNCTFEYVSQPFLMDLEGKQGNFKNLREFVFKNIDGYFNIYSKHTPINLVRDLPQGFSALEPLVDLPIGINITRFQTLLALHRSYLTPGDSSSGWTAGAAAYYVGYLQPRTFLLKYNENGTITDAVDCALDPLSETKCTLKSFTVEKGIYQTSNFRVQPTESIVRFPNITNLCPFGEVFNATRFASVYAWNRKRISNCVADYSVLYNSASFSTFKCYGVSPTKLNDLCFTNVYADSFVIRGDEVRQIAPGQTGKIADYNYKLPDDFTGCVIAWNSNNLDSKVGGNYNYLYRLFRKSNLKPFERDISTEIYQAGSTPCNGVEGFNCYFPLQSYGFQPTNGVGYQPYRVVVLSFELLHAPATVCGPKKSTNLVKNKCVNFNFNGLTGTGVLTESNKKFLPFQQFGRDIADTTDAVRDPQTLEILDITPCSFGGVSVITPGTNTSNQVAVLYQGVNCTEVPVAIHADQLTPTWRVYSTGSNVFQTRAGCLIGAEHVNNSYECDIPIGAGICASYQTQTNSPRRARSVASQSIIAYTMSLGAENSVAYSNNSIAIPTNFTISVTTEILPVSMTKTSVDCTMYICGDSTECSNLLLQYGSFCTQLNRALTGIAVEQDKNTQEVFAQVKQIYKTPPIKDFGGFNFSQILPDPSKPSKRSFIEDLLFNKVTLADAGFIKQYGDCLGDIAARDLICAQKFNGLTVLPPLLTDEMIAQYTSALLAGTITSGWTFCAGAALQIPFAMQMAYRFNGIGVTQNVLYENQKLIANQFNSAIGKIQDSLSSTASALGKLQDVVNQNAQALNTLVKQLSSNFGAISSVLNDILSRLDKVEAEVQIDRLITGRLQSLQTYVTQQLIRAAEIRASANLAATKMSECVCGQSKRVDFCGKGYHLMSFPQSAPHGVVFLHVTYVPAQEKNFTTAPAICHDGKAHFPREGVFVSNGTHWFVTQRNFYEPQIITTDNTFVSGNCDVVIGIVNNTVYDPLQPELDSFKEELDKYFKNHTSPDVDLGDISGINASVVNIQKEIDRLNEVAKNLNESLIDLQELGKYEQYIKWPWYIWLGFIAGLIAIVMVTIMLCCMTSCCSCLKGCCSCGSCCKFDEDDSEPVLKGVKLHYT

SEQ ID NO: 832 - protein, 1273 aa, Artificial Sequence
  SARS-CoV-2/Belgium/BA-02291/2020__EPI_ISL_415159 spike protein (1-1273)(G889C_L1034C)
MFVFLVLLPLVSSQCVNLTTRTQLPPAYTNSFTRGVYYPDKVFRSSVLHSTQDLFLPFFSNVTWFHAIHVSGTNGTKRFDNPVLPFNDGVYFASTEKSNIIRGWIFGTTLDSKTQSLLIVNNATNVVIKVCEFQFCNDPFLGVYYHKNNKSWMESEFRVYSSANNCTFEYVSQPFLMDLEGKQGNFKNLREFVFKNIDGYFKIYSKHTPINLVRDLPQGFSALEPLVDLPIGINITRFQTLLALHRSYLTPGDSSSGWTAGAAAYYVGYLQPRTFLLKYNENGTITDAVDCALDPLSETKCTLKSFTVEKGIYQTSNFRVQPTESIVRFPNITNLCPFGEVFNATRFASVYAWNRKRISNCVADYSVLYNSASFSTFKCYGVSPTKLNDLCFTNVYADSFVIRGDEVRQIAPGQTGKIADYNYKLPDDFTGCVIAWNSNNLDSKVGGNYNYLYRLFRRSNLKPFERDISTEIYQAGSTPCNGVEGFNCYFPLQSYGFQPTNGVGYQPYRVVVLSFELLPAPATVCGPKKSTNLVKNKCVNFNFNGLTGTGVLTESNKKFLPFQQFGRDIADTTDAVRDPQTLEILDITPCSFGGVSVITPGTNTSNQVAVLYQGVNCTEVPVAIHADQLTPTWRVYSTGSNVFQTRAGCLIGAEHVNNSYECDIPIGAGICASYQTQTNSPRRARSVASQSIIAYTMSLGAENSVAYSNNSIAIPTNFTISVTTEILPVSMTKTSVDCTMYICGDSTECSNLLLQYGSFCTQLNRALTGIAVEQDKNTQEVFAQVKQIYKTPPIKDFGGFNFSQILPDPSKPSKRSFIEDLLFNKVTLADAGFIKQYGDCLGDIAARDLICAQKFNGLTVLPPLLTDEMIAQYTSALLAGTITSGWTFCAGAALQIPFAMQMAYRFNGIGVTQNVLYENQKLIANQFNSAIGKIQDSLSSAAPALGKLQDVVNQNAQALNTLVKQLSSNFGAISSVLNDILSRLDKVEAEVQIDRLITGRLQSLQTYVTQQLIRAAEIRASANLAATKMSECVCGQSKRVDFCGKGYHLMSFPQSAPHGVVFLHVTYVPAQEKNFTTAPAICHDGKAHFPREGVFVSNGTHWFVTQRNFYEPQIITTDNTFVSGNCDVVIGIVNNTVYDPLQPELDSFKEELDKYFKNHTSPDVDLGDISGINASVVNIQKEIDRLNEVAKNLNESLIDLQELGKYEQYIKWPWYIWLGFIAGLIAIVMVTIMLCCMTSCCSCLKGCCSCGSCCKFDEDDSEPVLKGVKLHYT

SEQ ID NO: 833 - protein, 1273 aa, Artificial Sequence
  SARS-CoV-2/USA/WA8-UW5/2020__EPI_ISL_413486 spike protein (1-1273)(G889C_L1034C)
MFVFLVLLPLVSSQCVNLTTRTQLPPAYTNSFTRGVYYPDKVFRSSVLHSTQDLFLPFFSNVTWFHAIHVSGTNGTKRFDNPVLPFNDGVYFASTEKSNIIRGWIFGTTLDSKTQSLLIVNNATNVVIKVCEFQFCNDPFLGVYYHKNNKSWMESEFRVYSSANNCTFEYVSQPFLMDLEGKQGNFKNLREFVFKNIDGYFKIYSKHTPINLVRDLPQGFSALEPLVDLPIGINITRFQTLLALHRSYLTPGDSSSGWTAGAAAYYVGYLQPRTFLLKYNENGTITDAVDCALDPLSETKCTLKSFTVEKGIYQTSNFRVQPTESIVRFPNITNLCPFGEVFNATRFASVYAWNRKRISNCVADYSVLYNSASFSTFKCYGVSPTKLNDLCFTNVYADSFVIRGDEVRQIAPGQTGKIADYNYKLPDDFTGCVIAWNSNNLDSKVGGNYNYLYRLFRKSNLKPFERDISTEIYQAGSTPCNGVEGFNCYFPLQSYGFQPTNGVGYQPYRVVVLSFELLHAPATVCGPKKSTNLVKNKCVNFNFNGLTGTGVLTESNKKFLPFQQFGRDIADTTDAVRDPQTLEILDITPCSFGGVSVITPGTNTSNQVAVLYQDVNCTEVPVAIHADQLTPTWRVYSTGSNVFQTRAGCLIGAEYVNNSYECDIPIGAGICASYQTQTNSPRRARSVASQSIIAYTMSLGAENSVAYSNNSIAIPTNFTISVTTEILPVSMTKTSVDCTMYICGDSTECSNLLLQYGSFCTQLNRALTGIAVEQDKNTQEVFAQVKQIYKTPPIKDFGGFNFSQILPDPSKPSKRSFIEDLLFNKVTLADAGFIKQYGDCLGDIAARDLICAQKFNGLTVLPPLLTDEMIAQYTSALLAGTITSGWTFCAGAALQIPFAMQMAYRFNGIGVTQNVLYENQKLIANQFNSAIGKIQDSLSSTASALGKLQDVVNQNAQALNTLVKQLSSNFGAISSVLNDILSRLDKVEAEVQIDRLITGRLQSLQTYVTQQLIRAAEIRASANLAATKMSECVCGQSKRVDFCGKGYHLMSFPQSAPHGVVFLHVTYVPAQEKNFTTAPAICHDGKAHFPREGVFVSNGTHWFVTQRNFYEPQIITTDNTFVSGNCDVVIGIVNNTVYDPLQPELDSFKEELDKYFKNHTSPDVDLGDISGINASVVNIQKEIDRLNEVAKNLNESLIDLQELGKYEQYIKWPWYIWLGFIAGLIAIVMVTIMLCCMTSCCSCLKGCCSCGSCCKFDEDDSEPVLKGVKLHYT

SEQ ID NO: 834 - protein, 1273 aa, Artificial Sequence
  SARS-CoV-2/England/20102000506/2020__EPI_ISL_415147 spike protein (1-1273)(G889C_L1034C)
MFVFLVLLPLVSSQCVNLTTRTQLPPAYTNSFTRGVYYPDKVFRSSVLHSTQDLFLPFFSNVTWFHAIHVSGTNGTKRFDNPVLPFNDGVYFASTEKSNIIRGWIFGTTLDSKTQSLLIVNNATNVVIKVCEFQFCNDPFLGVYYHKNNKSWMESEFRVYSSANNCTFEYVSQPFLMDLEGKQGNFKNLREFVFKNIDGYFKIYSKHTPINLVRDLPQGFSALEPLVDLPIGINITRFQTLLALHRSYLTPGDSSSGWTAGAAAYYVGYLQPRTFLLKYNENGTITDAVDCALDPLSETKCTLKSFTVEKGIYQTSNFRVQPTESIVRFPNITNLCPFGEVFNATRFASVYAWNRKRISNCVADYSVLYNSASFSTFKCYGVSPTKLNDLCFTNVYADSFVIRGDEVRQIAPGQTGKIADYNYKLPDDFTGCVIAWNSNNLDSKVGGNYNYLYRLFRKSNLKPFERDISTEIYQAGSTPCNGVEGFNCYFPLQSYGFQPTNGVGYQPYRVVVLSFELLHAPATVCGPKKSTNLVKNKCVNFNFNGLTGTGVLTESNKKFLPFQQFGRDIADTTDAVRDPQTLEILDITPCSFGGVSVITPGTNTSNQVAVLYQGVNCTEVPVAIHADQLTPTWRVYSTGSNVFQTRAGCLIGAEHVNNSYECDIPIGAGICASYQTQTNSPRRARSVASQSIIAYTMSLGAENSVAYSNNSIAIPTNFTISVTTEILPVSMTKTSVDCTMYICGDSTECSNLLLQYGSFCTQLNRALTGIAVEQDKNTQEVFAQVKQIYKTPPIKDFGGFNFSQILPDPSKPSKRSFIEDLLFNKVTLADAGFIKQYGYCLGDIAARDLICAQKFNGLTVLPPLLTDEMIAQYTSALLAGTITSGWTFCAGAALQIPFAMQMAYRFNGIGVTQNVLYENQKLIANQFNSAIGKIQDSLSSTASALGKLQDVVNQNAQALNTLVKQLSSNFGAISSVLNDILSRLDKVEAEVQIDRLITGRLQSLQTYVTQQLIRAAEIRASANLAATKMSECVCGQSKRVDFCGKGYHLMSFPQSAPHGVVFLHVTYVPAQEKNFTTAPAICHDGKAHFPREGVFVSNGTHWFVTQRNFYEPQIITTDNTFVSGNCDVVIGIVNNTVYDPLQPELDSFKEELDKYFKNHTSPDVDLGDISGINASVVNIQKEIDRLNEVAKNLNESLIDLQELGKYEQYIKWPWYIWLGFIAGLIAIVMVTIMLCCMTSCCSCLKGCCSCGSCCKFDEDDSEPVLKGVKLHYT

SEQ ID NO: 835 - protein, 1273 aa, Artificial Sequence
  SARS-CoV-2/Belgium/VAG-03013/2020__EPI_ISL_415155 spike protein (1-1273)(G889C_L1034C)
MFVFLVLLPLVSSQCVNLTTRTQLPPAYTNSFTRGVYYPDKVFRSSVLHSTQDLFLPFFSNVTWFHAIHVSGTNGTKRFDNPVLPFNDGVYFASTEKSNIIRGWIFGTTLDSKTQSLLIVNNATNVVIKVCEFQFCNDPFLGVYYHKNNKSWMESEFRVYSSANNCTFEYVSQPFLMDLEGKQGNFKNLREFVFKNIDGYFKIYSKHTPINLVRDLPQGFSALEPLVDLPIGINITRFQTLLALHRSYLTPGDSSSGWTAGAAAYYVGYLQPRTFLLKYNENGTITDAVDCALDPLSETKCTLKSFTVEKGIYQTSNFRVQPTESIVRFPNITNLCPFGEVFNATRFASVYAWNRKRISNCVADYSVLYNSASFSTFKCYGVSPTKLNDLCFTNVYADSFVIRGDEVRQIAPGQTGKIADYNYKLPDDFTGCVIAWNSNNLDSKVGGNYNYLYRLFRKSNLKPFERDISTEIYQAGSTPCNGVEGFNCYFPLQSYGFQPTNGVGYQPYRVVVLSFELLHAPATVCGPKKSTNLVKNKCVNFNFNGLTGTGVLTESNKKFLPFQQFGRDIADTTDAVRDPQTLEILDITPCSFGGVSVITPGTNTSNQVAVLYQGVNCTEVPVAIHADQLTPTWRVYSTGSNVFQTRAGCLIGAEHVNNSYECDIPIGAGICASYQTQTNSPRRARSVASQSIIAYTMSLGAENSVAYSNNSIAIPTNFTISVTTEILPVSMTKTSVDCTMYICGDSTECSNLLLQYGSFCTQLNRALTGIAVEQDKNTQEVFAQVKQIYKTPPIKDFGGFNFSQILPDPSKPSKRSFIEDLLFNKVTLADAGFIKQYGDCLGDIAARDLICAQKFNGLTVLPPLLTDEMIAQYTSALLAGTITSGWTFCAGAALQIPFAMQMAYRFNGIGVTQNVLYENQKLIANQFNSAIGKIQDSLSSTATALGKLQDVVNQNAQALNTLVKQLSSNFGAISSVLNDILSRLDKVEAEVQIDRLITGRLQSLQTYVTQQLIRAAEIRASANLAATKMSECVCGQSKRVDFCGKGYHLMSFPQSAPHGVVFLHVTYVPAQEKNFTTAPAICHDGKAHFPREGVFVSNGTHWFVTQRNFYEPQIITTDNTFVSGNCDVVIGIVNNTVYDPLQPELDSFKEELDKYFKNHTSPDVDLGDISGINASVVNIQKEIDRLNEVAKNLNESLIDLQELGKYEQYIKWPWYIWLGFIAGLIAIVMVTIMLCCMTSCCSCLKGCCSCGSCCKFDEDDSEPVLKGVKLHYT

SEQ ID NO: 836 - protein, 1273 aa, Artificial Sequence
  SARS-CoV-2/Belgium/BC-03016/2020__EPI_ISL_415157 spike protein (1-1273)(G889C_L1034C)
MFVFLVLLPLVSSQCVNLTTRTQLPPAYTNSFTRGVYYPDKVFRSSVLHSTQDLFLPFFSNVTWFHAIHVSGTNGTKRFDNPVLPFNDGVYFASTEKSNIIRGWIFGTTLDSKTQSLLIVNNATNVVIKVCEFQFCNDPFLGVYYHKNNKSWMESEFRVYSSANNCTFEYVSQPFLMDLEGKQGNFKNLREFVFKNIDGYFKIYSKHTPINLVRDLPQGFSALEPLVDLPIGINITRFQTLLALHRSYLTPGDSSSGWTAGAAAYYVGYLQPRTFLLKYNENGTITDAVDCALDPLSETKCTLKSFTVEKGIYQTSNFRVQPTESIVRFPNITNLCPFGEVFNATRFASVYAWNRKRISNCVADYSVLYNSASFSTFKCYGVSPTKLNDLCFTNVYADSFVIRGDEVRQIAPGQTGKIADYNYKLPDDFTGCVIAWNSNNLDSKVGGNYNYLYRLFRKSNLKPFERDISTEIYQAGSTPCNGVEGFNCYFPLQSYGFQPTNGVGYQPYRVVVLSFELLHAPATVCGPKKSTNLVKNKCVNFNFNGLTGTGVLTESNKKFLPFQQFGRDIADTTDAVRDPQTLEILDITPCSFGGVSVITPGTNTSNQVAVLYQGVNCTEVPVAIHADQLTPTWRVYSTGSNVFQTRAGCLIGAEHVNNSYECDIPIGAGICASYQTQTNSPRRARSVASQSIIAYTMSLGAENSVAYSNNSIAIPTNFTISVTTEILPVSMTKTSVDCTMYICGDSTECSNLLLQYGSFCTQLNRALTGIAVEQDKNTQEVFAQVKQIYKTPPIKDFGGFNFSQILPDPSKPSKRSFIEDLLFNKVTLADAGFIKQYGDCLGDIAARDLICAQKFNGLTVLPPLLTDEMIAQYTSALLAGTITSGWTFCAGAALQIPFAMQMAYRFNGIGVTQNVLYENQKLIANQFNSAIGKIQDSLSSTAPALGKLQDVVNQNAQALNTLVKQLSSNFGAISSVLNDILSRLDKVEAEVQIDRLITGRLQSLQTYVTQQLIRAAEIRASANLAATKMSECVCGQSKRVDFCGKGYHLMSFPQSAPHGVVFLHVTYVPAQEKNFTTAPAICHDGKAHFPREGVFVSNGTHWFVTQRNFYEPQIITTDNTFVSGNCDVVIGIVNNTVYDPLQPELDSFKEELDKYFKNHTSPDVDLGDISGINASVVNIQKEIDRLNEVAKNLNESLIDLQELGKYEQYIKWPWYIWLGFIAGLIAIVMVTIMLCCMTSCCSCLKGCCSCGSCCKFDEDDSEPVLKGVKLHYT

SEQ ID NO: 837 - protein, 1273 aa, Artificial Sequence
  SARS-CoV-2/Germany/BavPat3/2020__EPI_ISL_414521 spike protein (1-1273)(G889C_L1034C)
MFVFLVLLPLVSSQCVNLTTRTQLPPAYTNSFTRGVYYPDKVFRSSVLHSTQDLFLPFFSNVTWFHAIHVSGTNGTKRFDNPVLPFNDGVYFASTEKSNIIRGWIFGTTLDSKTQSLLIVNNATNVVIKVCEFQFCNDPFLGVYYHKNNKSWMESEFRVYSSANNCTFEYVSQPFLMDLEGKQGNFKNLREFVFKNIDGYFKIYSKHTPINLVRDLPQGFSALEPLVDLPIGINITRFQTLLALHRSYLTPGDSSSGWTAGAAAYYVGYLQPRTFLLKYNENGTITDAVDCALDPLSETKCTLKSFTVEKGIYQTSNFRVQPTESIVRFPNITNLCPFGEVFNATRFASVYAWNRKRISNCVADYSVLYNSASFSTFKCYGVSPTKLNDLCFTNVYADSFVIRGDEVRQIAPGQTGKIADYNYKLPDDFTGCVIAWNSNNLDSKVGGNYNYLYRLFRKSNLKPFERDISTEIYQAGSTPCNGVEGFNCYFPLQSYGFQPTNGVGYQPYRVVVLSFELLHAPATVCGPKKSTNLVKNKCVNFNFNGLTGTGVLTESNKKFLPFQQFGRDIADTTDAVRDPQTLEILDITPCSFGGVSVITPGTNTSNQVAVLYQDVNCTEVPVAIHADQLTPTWRVYSTGSNVFQTRAGCLIGAEHVNNSYECDIPIGAGICASYQTQTNSPRRARSVASQSIIAYTMSLGAENSVAYSNNSIAIPTNFTISVTTEILPVSMTKTSVDCTMYICGDSTECSNLLLQYGSFCTQLNRALTGIAVEQDKNTQQVFAQVKQIYKTPPIKDFGGFNFSQILPDPSKPSKRSFIEDLLFNKVTLADAGFIKQYGDCLGDIAARDLICAQKFNGLTVLPPLLTDEMIAQYTSALLAGTITSGWTFCAGAALQIPFAMQMAYRFNGIGVTQNVLYENQKLIANQFNSAIGKIQDSLSSTASALGKLQDVVNQNAQALNTLVKQLSSNFGAISSVLNDILSRLDKVEAEVQIDRLITGRLQSLQTYVTQQLIRAAEIRASANLAATKMSECVCGQSKRVDFCGKGYHLMSFPQSAPHGVVFLHVTYVPAQEKNFTTAPAICHDGKAHFPREGVFVSNGTHWFVTQRNFYEPQIITTDNTFVSGNCDVVIGIVNNTVYDPLQPELDSFKEELDKYFKNHTSPDVDLGDISGINASVVNIQKEIDRLNEVAKNLNESLIDLQELGKYEQYIKWPWYIWLGFIAGLIAIVMVTIMLCCMTSCCSCLKGCCSCGSCCKFDEDDSEPVLKGVKLHYT

SEQ ID NO: 838 - protein, 1273 aa, Artificial Sequence
  SARS-CoV-2/France/HF1805/2020__EPI_ISL_414628 spike protein (1-1273)(G889C_L1034C)
MFVFLVLLPLVSSQCVNLTTRTQLPPAYTNSFTRGVYYPDKVFRSSVLHSTQDLFLPFFSNVTWFHAIHVSGTNGTKRFDNPVLPFNDGVYFASTEKSNIIRGWIFGTTLDSKTQSLLIVNNATNVVIKVCEFQFCNDPFLGVYYHKNNKSWMESEFRVYSSANNCTFEYVSQPFLMDLEGKQGNFKNLREFVFKNIDGYFKIYSKHTPINLVRDLPQGFSALEPLVDLPIGINITRFQTLLALHRSYLTPGDSSSGWTAGAAAYYVGYLQPRTFLLKYNENGTITDAVDCALDPLSETKCTLKSFTVEKGIYQTSNFRVQPTESIVRFPNITNLCPFGEVFNATRFASVYAWNRKRISNCVADYSVLYNSASFSTFKCYGVSPTKLNDLCFTNVYADSFVIRGDEVRQIAPGQTGKIADYNYKLPDDFTGCVIAWNSNNLDSKVGGNYNYLYRLFRKSNLKPFERDISTEIYQAGSTPCNGVEGFNCYFPLQSYGFQPTNGVGYQPYRVVVLSFELLHAPATVCGPKKSTNLVKNKCVNFNFNGLTGTGVLTESNKKFLPFQQFGRDIADTTDAVRDPQTLEILDITPCSFGGVSVITPGTNTSNQVAVLYQGVNCTEVPVAIHADQLTPTWRVYSTGSNVFQTRAGCLIGAEHVNNSYECDIPIGAGICASYQTQTNSPRRARSVASQSIIAYTMSLGAENSVAYSNNSIAIPTNFTISVTTEILPVSMTKTSVDCTMYICGDSTECSNLLLQYGSFCTQLNRALTGIAVEQDKNTQEVFAQVKQIYKTPPIKDFGGFNFSQILPDPSKPSKRSFIEDLLFNKVTLADAGFIKQYGDCLGDIAARDLICAQKFNGLTVLPPLLTDEMIAQYTSALLAGTITSGWTFCAGAALQIPFAMQMAYRFNGIGVTQNVLYENQKLIANQFNSAIGKIQDSLSSTASALGKLQDVVNQNAQALNTLVKQLSSNFGAISSVLNDILSRLDKVEAEVQIDRLITGRLQSLQTYVTQQLIRAAEIRASANLAATKMSECVCGQSKRVDFCGKGYHLMSFPQSAPHGVVFLHVTYVPAQEKNFTTAPAICHDGKAHFPREGVFVSNGTHWFVTQRNFYEPQIITTDNTFVSGNCDVVIGVVNNTVYDPLQPELDSFKEELDKYFKNHTSPDVDLGDISGINASVVNIQKEIDRLNEVAKNLNESLIDLQELGKYEQYIKWPWYIWLGFIAGLIAIVMVTIMLCCMTSCCSCLKGCCSCGSCCKFDEDDSEPVLKGVKLHYT

SEQ ID NO: 839 - protein, 1273 aa, Artificial Sequence
  SARS-CoV-2/Netherlands/ZuidHolland_9/2020__EPI_ISL_414445 spike protein (1-1273)(G889C_L1034C)
MFVFLVLLPLVSSQCVNLTTRTQLPPAYTNSFTRGVYYPDKVFRSSVLHSTQDLFLPFFSNVTWFHAIHVSGTNGTKRFDNPVLPFNDGVYFASTEKSNIIRGWIFGTTLDSKTQSLLIVNNATNVVIKVCEFQFCNDPFLGVYYHKNNKSWMESEFRVYSSANNCTFEYVSQPFLMDLEGKQGNFKNLREFVFKNIDGYFKIYSKHTPINLVRDLPQGFSALEPLVDLPIGINITRFQTLLALHRSYLTPGDSSSGWTAGAAAYYVGYLQPRTFLLKYNENGTITDAVDCALDPLSETKCTLKSFTVEKGIYQTSNFRVQPTESIVRFPNITNLCPFGEVFNATRFASVYAWNRKRISNCVADYSVLYNSASFSTFKCYGVSPTKLNDLCFTNVYADSFVIRGDEVRQIAPGQTGKIADYNYKLPDDFTGCVIAWNSNNLDSKVGGNYNYLYRLFRKSNLKPFERDISTEIYQAGSTPCNGVEGFNCYFPLQSYGFQPTNGVGYQPYRVVVLSFELLHAPATVCGPKKSTNLVKNKCVNFNFNGLTGTGVLTESNKKFLPFQQFGRDIADTTDAVRDPQTLEILDITPCSFGGVSVITPGTNTSNQVAVLYQGVNCTEVPVAIHADQLTPTWRVYSTGSNVFQTRAGCLIGAEHVNNSYECDIPIGAGICASYQTQTNSPRRARSVASQSIIAYTMSLGAENSVAYSNNSIAIPTNFTISVTTEILPVSMTKTSVDCTMYICGDSTECSNLLLQYGSFCTQLNRALTGIAVEQDKNTQEVFAQVKQIYKTPPIKDFGGFNFSQILPDPSKPSKRSFIEDLLFNKVTLADAGFIKQYGDCLGDIAARDLICVQKFNGLTVLPPLLTDEMIAQYTSALLAGTITSGWTFCAGAALQIPFAMQMAYRFNGIGVTQNVLYENQKLIANQFNSAIGKIQDSLSSTASALGKLQDVVNQNAQALNTLVKQLSSNFGAISSVLNDILSRLDKVEAEVQIDRLITGRLQSLQTYVTQQLIRAAEIRASANLAATKMSECVCGQSKRVDFCGKGYHLMSFPQSAPHGVVFLHVTYVPAQEKNFTTAPAICHDGKAHFPREGVFVSNGTHWFVTQRNFYEPQIITTDNTFVSGNCDVVIGIVNNTVYDPLQPELDSFKEELDKYFKNHTSPDVDLGDISGINASVVNIQKEIDRLNEVAKNLNESLIDLQELGKYEQYIKWPWYIWLGFIAGLIAIVMVTIMLCCMTSCCSCLKGCCSCGSCCKFDEDDSEPVLKGVKLHYT

SEQ ID NO: 840 - protein, 1273 aa, Artificial Sequence
  SARS-CoV-2/Finland/FIN03032020A/2020__EPI_ISL_413602 spike protein (1-1273)(G889C_L1034C)
MFVFLVLLPLVSSQCVNLTTRTQLPPAYTNSFTRGVYYPDKVFRSSVLHSTQDLFLPFFSNVTWFHAIHVSGTNGTKRFDNPVLPFNDGVYFASTEKSNIIRGWIFGTTLDSKTQSLLIVNNATNVVIKVCEFQFCNDPFLGVYYHKNNKSWMESEFRVYSSANNCTFEYVSQPFLMDLEGKQGNFKNLREFVFKNIDGYFKIYSKHTPINLVRDLPQGFSALEPLVDLPIGINITRFQTLLALHRSYLTPGDSSSGWTAGAAAYYVGYLQPRTFLLKYNENGTITDAVDCALDPLSETKCTLKSFTVEKGIYQTSNFRVQPTESIVRFPNITNLCPFGEVFNATRFASVYAWNRKRISNCVADYSVLYNSASFSTFKCYGVSPTKLNDLCFTNVYADSFVIRGDEVRQIAPGQTGKIADYNYKLPDDFTGCVISWNSNNLDSKVGGNYNYLYRLFRKSNLKPFERDISTEIYQAGSTPCNGVEGFNCYFPLQSYGFQPTNGVGYQPYRVVVLSFELLHAPATVCGPKKSTNLVKNKCVNFNFNGLTGTGVLTESNKKFLPFQQFGRDIADTTDAVRDPQTLEILDITPCSFGGVSVITPGTNTSNQVAVLYQGVNCTEVPVAIHADQLTPTWRVYSTGSNVFQTRAGCLIGAEHVNNSYECDIPIGAGICASYQTQTNSPRRARSVASQSIIAYTMSLGAENSVAYSNNSIAIPTNFTISVTTEILPVSMTKTSVDCTMYICGDSTECSNLLLQYGSFCTQLNRALTGIAVEQDKNTQEVFAQVKQIYKTPPIKDFGGFNFSQILPDPSKPSKRSFIEDLLFNKVTLADAGFIKQYGDCLGDIAARDLICAQKFNGLTVLPPLLTDEMIAQYTSALLAGTITSGWTFCAGAALQIPFAMQMAYRFNGIGVTQNVLYENQKLIANQFNSAIGKIQDSLSSTASALGKLQDVVNQNAQALNTLVKQLSSNFGAISSVLNDILSRLDKVEAEVQIDRLITGRLQSLQTYVTQQLIRAAEIRASANLAATKMSECVCGQSKRVDFCGKGYHLMSFPQSAPHGVVFLHVTYVPAQEKNFTTAPAICHDGKAHFPREGVFVSNGTHWFVTQRNFYEPQIITTDNTFVSGNCDVVIGIVNNTVYDPLQPELDSFKEELDKYFKNHTSPDVDLGDISGINASVVNIQKEIDRLNEVAKNLNESLIDLQELGKYEQYIKWPWYIWLGFIAGLIAIVMVTIMLCCMTSCCSCLKGCCSCGSCCKFDEDDSEPVLKGVKLHYT

SEQ ID NO: 841 - protein, 1273 aa, Artificial Sequence
  SARS-CoV-2/France/GE1977/2020__EPI_ISL_414632 spike protein (1-1273)(G889C_L1034C)
MFVFLVLLPLVSSQCVNLTTRTQLPPAYTNSFTRGVYYPDKVFRSSVLHSTQDLFLPFFSNVTWFHAIHVSGTNGTKRFDNPVLPFNDGVYFASTEKSNIIRGWIFGTTLDSKTQSLLIVNNATNVVIKVCEFQFCNDPFLGVYYHKNNKSWMESEFRVYSSANNCTFEYVSQPFLMDLEGKQGNFKNLREFVFKNIDGYFKIYSKHTPINLVRDLPQGFSALEPLVDLPIGINITRFQTLLALHRSYLTPGDSSSGWTAGAAAYYVGYLQPRTFLLKYNENGTITDAVDCALDPLSETKCTLKSFTVEKGIYQTSNFRVQPTESIVRFPNITNLCPFGEVFNATRFASVYAWNRKRISNCVADYSVLYNSASFSTFKCYGVSPTKLNDLCFTNVYADSFVIRGDEVRQIAPGQTGKIADYNYKLPDDFTGCVIAWNSNNLDSKVGGNYNYLYRLFRKSNLKPFERDISTEIYQAGSTPCNGVEGFNCYFPLQSYGFQPTNGVGYQPYRVVVLSFELLHAPATVCGPKKSTNLVKNKCVNFNFNGLTGTGVLTESNKKFLPFQQFGRDIADTTDAVRDPQTLEILDITPCSFGGVSVITPGTNTSNQVAVLYQGVNCTEVPVAIHADQLTPTWRVYSTGSNVFQTRAGCLIGAEHVNNSYECDIPIGAGICASYQTQTNSPRRARSVASQSIIAYTMSLGAENSVAYSNNSIAIPTNFTISVTTEILPVSMTKTSVDCTMYICGDSTECSNLLLQYGSFCTQLNRALTGIAVEQDKNTQEVFAQVKQIYKTPPIKDFGGFNFSQILPDPSKPSKRSFIEDLLFNKVTLADAGFIKQYGDCLGDIAARDLICAQKFNGLTVLPPLLTDEMIAQYTSALLAGTITSGWTFCAGAALQIPFAMQMAYRFNGIGVTQNVLYENQKLIANQFNSAIGKIQDSLFSTASALGKLQDVVNQNAQALNTLVKQLSSNFGAISSVLNDILSRLDKVEAEVQIDRLITGRLQSLQTYVTQQLIRAAEIRASANLAATKMSECVCGQSKRVDFCGKGYHLMSFPQSAPHGVVFLHVTYVPAQEKNFTTAPAICHDGKAHFPREGVFVSNGTHWFVTQRNFYEPQIITTDNTFVSGNCDVVIGIVNNTVYDPLQPELDSFKEELDKYFKNHTSPDVDLGDISGINASVVNIQKEIDRLNEVAKNLNESLIDLQELGKYEQYIKWPWYIWLGFIAGLIAIVMVTIMLCCMTSCCSCLKGCCSCGSCCKFDEDDSEPVLKGVKLHYT

SEQ ID NO: 842 - protein, 1273 aa, Artificial Sequence
  SARS-CoV-2/Finland/FIN-313/2020__EPI_ISL_414641 spike protein (1-1273)(G889C_L1034C)
MFVFLVLLPLVSSQCVNLTTRTQLPPAYTNSFTRGVYYPDKVFRSSVLHSTQDLFLPFFSNVTWFHAIHVSGTNGTKRFDNPVLPFNDGVYFASTEKSNIIRGWIFGTTLDSKTQSLLIVNNATNVVIKVCEFQFCNDPFLGVYYHKNNKSWMESEFRVYSSANNCTFEYVSQPFLMDLEGKQGNFKNLREFVFKNIDGYFKIYSKHTPINLVRDLPQGFSALEPLVDLPIGINITRFKTLLALHRSYLTPGDSSSGWTAGAAAYYVGYLQPRTFLLKYNENGTITDAVDCALDPLSETKCTLKSFTVEKGIYQTSNFRVQPTESIVRFPNITNLCPFGEVFNATRFASVYAWNRKRISNCVADYSVLYNSASFSTFKCYGVSPTKLNDLCFTNVYADSFVIRGDEVRQIAPGQTGKIADYNYKLPDDFTGCVIAWNSNNLDSKVGGNYNYLYRLFRKSNLKPFERDISTEIYQAGSTPCNGVEGFNCYFPLQSYGFQPTNGVGYQPYRVVVLSFELLHAPATVCGPKKSTNLVKNKCVNFNFNGLTGTGVLTESNKKFLPFQQFGRDIADTTDAVRDPQTLEILDITPCSFGGVSVITPGTNTSNQVAVLYQGVNCTEVPVAIHADQLTPTWRVYSTGSNVFQTRAGCLIGAEHVNNSYECDIPIGAGICASYQTQTNSPRRARSVASQSIIAYTMSLGAENSVAYSNNSIAIPTNFTISVTTEILPVSMTKTSVDCTMYICGDSTECSNLLLQYGSFCTQLNRALTGIAVEQDKNTQEVFAQVKQIYKTPPIKDFGGFNFSQILPDPSKPSKRSFIEDLLFNKVTLADAGFIKQYGDCLGDIAARDLICAQKFNGLTVLPPLLTDEMIAQYTSALLAGTITSGWTFCAGAALQIPFAMQMAYRFNGIGVTQNVLYENQKLIANQFNSAIGKIQDSLSSTASALGKLQDVVNQNAQALNTLVKQLSSNFGAISSVLNDILSRLDKVEAEVQIDRLITGRLQSLQTYVTQQLIRAAEIRASANLAATKMSECVCGQSKRVDFCGKGYHLMSFPQSAPHGVVFLHVTYVPAQEKNFTTAPAICHDGKAHFPREGVFVSNGTHWFVTQRNFYEPQIITTDNTFVSGNCDVVIGIVNNTVYDPLQPELDSFKEELDKYFKNHTSPDVDLGDISGINASVVNIQKEIDRLNEVAKNLNESLIDLQELGKYEQYIKWPWYIWLGFIAGLIAIVMVTIMLCCMTSCCSCLKGCCSCGSCCKFDEDDSEPVLKGVKLHYT

SEQ ID NO: 843 - protein, 1273 aa, Artificial Sequence
  SARS-CoV-2/Netherlands/ZuidHolland_2/2020__EPI_ISL_414556 spike protein (1-1273)(G889C_L1034C)
MFVFLVLLPLVSSQCVNLTTRTQLPPAYTNSFTRGVYYPDKVFRSSVLHSTQDLFLPFFSNVTWFHAIHVSGTNGTKRFDNPVLPFNDGVYFASTEKSNIIRGWIFGTTLDSKTQSLLIVNNATNVVIKVCEFQFCNDPFLGVYYHKNNKSWMESEFRVYSSANNCTFEYVSQPFLMDLEGKQGNFKNLREFVFKNIDGYFKIYSKHTPINLVRDLPQGFSALEPLVDLPIGINITRFQTLLALHRSYLTPGDSSSGWTAGAAAYYVGYLQPRTFLLKYNENGTITDAVDCALDPLSETKCTLKSFTVEKGIYQTSNFRVQPTESIVRFPNITNLCPFGEVFNATRFASVYAWNRKRISNCVADYSVLYNSASFSTFKCYGVSPTKLNDLCFTNVYADSFVIRGDEVRQIAPGQTGKIADYNYKLPDDFTGCVIAWNSNNLDSKVGGNYNYLYRLFRKSNLKPFERDISTEIYQAGSTPCNGVEGFNCYFPLQSYGFQPTNGVGYQPYRVVVLSFELLHAPATVCGPKKSTNLVKNKCVNFNFNGLTGTGVLTESNKKFLPFQQFGRDIADTTDAVRDPQTLEILDITPCSFGGVSVITPGTNTSNQVAVLYQGVNCTEVPVAIHADQLTPTWRVYSTGSNVFQTRAGCLIGAEHVNNSYECDIPIGAGICASYQTQTNSPRRARSVASQSIIAYTMSLGAENSVAYSNNSIAIPTNFTISVTTEILPVSMTKTSVDCTMYICGDSTECSNLLLQYGSFCTQLNRALTGIALEQDKNTQEVFAQVKQIYKTPPIKDFGGFNFSQILPDPSKPSKRSFIEDLLFNKVTLADAGFIKQYGDCLGDIAARDLICAQKFNGLTVLPPLLTDEMIAQYTSALLAGTITSGWTFCAGAALQIPFAMQMAYRFNGIGVTQNVLYENQKLIANQFNSAIGKIQDSLSSTASALGKLQDVVNQNAQALNTLVKQLSSNFGAISSVLNDILSRLDKVEAEVQIDRLITGRLQSLQTYVTQQLIRAAEIRASANLAATKMSECVCGQSKRVDFCGKGYHLMSFPQSAPHGVVFLHVTYVPAQEKNFTTAPAICHDGKAHFPREGVFVSNGTHWFVTQRNFYEPQIITTDNTFVSGNCDVVIGIVNNTVYDPLQPELDSFKEELDKYFKNHTSPDVDLGDISGINASVVNIQKEIDRLNEVAKNLNESLIDLQELGKYEQYIKWPWYIWLGFIAGLIAIVMVTIMLCCMTSCCSCLKGCCSCGSCCKFDEDDSEPVLKGVKLHYT

SEQ ID NO: 844 - protein, 1273 aa, Artificial Sequence
  SARS-CoV-2/USA/WA-UW31/2020__EPI_ISL_414618 spike protein (1-1273)(G889C_L1034C)
MFVFLVLLPLVSSQCVNLTTRTQLPPAYTNSFTRGVYYPDKVFRSSVLHSTQDLFLPFFSNVTWFHAIHVSGTNGTKRFDNPVLPFNDGVYFASTEKSNIIRGWIFGTTLDSKTQSLLIVNNATNVVIKVCEFQFCNDPFLGVYYHKNNKSWMESEFRVYSSANNCTFEYVSQPFLMDLEGKQGNFKNLREFVFKNIDGYFKIYSKHTPINLVRDLPQGFSALEPLVDLPIGINITRFQTLLALHRSYLTPGDSSSGWTAGAAAYYVGYLQPRTFLLKYNENGTITDAVDCALDPLSETKCTLKSFTVEKGIYQTSNFRVQPTESIVRFPNITNLCPFGEVFNATRFASVYAWNRKRISNCVADYSVLYNSASFSTFKCYGVSPTKLNDLCFTNVYADSFVIRGDEVRQIAPGQTGKIADYNYKLPDDFTGCVIAWNSNNLDSKVGGNYNYLYRLFRKSNLKPFERDISTEIYQAGSTPCNGAEGFNCYFPLQSYGFQPTNGVGYQPYRVVVLSFELLHAPATVCGPKKSTNLVKNKCVNFNFNGLTGTGVLTESNKKFLPFQQFGRDIADTTDAVRDPQTLEILDITPCSFGGVSVITPGTNTSNQVAVLYQDVNCTEVPVAIHADQLTPTWRVYSTGSNVFQTRAGCLIGAEHVNNSYECDIPIGAGICASYQTQTNSPRRARSVASQSIIAYTMSLGAENSVAYSNNSIAIPTNFTISVTTEILPVSMTKTSVDCTMYICGDSTECSNLLLQYGSFCTQLNRALTGIAVEQDKNTQEVFAQVKQIYKTPPIKDFGGFNFSQILPDPSKPSKRSFIEDLLFNKVTLADAGFIKQYGDCLGDIAARDLICAQKFNGLTVLPPLLTDEMIAQYTSALLAGTITSGWTFCAGAALQIPFAMQMAYRFNGIGVTQNVLYENQKLIANQFNSAIGKIQDSLSSTASALGKLQDVVNQNAQALNTLVKQLSSNFGAISSVLNDILSRLDKVEAEVQIDRLITGRLQSLQTYVTQQLIRAAEIRASANLAATKMSECVCGQSKRVDFCGKGYHLMSFPQSAPHGVVFLHVTYVPAQEKNFTTAPAICHDGKAHFPREGVFVSNGTHWFVTQRNFYEPQIITTDNTFVSGNCDVVIGIVNNTVYDPLQPELDSFKEELDKYFKNHTSPDVDLGDISGINASVVNIQKEIDRLNEVAKNLNESLIDLQELGKYEQYIKWPWYIWLGFIAGLIAIVMVTIMLCCMTSCCSCLKGCCSCGSCCKFDEDDSEPVLKGVKLHYT

SEQ ID NO: 845 - protein, 1273 aa, Artificial Sequence
  SARS-CoV-2/South Korea/SNU01/2020__EPI_ISL_411929 spike protein (1-1273)(G889C_L1034C)
MFVFLVLLPLVSSQCVNLTTRTQLPPAYTNSFTRGVYYPDKVFRSSVLHSTQDLFLPFFSNVTWFHAIHVSGTNGTKRFDNPVLPFNDGVYFASTEKSNIIRGWIFGTTLDSKTQSLLIVNNATNVVIKVCEFQFCNDPFLGVYYHKNNKSWMESEFRVYSSANNCTFEYVSQPFLMDLEGKQGNFKNLREFVFKNIDGYFKIYSKHTPINLVRDLPQGFWALEPLVDLPIGINITRFQTLLALHRSYLTPGDSSSGWTAGAAAYYVGYLQPRTFLLKYNENGTITDAVDCALDPLSETKCTLKSFTVEKGIYQTSNFRVQPTESIVRFPNITNLCPFGEVFNATRFASVYAWNRKRISNCVADYSVLYNSASFSTFKCYGVSPTKLNDLCFTNVYADSFVIRGDEVRQIAPGQTGKIADYNYKLPDDFTGCVIAWNSNNLDSKVGGNYNYLYRLFRKSNLKPFERDISTEIYQAGSTPCNGVEGFNCYFPLQSYGFQPTNGVGYQPYRVVVLSFELLHAPATVCGPKKSTNLVKNKCVNFNFNGLTGTGVLTESNKKFLPFQQFGRDIADTTDAVRDPQTLEILDITPCSFGGVSVITPGTNTSNQVAVLYQDVNCTEVPVAIHADQLTPTWRVYSTGSNVFQTRAGCLIGAEHVNNSYECDIPIGAGICASYQTQTNSPRRARSVASQSIIAYTMSLGAENSVAYSNNSIAIPTNFTISVTTEILPVSMTKTSVDCTMYICGDSTECSNLLLQYGSFCTQLNRALTGIAVEQDKNTQEVFAQVKQIYKTPPIKDFGGFNFSQILPDPSKPSKRSFIEDLLFNKVTLADAGFIKQYGDCLGDIAARDLICAQKFNGLTVLPPLLTDEMIAQYTSALLAGTITSGWTFCAGAALQIPFAMQMAYRFNGIGVTQNVLYENQKLIANQFNSAIGKIQDSLSSTASALGKLQDVVNQNAQALNTLVKQLSSNFGAISSVLNDILSRLDKVEAEVQIDRLITGRLQSLQTYVTQQLIRAAEIRASANLAATKMSECVCGQSKRVDFCGKGYHLMSFPQSAPHGVVFLHVTYVPAQEKNFTTAPAICHDGKAHFPREGVFVSNGTHWFVTQRNFYEPQIITTDNTFVSGNCDVVIGIVNNTVYDPLQPELDSFKEELDKYFKNHTSPDVDLGDISGINASVVNIQKEIDRLNEVAKNLNESLIDLQELGKYEQYIKWPWYIWLGFIAGLIAIVMVTIMLCCMTSCCSCLKGCCSCGSCCKFDEDDSEPVLKGVKLHYT

SEQ ID NO: 846 - protein, 1273 aa, Artificial Sequence
  SARS-CoV-2/China/WF0004/2020__EPI_ISL_413694 spike protein (1-1273)(G889C_L1034C)
MFVFLVLLPLVSSQCVNLTTRTQLPPAYTNSFTRGVYYPDKVFRSSVLHSTQDLFLPFFSNVTWFHAIHVSGTNGTKRFDNPVLPFNDGVYFASTEKSNIIRGWIFGTTLDSKTQSLLIVNNATNVVIKVCEFQFCNDPFLGVYYHKNNKSWTESEFRVYSSANNCTFEYVSQPFLMDLEGKQGNFKNLREFVFKNIDGYFKIYSKHTPINLVRDLPQGFSALEPLVDLPIGINITRFQTLLALHRSYLTPGDSSSGWTAGAAAYYVGYLQPRTFLLKYNENGTITDAVDCALDPLSETKCTLKSFTVEKGIYQTSNFRVQPTESIVRFPNITNLCPFGEVFNATRFASVYAWNRKRISNCVADYSVLYNSASFSTFKCYGVSPTKLNDLCFTNVYADSFVIRGDEVRQIAPGQTGKIADYNYKLPDDFTGCVIAWNSNNLDSKVGGNYNYLYRLFRKSNLKPFERDISTEIYQAGSTPCNGVEGFNCYFPLQSYGFQPTNGVGYQPYRVVVLSFELLHAPATVCGPKKSTNLVKNKCVNFNFNGLTGTGVLTESNKKFLPFQQFGRDIADTTDAVRDPQTLEILDITPCSFGGVSVITPGTNTSNQVAVLYQDVNCTEVPVAIHADQLTPTWRVYSTGSNVFQTRAGCLIGAEHVNNSYECDIPIGAGICASYQTQTNSPRRARSVASQSIIAYTMSLGAENSVAYSNNSIAIPTNFTISVTTEILPVSMTKTSVDCTMYICGDSTECSNLLLQYGSFCTQLNRALTGIAVEQDKNTQEVFAQVKQIYKTPPIKDFGGFNFSQILPDPSKPSKRSFIEDLLFNKVTLADAGFIKQYGDCLGDIAARDLICAQKFNGLTVLPPLLTDEMIAQYTSALLAGTITSGWTFCAGAALQIPFAMQMAYRFNGIGVTQNVLYENQKLIANQFNSAIGKIQDSLSSTASALGKLQDVVNQNAQALNTLVKQLSSNFGAISSVLNDILSRLDKVEAEVQIDRLITGRLQSLQTYVTQQLIRAAEIRASANLAATKMSECVCGQSKRFDFCGKGYHLMSFPQSAPHGVVFLHVTYVPAQEKNFTTAPAICHDGKAHFPREGVFVSNGTHWFVTQRNFYEPQIITTDNTFVSGNCDVVIGIVNNTVYDPLQPELDSFKEELDKYFKNHTSPDVDLGDISGINASVVNIQKEIDRLNEVAKNLNESLIDLQELGKYEQYIKWPWYIWLGFIAGLIAIVMVTIMLCCMTSCCSCLKGCCSCGSCCKFDEDDSEPVLKGVKLHYT

SEQ ID NO: 847 - protein, 1273 aa, Artificial Sequence
  SARS-CoV-2/China/WF0028/2020__EPI_ISL_413791 spike protein (1-1273)(G889C_L1034C)
MFVFLVLLPLVSSQCVNLTTRTQLPPAYTNSFTRGVYYPDKVFRSSVLHSTQDLFLPFFSNVTWFHAIHVSGTNGTKRFDNPVLPFNDGVYFASTEKSNIIRGWIFGTTLDSKTQSLLIVNNATNVVIKVCEFQFCNDPFLGVYYHKNNKSWMESEFRVYSSANNCTFEYVSQPFLMDLEGKQGNFKNLREFVFKNIDGYFKIYSKHTPINLVRDLPQGFSALEPLVDLPIGINITRFQTLLALHRSYLTPGDSSSGWTAGAAAYYVGYLQPRTFLLKYNENGTITDAVDCALDPLSETKCTLKSFTVEKGIYQTSNFRVQPTESIVRFPNITNLCPFGEVFNATRFASVYAWNRKRISNCVADYSVLYNSASFSTFKCYGVSPTKLNDLCFTNVYADSFVIRGDEVRQIAPGQTGKIADYNYKLPDDFTGCVIAWNSNNLDSKVGGNYNYLYRLFRKSNLKPFERDISTEIYQAGSTPCNGVEGFNCYFPLQSYGFQPTNGVGYQPYRVVVLSFELLHAPATVCGPKKSTNLVKNKCVNFNFNGLTGTGVLTESNKKFLPFQQFGRDIADTTDAVRDPQTLEILDITPCSFGGVSVITPGTNTSNQVAVLYQDVNCTEVPVAIHADQLTPTWRVYSTGSNVFQTRAGCLIGAEHVNNSYECDIPIGAGICASYQTQTNSPRRARSVASQSIIAYTMSLGAENSVAYSNNSIAIPTNFTISVTTEILPVSMTKTSVDCTMYICGDSTECSNLLLQYGSFCTQLNRALTGIAVEQDKNTQEVFAQVKQIYKTPPIKDFGGFNFSQILPDPSKPSKRSFIEDLLFNKVTLADAGFIKQYGDCLGDIAARDLICAQKFNGLTVLPPLLTDEMIAQYTSALLAGTITSGWTFCAGAALQIPFAMQMAYRFNGIGVTQNVLYENQKLIANQFNSAIGKIQDSLSSTASALGKLQDVVNQNAQALNTLVKQLSSNFGAISSVLNDILSRLDKVEAEVQIDRLITGRLQSLQTYVTQQLIRAAEIRASANLAATKMSECVCGQSKRVDFCGKGYHLMSFPQSAPHGVVFLHVTYVPAQEKNFTTAPAICHDGKAHFPREGVFVSNGTHWFVTQRNFYEPQIITTDNTFVSGNCDVVIGIVNNTVYDPLQPELESFKEELDKYFKNHTSPDVDLGDISGINASVVNIQKEIDRLNEVAKNLNESLIDLQELGKYEQYIKWPWYIWLGFIAGLIAIVMVTIMLCCMTSCCSCLKGCCSCGSCCKFDEDDSEPVLKGVKLHYT

SEQ ID NO: 848 - protein, 1273 aa, Artificial Sequence
  SARS-CoV-2/2019-nCoV/USA-CruiseA-18/2020__MT159716.1 spike protein (1-1273)(G889C_L1034C)
MFVFLVLLPLVSSQCVNLTTRTQLPPAYTNSFTRGVYYPDKVFRSSVLHSTQDLFLPFFSNVTWFHAIHVSGTNGTKRFDNPVLPFNDGVYFASTEKSNIIRGWIFGTTLDSKTQSLLIVNNATNVVIKVCEFQFCNDPFLGVYYHKNNKSWMESELRVYSSANNCTFEYVSQPFLMDLEGKQGNFKNLREFVFKNIDGYFKIYSKHTPINLVRDLPQGFSALEPLVDLPIGINITRFQTLLALHRSYLTPGDSSSGWTAGAAAYYVGYLQPRTFLLKYNENGTITDAVDCALDPLSETKCTLKSFTVEKGIYQTSNFRVQPTESIVRFPNITNLCPFGEVFNATRFASVYAWNRKRISNCVADYSVLYNSASFSTFKCYGVSPTKLNDLCFTNVYADSFVIRGDEVRQIAPGQTGKIADYNYKLPDDFTGCVIAWNSNNLDSKVGGNYNYLYRLFRKSNLKPFERDISTEIYQAGSTPCNGVEGFNCYFPLQSYGFQPTNGVGYQPYRVVVLSFELLHAPATVCGPKKSTNLVKNKCVNFNFNGLTGTGVLTESNKKFLPFQQFGRDIADTTDAVRDPQTLEILDITPCSFGGVSVITPGTNTSNQVAVLYQDVNCTEVPVAIHADQLTPTWRVYSTGSNVFQTRAGCLIGAEHVNNSYECDIPIGAGICASYQTQTNSPRRARSVASQSIIAYTMSLGAENSVAYSNNSIAIPTNFTISVTTEILPVSMTKTSVDCTMYICGDSTECSNLLLQYGSFCTQLNRALTGIAVEQDKNTQEVFAQVKQIYKTPPIKDFGGFNFSQILPDPSKPSKRSFIEDLLFNKVTLADAGFIKQYGDCLGDIAARDLICAQKFNGLTVLPPLLTDEMIAQYTSALLAGTITSGWTFCAGAALQIPFAMQMAYRFNGIGVTQNVLYENQKLIANQFNSAIGKIQDSLSSTASALGKLQDVVNQNAQALNTLVKQLSSNFGAISSVLNDILSRLDKVEAEVQIDRLITGRLQSLQTYVTQQLIRAAEIRASANLAATKMSECVCGQSKRVDFCGKGYHLMSFPQSAPHGVVFLHVTYVPAQEKNFTTAPAICHDGKAHFPREGVFVSNGTHWFVTQRNFYEPQIITTDNTFVSGNCDVVIGIVNNTVYDPLQPELDSFKEELDKYFKNHTSPDVDLGDISGINASVVNIQKEIDRLNEVAKNLNESLIDLQELGKYEQYIKWPWYIWLGFIAGLIAIVMVTIMLCCMTSCCSCLKGCCSCGSCCKFDEDDSEPVLKGVKLHYT

SEQ ID NO: 849 - protein, 1273 aa, Artificial Sequence
  SARS-CoV-2/SARS-CoV-2/Yunnan-01/human/2020/CHN__MT049951.1 spike protein (1-1273)(G889C_L1034C)
MFVFLVLLPLVSSQCVNLTTRTQLPPANTNSFTRGVYYPDKVFRSSVLHSTQDLFLPFFSNVTWFHAIHVSGTNGTKRFDNPVLPFNDGVYFASTEKSNIIRGWIFGTTLDSKTQSLLIVNNATNVVIKVCEFQFCNDPFLGVYYHKNNKSWMESEFRVYSSANNCTFEYVSQPFLMDLEGKQGNFKNLREFVFKNIDGYFKIYSKHTPINLVRDLPQGFSALEPLVDLPIGINITRFQTLLALHRSYLTPGDSSSGWTAGAAAYYVGYLQPRTFLLKYNENGTITDAVDCALDPLSETKCTLKSFTVEKGIYQTSNFRVQPTESIVRFPNITNLCPFGEVFNATRFASVYAWNRKRISNCVADYSVLYNSASFSTFKCYGVSPTKLNDLCFTNVYADSFVIRGDEVRQIAPGQTGKIADYNYKLPDDFTGCVIAWNSNNLDSKVGGNYNYLYRLFRKSNLKPFERDISTEIYQAGSTPCNGVEGFNCYFPLQSYGFQPTNGVGYQPYRVVVLSFELLHAPATVCGPKKSTNLVKNKCVNFNFNGLTGTGVLTESNKKFLPFQQFGRDIADTTDAVRDPQTLEILDITPCSFGGVSVITPGTNTSNQVAVLYQDVNCTEVPVAIHADQLTPTWRVYSTGSNVFQTRAGCLIGAEHVNNSYECDIPIGAGICASYQTQTNSPRRARSVASQSIIAYTMSLGAENSVAYSNNSIAIPTNFTISVTTEILPVSMTKTSVDCTMYICGDSTECSNLLLQYGSFCTQLNRALTGIAVEQDKNTQEVFAQVKQIYKTPPIKDFGGFNFSQILPDPSKPSKRSFIEDLLFNKVTLADAGFIKQYGDCLGDIAARDLICAQKFNGLTVLPPLLTDEMIAQYTSALLAGTITSGWTFCAGAALQIPFAMQMAYRFNGIGVTQNVLYENQKLIANQFNSAIGKIQDSLSSTASALGKLQDVVNQNAQALNTLVKQLSSNFGAISSVLNDILSRLDKVEAEVQIDRLITGRLQSLQTYVTQQLIRAAEIRASANLAATKMSECVCGQSKRVDFCGKGYHLMSFPQSAPHGVVFLHVTYVPAQEKNFTTAPAICHDGKAHFPREGVFVSNGTHWFVTQRNFYEPQIITTDNTFVSGNCDVVIGIVNNTVYDPLQPELDSFKEELDKYFKNHTSPDVDLGDISGINASVVNIQKEIDRLNEVAKNLNESLIDLQELGKYEQYIKWPWYIWLGFIAGLIAIVMVTIMLCCMTSCCSCLKGCCSCGSCCKFDEDDSEPVLKGVKLHYT

SEQ ID NO: 850 - protein, 1273 aa, Artificial Sequence
  SARS-CoV-2/USA/WA-UW292/2020__EPI_ISL_418077 spike protein (1-1273)(G889C_L1034C)
MFVFLVLLPLVSSQCVNLTTRTQLPPAYTNSFTRGVYYPDKVFRSSVLHSTQDLFLPFFSNVTWFHAIHVSGTNGTKRFDNPVLPFNDGVYFASTEKSNIIRGWIFGTTLDSKTQSLLIVNNATNVVIKVCEFQFCNDPFLGVYYHKNNKSWMESEFRVYSSANNCTFEYVSQPFLMDLEGKQGNFKNLREFVFKNIDGYFKIYSKHTPINLVRDLPQGFSALEPLVDLPIGINITRFQTLLALHRSYLTPGDSSSGWTAGAAAYYVGYLQPRTFLLKYNENGTITDAVDCALDPLSETKCTLKSFTVEKGIYQTSNFRVQPTESIVRFPNITNLCPFGEVFNATRFASVYAWNRKRISNCVADYSVLYNSASFSTFKCYGVSPTKLNDLCFTNVYADSFVIRGDEVRQIAPGQTGKIADYNYKLPDDFTGCVIAWNSNNLDSKVGGNYNYLYRLFRKSNLKPFERDISTEIYQASSTPCNGVEGFNCYFPLQSYGFQPTNGVGYQPYRVVVLSFELLHAPATVCGPKKSTNLVKNKCVNFNFNGLTGTGVLTESNKKFLPFQQFGRDIADTTDAVRDPQTLEILDITPCSFGGVSVITPGTNTSNQVAVLYQDVNCTEVPVAIHADQLTPTWRVYSTGSNVFQTRAGCLIGAEHVNNSYECDIPIGAGICASYQTQTNSPRRARSVASQSIIAYTMSLGAENSVAYSNNSIAIPTNFTISVTTEILPVSMTKTSVDCTMYICGDSTECSNLLLQYGSFCTQLNRALTGIAVEQDKNTQEVFAQVKQIYKTPPIKDFGGFNFSQILPDPSKPSKRSFIEDLLFNKVTLADAGFIKQYGDCLGDIAARDLICAQKFNGLTVLPPLLTDEMIAQYTSALLAGTITSGWTFCAGAALQIPFAMQMAYRFNGIGVTQNVLYENQKLIANQFNSAIGKIQDSLSSTASALGKLQDVVNQNAQALNTLVKQLSSNFGAISSVLNDILSRLDKVEAEVQIDRLITGRLQSLQTYVTQQLIRAAEIRASANLAATKMSECVCGQSKRVDFCGKGYHLMSFPQSAPHGVVFLHVTYVPAQEKNFTTAPAICHDGKAHFPREGVFVSNGTHWFVTQRNFYEPQIITTDNTFVSGNCDVVIGIVNNTVYDPLQPELDSFKEELDKYFKNHTSPDVDLGDISGINASVVNIQKEIDRLNEVAKNLNESLIDLQELGKYEQYIKWPWYIWLGFIAGLIAIVMVTIMLCCMTSCCSCLKGCCSCGSCCKFDEDDSEPVLKGVKLHYT

SEQ ID NO: 851 - protein, 1273 aa, Artificial Sequence
  SARS-CoV-2/Iceland/192/2020__EPI_ISL_417819 spike protein (1-1273)(G889C_L1034C)
MFVFFVLLPLVSSQCVNLTTRTQLPPAYTNSFTRGVYYPDKVFRSSVLHSTQDLFLPFFSNVTWFHAIHVSGTNGTKRFDNPVLPFNDGVYFASTEKSNIIRGWIFGTTLDSKTQSLLIVNNATNVVIKVCEFQFCNDPFLGVYYHKNNKSWMESEFRVYSSANNCTFEYVSQPFLMDLEGKQGNFKNLREFVFKNIDGYFKIYSKHTPINLVRDLPQGFSALEPLVDLPIGINITRFQTLLALHRSYLTPGDSSSGWTAGAAAYYVGYLQPRTFLLKYNENGTITDAVDCALDPLSETKCTLKSFTVEKGIYQTSNFRVQPTESIVRFPNITNLCPFGEVFNATRFASVYAWNRKRISNCVADYSVLYNSASFSTFKCYGVSPTKLNDLCFTNVYADSFVIRGDEVRQIAPGQTGKIADYNYKLPDDFTGCVIAWNSNNLDSKVGGNYNYLYRLFRKSNLKPFERDISTEIYQAGSTPCNGVEGFNCYFPLQSYGFQPTNGVGYQPYRVVVLSFELLHAPATVCGPKKSTNLVKNKCVNFNFNGLTGTGVLTESNKKFLPFQQFGRDIADTTDAVRDPQTLEILDITPCSFGGVSVITPGTNTSNQVAVLYQGVNCTEVPVAIHADQLTPTWRVYSTGSNVFQTRAGCLIGAEHVNNSYECDIPIGAGICASYQTQTNSPRRARSVASQSIIAYTMSLGAENSVAYSNNSIAIPTNFTISVTTEILPVSMTKTSVDCTMYICGDSTECSNLLLQYGSFCTQLNRALTGIAVEQDKNTQEVFAQVKQIYKTPPIKDFGGFNFSQILPDPSKPSKRSFIEDLLFNKVTLADAGFIKQYGDCLGDIAARDLICAQKFNGLTVLPPLLTDEMIAQYTSALLAGTITSGWTFCAGAALQIPFAMQMAYRFNGIGVTQNVLYENQKLIANQFNSAIGKIQDSLSSTASALGKLQDVVNQNAQALNTLVKQLSSNFGAISSVLNDILSRLDKVEAEVQIDRLITGRLQSLQTYVTQQLIRAAEIRASANLAATKMSECVCGQSKRVDFCGKGYHLMSFPQSAPHGVVFLHVTYVPAQEKNFTTAPAICHDGKAHFPREGVFVSNGTHWFVTQRNFYEPQIITTDNTFVSGNCDVVIGIVNNTVYDPLQPELDSFKEELDKYFKNHTSPDVDLGDISGINASVVNIQKEIDRLNEVAKNLNESLIDLQELGKYEQYIKWPWYIWLGFIAGLIAIVMVTIMLCCMTSCCSCLKGCCSCGSCCKFDEDDSEPVLKGVKLHYT

SEQ ID NO: 852 - protein, 1273 aa, Artificial Sequence
  SARS-CoV-2/Belgium/ULG-6939/2020__EPI_ISL_417020 spike protein (1-1273)(G889C_L1034C)
MFVFLVLLPLVSSQCVNLTTRTQLPPAYTNSFTRGVYYPDKVFRSSVLHSTQDLFLPFFSNVTWFHAIHVSGTNGTKRFDNPVLPFNDGVYFASTEKSNIIRGWIFGTTLDSKTQSLLIVNNATNVVIKVCEFQFCNDPFLGVYYHKNNKSWMESEFRVYSSANNCTFEYVSQPFLMDLEGKQGNFKNLREFVFKNIDGYFKIYSKHTPINLVRDLPQGFSALEPLVDLPIGINITRFQTLLALHRSYLTPGDSSSGWTAGAAAYYVGYLQPRTFLLKYNENGTITDAVDCALDPLSETKCTLKSFTVEKGIYQTSNFRVQPTESIVRFPNITNLCPFGEVFNATRFASVYAWNRKRISNCVADYSVLYNSASFSTFKCYGVSPTKLNDLCFTNVYADSFVIRGDEVRQIAPGQTGKIADYNYKLPDDFTGCVIAWNSNNLDSKVGGNYNYLYRLFRKSNLKPFERDISTEIYQAGSTPCNGVEGFNCYFPLQSYGFQPTNGVGYQPYRVVVLSFELLHAPATVCGPKKSTNLVKNKCVNFNFNGLTGTGVLTESNKKFLPFQQFGRDIADTTDAVRDPQTLEILDITPCSFGGVSVITPGTNTSNQVAVLYQGVNCTEVPVAIHADQLTPTWRVYSTGSNVFQTRAGCLIGAEHVNNSYECDIPIGAGICASYQTQTNSPRRARSVASQSIIAYTMSLGAENSVVYSNNSIAIPTNFTISVTTEILPVSMTKTSVDCTMYICGDSTECSNLLLQYGSFCTQLNRALTGIAVEQDKNTQEVFAQVKQIYKTPPIKDFGGFNFSQILPDPSKPSKRSFIEDLLFNKVTLADAGFIKQYGDCLGDIAARDLICAQKFNGLTVLPPLLTDEMIAQYTSALLAGTITSGWTFCAGAALQIPFAMQMAYRFNGIGVTQNVLYENQKLIANQFNSAIGKIQDSLSSTASALGKLQDVVNQNAQALNTLVKQLSSNFGAISSVLNDILSRLDKVEAEVQIDRLITGRLQSLQTYVTQQLIRAAEIRASANLAATKMSECVCGQSKRVDFCGKGYHLMSFPQSAPHGVVFLHVTYVPAQEKNFTTAPAICHDGKAHFPREGVFVSNGTHWFVTQRNFYEPQIITTDNTFVSGNCDVVIGIVNNTVYDPLQPELDSFKEELDKYFKNHTSPDVDLGDISGINASVVNIQKEIDRLNEVAKNLNESLIDLQELGKYEQYIKWPWYIWLGFIAGLIAIVMVTIMLCCMTSCCSCLKGCCSCGSCCKFDEDDSEPVLKGVKLHYT

SEQ ID NO: 853 - protein, 1273 aa, Artificial Sequence
  SARS-CoV-2/France/HF2496/2020__EPI_ISL_418231 spike protein (1-1273)(G889C_L1034C)
MFVFLVLLPLVSSQCVNLTTRTQLPPAYTNSFTRGVYYPDKVFRSSVLHSTQDLFLPFFSNVTWFHAIHVSGTNGTKRFDNPVLPFNDGVYFASTEKSNIIRGWIFGTTLDSKTQSLLIVNNATNVVIKVCEFQFCNDPFLGVYYHKNNKSWMESEFRVYSSANNCTFEYVSQPFLMDLEGKQGNFKNLREFVFKNIDGYFKIYSKHTPINLVRDLPQGFSALEPLVDLPIGINITRFQTLLALHRSYLTPGDSSSGWTAGAAAYYVGYLQPRTFLLKYNENGTITDAVDCALDPLSETKCTLKSFTVEKGIYQTSNFRVQPTESIVRFPNITNLCPFGEVFNATRFASVYAWNRKRISNCVADYSVLYNSASFSTFKCYGVSPTKLNDLCFTNVYADSFVIRGDEVRQIAPGQTGKIADYNYKLPDDFTGCVIAWNSNNLDSKVGGNYNYLYRLFRKSNLKPFERDISTEIYQAGSTPCNGVEGFNCYFPLQSYGFQPTNGVGYQPYRVVVLSFELLHAPATVCGPKKSTNLVKNKCVNFNFNGLTGTGVLTESNKKFLPFQQFGRDIADTTDAVRDPQTLEILDITPCSFGGVSVITPGTNTSNQVAVLYQGVNCTEVPVAIHADQLTPTWRVYSTGSNVFQTRAGCLIGAEHVNNSYECDIPIGAGICASYQTQTNSPRRARSVASQSIIAYTMSLGAENSVAYSNNSIAIPTNFTISVTTEILPVSMTKTSVDCTMYICGDSTECSNLLLQYGSFCTQLNRALTGIAVEQDKNTQEVFAQVKQIYKTPPIKDFGGFNFSQILPDPSKPSKRSFIEDLLFNKVTLADAGFIKQYGDCLGDIVARDLICAQKFNGLTVLPPLLTDEMIAQYTSALLAGTITSGWTFCAGAALQIPFAMQMAYRFNGIGVTQNVLYENQKLIANQFNSAIGKIQDSLSSTASALGKLQDVVNQNAQALNTLVKQLSSNFGAISSVLNDILSRLDKVEAEVQIDRLITGRLQSLQTYVTQQLIRAAEIRASANLAATKMSECVCGQSKRVDFCGKGYHLMSFPQSAPHGVVFLHVTYVPAQEKNFTTAPAICHDGKAHFPREGVFVSNGTHWFVTQRNFYEPQIITTDNTFVSGNCDVVIGIVNNTVYDPLQPELDSFKEELDKYFKNHTSPDVDLGDISGINASVVNIQKEIDRLNEVAKNLNESLIDLQELGKYEQYIKWPWYIWLGFIAGLIAIVMVTIMLCCMTSCCSCLKGCCSCGSCCKFDEDDSEPVLKGVKLHYT

SEQ ID NO: 854 - protein, 1273 aa, Artificial Sequence
  SARS-CoV-2/USA/WA-UW291/2020__EPI_ISL_418076 spike protein (1-1273)(G889C_L1034C)
MFVFLVLLPLVSSQCVNLTTRTQLPPAYTNSFTRGVYYPDKVFRSSVLHSTQDLFLPFFSNVTWFHAIHVSGTNGTKRFDNPVLPFNDGVYFASTEKSNIIRGWIFGTTLDSKTQSLLIVNNATNVVIKVCEFQFCNDPFLGVYYHKNNKSWMESEFRVYSSANNCTFEYVSQPFLMDLEGKQGNFKNLREFVFKNIDGYFKIYSKHTPINLVRDLPQGFSALEPLVDLPIGINITRFQTLLALHRSYLTPGDSSSGWTAGAAAYYVGYLQPRTFLLKYNENGTITDAVDCALDPLSETKCTLKSFTVEKGIYQTSNFRVQPTESIVRFPNITNLCPFGEVFNATRFASVYAWNRKRISNCVADYSVLYNSASFSTFKCYGVSPTKLNDLCFTNVYADSFVIRGDEVRQIAPGQTGKIADYNYKLPDDFTGCVIAWNSNNLDSKVGGNYNYLYRLFRKSNLKPFERDISTEIYQAGSTPCNGVEGFNCYFPLQSYGFQPTNGVGYQPYRVVVLSFELLHAPATVCGPKKSTNLVKNKCVNFNFNGLTGTGVLTESNKKFLPFQQFGRDIADTTDAVRDPQTLEILDITPCSFGGVSVITPGTNTSNQVAVLYQGVNCTEVPVAIHADQLTPTWRVYSTGSNVFQTRAGCLIGAEHVNNSYECDIPIGAGICASYQTQTNSPRRARSVASQSIIAYTMSLGAENSVAYSNNSIAIPTNFTISVTTEILPVSMTKTSVDCTMYICGDSTECSNLLLQYGSFCTQLNRALTGIAVEQDKNTQEVFAQVKQIYKTPPIKDFGGFNFSQILPDPSKPSKRSFIEDLLFNKVTLADAGFIKQYGDCLGDIAARDLICAQKFNGLTVLPPLLTDEMIAQYTSALLAGTITSGWTFCAGAALQIPFAMQMAYRFNGIGVTQNVLYENQKLIANQFNSAIGKIQYSLSSTASALGKLQDVVNQNAQALNTLVKQLSSNFGAISSVLNDILSRLDKVEAEVQIDRLITGRLQSLQTYVTQQLIRAAEIRASANLAATKMSECVCGQSKRVDFCGKGYHLMSFPQSAPHGVVFLHVTYVPAQEKNFTTAPAICHDGKAHFPREGVFVSNGTHWFVTQRNFYEPQIITTDNTFVSGNCDVVIGIVNNTVYDPLQPELDSFKEELDKYFKNHTSPDVDLGDISGINASVVNIQKEIDRLNEVAKNLNESLIDLQELGKYEQYIKWPWYIWLGFIAGLIAIVMVTIMLCCMTSCCSCLKGCCSCGSCCKFDEDDSEPVLKGVKLHYT

SEQ ID NO: 855 - protein, 1273 aa, Artificial Sequence
  SARS-CoV-2/Portugal/PT0034/2020__EPI_ISL_418019 spike protein (1-1273)(G889C_L1034C)
MFVFLVLLPLVSSQCVNLTTRTQLPPAYTNSFTRGVYYPDKVFRSSVLHSTQDLFLPFFSNVTWFHAIHVSGTNGTKRFDNPVLPFNDGVYFASTEKSNIIRGWIFGTTLDSKTQSLLIVNNATNVVIKVCEFQFCNDPFLGVYYHKNNKSWMESEFRVYSSANNCTFEYVSQPFLMDLEGKQGNFKNLREFVFKNIDGYFKIYSKHTPINLVRDLPQGFSALEPLVDLPIGINITRFQTLLALHRSYLTPGDSSSGWTAGAAAYYVGYLQPRTFLLKYNENGTITDAVDCALDPLSETKCTLKSFTVEKGIYQTSNFRVQPTESIVRFPNITNLCPFGEVFNATRFASVYAWNRKRISNCVADYSVLYNSASFSTFKCYGVSPTKLNDLCFTNVYADSFVIRGDEVRQIAPGQTGKIADYNYKLPDDFTGCVIAWNSNNLDSKVGGNYNYLYRLFRKSNLKPFERDISTEIYQAGSTPCNGVEGFNCYFPLQSYGFQPTNGVGYQPYRVVVLSFELLHAPATVCGPKKSTNLVKNKCVNFNFNGLTGTGVLTESNKKFLPFQQFGRDIADTTDAVRDPQTLEILDITPCSFGGVSVITPGTNTSNQVAVLYQGVNCTEVPVAIHADQLTPTWRVYSTGSNVFQTRAGCLIGAEHVNNSYECDIPIGAGICASYQTQTNSPRRARSVASQSIIAYTMSLGAENSVAYSNNSIAIPTNFTISVTTEILPVSMTKTSVDCTMYICGDSTECSNLLLQYGSFCTQLNRALTGIAVEQDKNTQEVFAQVKQIYKTPPIKDFGGFNFSQILPDPSKPSKRSFIEDLLFNKVTLADAGFIKQYGDCLGDIAARDLICAQKFNGLTVLPPLLTDEMIAQYTSALLAGTITSGWTFCAGAALQIPFAMQMAYRFNGIGVTQNVLYENQKLIANQFNSAIGKIQDSLSSTASALGKLQDVVNQNAQALNTLVKQLSSNFGAISSVLNDILSRLDKVEAEVQIDRLITGRLQSLQTYVTQQLIRAAEIRASANLAATKMSECVCGQSKRVDFCGKGYHLMSFPQSAPHGVVFLHVTYVPAQEKNFTTAPAICHDGKAHFPREGVFVSNGTHWFVTQRNFYEPQIITTDNTFVSGNCDVVIGIVNNTVYDPLQPELDSFKEELDKYFKNHTSPDVDLGDISGINASVVNIQKEIDRLNEVAKNLNESLIDLQELGKYEQYIKWPWYIWLGFIAGLIAIVMVTIMLCCITSCCSCLKGCCSCGSCCKFDEDDSEPVLKGVKLHYT

SEQ ID NO: 856 - protein, 1273 aa, Artificial Sequence
  SARS-CoV-2/Iceland/202/2020__EPI_ISL_417750 spike protein (1-1273)(G889C_L1034C)
MFVFLVLLPLVSSQCVNLTTRTQLPPAYTNSFTRGVYYPDKVFRSSVLHSTQDLFLPFFSNVTWFHAIHVSGTNGTKRFDNPVLPFNDGVYFASTEKSNIIRGWIFGTTLDSKTQSLLIVNNATNVVIKVCEFQFCNDPFLGVYYHKNNKSWMESEFRVYSSANNCTFEYVSQPFLMDLEGKQGNFKNLREFVFKNIDGYFKIYSKHTPINLVRDLPQGFSALEPLVDLPIGINITRFQTLLALHRSYLTPGDSSSGWTAGAAAYYVGYLQPRTFLLKYNENGTITDAVDCALDPLSETKCTLKSFTVEKGIYQTSNFRVQPTESIVRFPNITNLCPFGEVFNATRFASVYAWNRKRISNCVADYSVLYNSASFSTFKCYGVSPTKLNDLCFTNVYADSFVIRGDEVRQIAPGQTGKIADYNYKLPDDFTGCVIAWNSNNLDSKVGGNYNYLYRLFRKSNLKPFERDISTEIYQAGSTPCNGVEGFNCYFPLQSYGFQPTNGVGYQPYRVVVLSFELLHAPATVCGPKKSTNLVKNKCVNFNFNGLTGTGVLTESNKKFLPFQQFGRDIADTTDAVRDPQTLEILDITPCSFGGVSVITPGTNTSNQVAVLYQDVNCTEVPVAIHADQLTPTWRVYSTGSNVFQTRAGCLIGAEHVNNSYECDIPIGAGICASYQTQTNSPRRARSVASQSIIAYTMSLGAENSVAYSNNSIAIPTNFTISVTTEILPVSMTKTSVDCTMYICGDSTECSNLLLQYGSFCTQLNRALTGIAVEQDKNTQEVFAQVKQIYKTPPIKDFGGFNFSQILPDPSKPSKRSFIEDLLFNKVTLADAGFIKQYGDCLGDIAARDLICAQKFNGLTVLPPLLTDEMIAQYTSALLAGTITSGWTFCAGAALQIPFAMQMAYRFNGIGVTQNVLYENQKLIANQFNSAIGKIQDSLSSTASALGKLQDVVNQNAQALNTLVKQLSSNFGAISSVLNDILSRLDKVEAEVQIDRLITGRLQSLQTYVTQQLIRAAEIRASANLAATKMSECVCGQSKRVDFCGKGYHLMSFPQSAPHGVVFLHVTYVPAQEKNFTTAPAICHDGKAHFPREGVFVSNGTHWFVTQRNFYEPQIITTDNTFVSGNCDVVIGIVNNTVYDPLQPELDSFKEELDKYFKNHTSPDVDLGDIPGINASVVNIQKEIDRLNEVAKNLNESLIDLQELGKYEQYIKWPWYIWLGFIAGLIAIVMVTIMLCCMTSCCSCLKGCCSCGSCCKFDEDDSEPVLKGVKLHYT

SEQ ID NO: 857 - protein, 1273 aa, Artificial Sequence
  SARS-CoV-2/USA/WA-UW261/2020__EPI_ISL_418046 spike protein (1-1273)(G889C_L1034C)
MFVFLVLLPLVSSQCVNLTTRTQLPPAYTNSFTRGVYYPDKVFRSSVLHSTQDLFLPFFSNVTWFHAIHVSGTNGTKRFDNPVLPFNDGVYFASTEKSNIIRGWIFGTTLDSKTQSLLIVNNATNVVIKVCEFQFCNDPFLGVYYHKNNKSWMESEFRVYSSANNCTFEYVSQPFLMDLEGKQGNFKNLREFVFKNIDGYFKIYSKHTPINLVRDLPQGFSALEPLVDLPIGINITRFQTLLALHRSYLTPGDSSSGWTAGAAAYYVGYLQPRTFLLKYNENGTITDAVDCALDPLSETKCTLKSFTVEKGIYQTSNFRVQPTESIVRFPNITNLCPFGEVFNATRFTSVYAWNRKRISNCVADYSVLYNSASFSTFKCYGVSPTKLNDLCFTNVYADSFVIRGDEVRQIAPGQTGKIADYNYKLPDDFTGCVIAWNSNNLDSKVGGNYNYLYRLFRKSNLKPFERDISTEIYQAGSTPCNGVEGFNCYFPLQSYGFQPTNGVGYQPYRVVVLSFELLHAPATVCGPKKSTNLVKNKCVNFNFNGLTGTGVLTESNKKFLPFQQFGRDIADTTDAVRDPQTLEILDITPCSFGGVSVITPGTNTSNQVAVLYQDVNCTEVPVAIHADQLTPTWRVYSTGSNVFQTRAGCLIGAEHVNNSYECDIPIGAGICASYQTQTNSPRRARSVASQSIIAYTMSLGAENSVAYSNNSIAIPTNFTISVTTEILPVSMTKTSVDCTMYICGDSTECSNLLLQYGSFCTQLNRALTGIAVEQDKNTQEVFAQVKQIYKTPPIKDFGGFNFSQILPDPSKPSKRSFIEDLLFNKVTLADAGFIKQYGDCLGDIAARDLICAQKFNGLTVLPPLLTDEMIAQYTSALLAGTITSGWTFCAGAALQIPFAMQMAYRFNGIGVTQNVLYENQKLIANQFNSAIGKIQDSLSSTASALGKLQDVVNQNAQALNTLVKQLSSNFGAISSVLNDILSRLDKVEAEVQIDRLITGRLQSLQTYVTQQLIRAAEIRASANLAATKMSECVCGQSKRVDFCGKGYHLMSFPQSAPHGVVFLHVTYVPAQEKNFTTAPAICHDGKAHFPREGVFVSNGTHWFVTQRNFYEPQIITTDNTFVSGNCDVVIGIVNNTVYDPLQPELDSFKEELDKYFKNHTSPDVDLGDISGINASVVNIQKEIDRLNEVAKNLNESLIDLQELGKYEQYIKWPWYIWLGFIAGLIAIVMVTIMLCCMTSCCSCLKGCCSCGSCCKFDEDDSEPVLKGVKLHYT

SEQ ID NO: 858 - protein, 1273 aa, Artificial Sequence
  SARS-CoV-2/Portugal/PT0035/2020__EPI_ISL_418020 spike protein (1-1273)(G889C_L1034C)
MFVFLVLLPLVSSQCVNLTTRTQLPPAYTNSFTRGVYYPDKVFRSSVLHSTQDLFLPFFSNVTWFHAIHVSGTNGTKRFDNPVLPFNDGVYFASTEKSNIIRGWIFGTTLDSKTQSLLIVNNATNVVIKVCEFQFCNDPFLGVYYHKNNKSWMESEFRVYSSANNCTFEYVSQPFLMDLEGKQGNFKNLREFVFKNIDGYFKIYSKHTPINLVRDLPQGFSALEPLVDLPIGINITRFQTLLALHRSYLTPGDSSSGWTAGAAAYYVGYLQPRTFLLKYNENGTITDAVDCALDPLSETKCTLKSFTVEKGIYQTSNFRVQPTESIVRFPNITNLCPFGEVFNATRFASVYAWNRKRISNCVADYSVLYNSASFSTFKCYGVSPTKLNDLCFTNVYADSFVIRGDEVRQIAPGQTGKIADYNYKLPDDFTGCVIAWNSNNLDSKVGGNYNYLYRLFRKSNLKPFERDISTEIYQAGSTPCNGVEGFNCYFPLQSYGFQPTNGVGYQPYRVVVLSFELLHAPATVCGPKKSTNLVKNKCVNFNFNGLTGTGVLTESNKKFLPFQQFGRDIADTTDAVRDPQTLEILDITPCSFGGVSVITPGTNTSNQVAVLYQDVNCTEVPVAIHADQLTPTWRVYSTGSNVFQTRAGCLIGAEHVNNSYECDIPIGAGICASYQTQTNSPRRARSVASQSIIAYTMSLGAENSVAYSNNSIAIPTNFTISVTTEILPVSMTKTSVDCTMYICGDSTECSNLLLQYGSFCTQLNRALTGIAVEQDKNTQEVFAQVKQIYKTPPIKDFGGFNFSQILPDPSKPSKRSFIEDLLFNKVTLADAGFIKQYGDCLGDISARDLICAQKFNGLTVLPPLLTDEMIAQYTSALLAGTITSGWTFCAGAALQIPFAMQMAYRFNGIGVTQNVLYENQKLIANQFNSAIGKIQDSLSSTASALGKLQDVVNQNAQALNTLVKQLSSNFGAISSVLNDILSRLDKVEAEVQIDRLITGRLQSLQTYVTQQLIRAAEIRASANLAATKMSECVCGQSKRVDFCGKGYHLMSFPQSAPHGVVFLHVTYVPAQEKNFTTAPAICHDGKAHFPREGVFVSNGTHWFVTQRNFYEPQIITTDNTFVSGNCDVVIGIVNNTVYDPLQPELDSFKEELDKYFKNHTSPDVDLGDISGINASVVNIQKEIDRLNEVAKNLNESLIDLQELGKYEQYIKWPWYIWLGFIAGLIAIVMVTIMLCCMTSCCSCLKGCCSCGSCCKFDEDDSEPVLKGVKLHYT

SEQ ID NO: 859 - protein, 1273 aa, Artificial Sequence
  SARS-CoV-2/USA/NY-NYUMC7/2020__EPI_ISL_418192 spike protein (1-1273)(G889C_L1034C)
MFVFLVLLPLVSSQCVNLTTRTQLPPAYTNSFTRGVYYPDKVFRSSVLHSTQDLFLPFFSNVTWFHAIHVSGTNGTKRFDNPVLPFNDGVYFASTEKSNIIRGWIFGTTLDSKTQSLLIVNNATNVVIKVCEFQFCNDPFLGVYHHKNNKSWMESEFRVYSSANNCTFEYVSQPFLMDLEGKQGNFKNLREFVFKNIDGYFKIYSKHTPINLVRDLPQGFSALEPLVDLPIGINITRFQTLLALHRSYLTPGDSSSGWTAGAAAYYVGYLQPRTFLLKYNENGTITDAVDCALDPLSETKCTLKSFTVEKGIYQTSNFRVQPTESIVRFPNITNLCPFGEVFNATRFASVYAWNRKRISNCVADYSVLYNSASFSTFKCYGVSPTKLNDLCFTNVYADSFVIRGDEVRQIAPGQTGKIADYNYKLPDDFTGCVIAWNSNNLDSKVGGNYNYLYRLFRKSNLKPFERDISTEIYQAGSTPCNGVEGFNCYFPLQSYGFQPTNGVGYQPYRVVVLSFELLHAPATVCGPKKSTNLVKNKCVNFNFNGLTGTGVLTESNKKFLPFQQFGRDIADTTDAVRDPQTLEILDITPCSFGGVSVITPGTNTSNQVAVLYQGVNCTEVPVAIHADQLTPTWRVYSTGSNVFQTRAGCLIGAEHVNNSYECDIPIGAGICASYQTQTNSPRRARSVASQSIIAYTMSLGAENSVAYSNNSIAIPTNFTISVTTEILPVSMTKTSVDCTMYICGDSTECSNLLLQYGSFCTQLNRALTGIAVEQDKNTQEVFAQVKQIYKTPPIKDFGGFNFSQILPDPSKPSKRSFIEDLLFNKVTLADAGFIKQYGDCLGDIAARDLICAQKFNGLTVLPPLLTDEMIAQYTSALLAGTITSGWTFCAGAALQIPFAMQMAYRFNGIGVTQNVLYENQKLIANQFNSAIGKIQDSLSSTASALGKLQDVVNQNAQALNTLVKQLSSNFGAISSVLNDILSRLDKVEAEVQIDRLITGRLQSLQTYVTQQLIRAAEIRASANLAATKMSECVCGQSKRVDFCGKGYHLMSFPQSAPHGVVFLHVTYVPAQEKNFTTAPAICHDGKAHFPREGVFVSNGTHWFVTQRNFYEPQIITTDNTFVSGNCDVVIGIVNNTVYDPLQPELDSFKEELDKYFKNHTSPDVDLGDISGINASVVNIQKEIDRLNEVAKNLNESLIDLQELGKYEQYIKWPWYIWLGFIAGLIAIVMVTIMLCCMTSCCSCLKGCCSCGSCCKFDEDDSEPVLKGVKLHYT

SEQ ID NO: 860 - protein, 1273 aa, Artificial Sequence
  SARS-CoV-2/Iceland/189/2020__EPI_ISL_417709 spike protein (1-1273)(G889C_L1034C)
MFVFLVLLPLVSSQCVNLTTRTQLPPAYTNSFTRGVYYPDKVFRSSVLHSTQDLFLPFFSNVTWFHAIHVSGTNGTKRFDNPVLPFNDGVYFASTEKSNIIRGWIFGTTLDSKTQSLLIVNNATNVVIKVCEFQFCNDPFLGVYYHKNNKSWMESEFRVYSSANNCTFEYVSQPFLMDLEGKQGNFKNLREFVFKNIDGYFKIYSKHTPINLVRDLPQGFSALEPLVDLPIGINITRFQTLLALHRSYLTPGDSSSGWTAGAAAYYVGYLQPRTFLLKYNENGTITDAVDCALDPLSETKCTLKSFTVEKGIYQTSNFRVQPTESIVRFPNITNLCPFGEVFNATRFASVYAWNRKRISNCVADYSVLYNSASFSTFKCYGVSPTKLNDLCFTNVYADSFVIRGDEVRQIAPGQTGKIADYNYKLPDDFTGCVIAWNSNNLDSKVGGNYNYLYRLFRKSNLKPFERDISTEIYQAGSTPCNGVEGFNCYFPLQSYGFQPTNGVGYQPYRVVVLSFELLHAPATVCGPKKSTNLVKNKCVNFNFNGLTGTGVLTESNKKFLPFQQFGRDIADTTDAVRDPQTLEILDITPCSFGGVSVITPGTNTSNQVAVLYQGVNCTEVPVAIHADQLTPTWRVYSTGSNVFQTRAGCLIGAEHVNNSYECDIPIGAGICASYQTQTNSPRRARSVASQSIIAYTMSLGAENSVAYSNNSIAIPTNFTISVTTEILPVSMTKTSVDCTMYICGDSTECSNLLLQYGSFCTQLNRALTGIAVEQDKNTQEVFAQVKQIYKTPPIKDFGGFNFSQILPDPSKPSKRSFIEDLLFNKVTLADAGFTKQYGDCLGDIAARDLICAQKFNGLTVLPPLLTDEMIAQYTSALLAGTITSGWTFCAGAALQIPFAMQMAYRFNGIGVTQNVLYENQKLIANQFNSAIGKIQDSLSSTASALGKLQDVVNQNAQALNTLVKQLSSNFGAISSVLNDILSRLDKVEAEVQIDRLITGRLQSLQTYVTQQLIRAAEIRASANLAATKMSECVCGQSKRVDFCGKGYHLMSFPQSAPHGVVFLHVTYVPAQEKNFTTAPAICHDGKAHFPREGVFVSNGTHWFVTQRNFYEPQIITTDNTFVSGNCDVVIGIVNNTVYDPLQPELDSFKEELDKYFKNHTSPDVDLGDISGINASVVNIQKEIDRLNEVAKNLNESLIDLQELGKYEQYIKWPWYIWLGFIAGLIAIVMVTIMLCCMTSCCSCLKGCCSCGSCCKFDEDDSEPVLKGVKLHYT

SEQ ID NO: 861 - protein, 1273 aa, Artificial Sequence
  SARS-CoV-2/Australia/NSW56/2020__EPI_ISL_417408 spike protein (1-1273)(G889C_L1034C)
MFVFLVLLPLVSSQCVNLTTRTQLPPAYTNSFTRGVYYPDKVFRSSVLHSTQDLFLPFFSNVTWFHAIHVSGTNGTKRFDNPVLPFNDGVYFASTEKSNIIRGWIFGTTLDSKTQSLLIVNNATNVVIKVCEFQFCNDPFLGVYYHKNNKSWMESEFRVYSSANNCTFEYVSQPFLMDLEGKQGNFKNLREFVFKNIDGYFKIYSKHTPINLVRDLPQGFSALEPLVDLPIGINITRFQTLLALHRSYLTPGDSSSGWTAGAAAYYVGYLQPRTFLLKYNENGTITDAVDCALDPLSETKCTLKSFTVEKGIYQTSNFRVQPTESIVRFPNITNLCPFGEVFNATRFASVYAWNRKRISNCVADYSVLYNSASFSTFKCYGVSPTKLNDLCFTNVYADSFVIRGDEVRQIAPGQTGKIADYNYKLPDDFTGCVIAWNSNNLDSKVGGNYNYLYRLFRKSNLKPFERDISTEIYQAGSTPCNGVEGFNCYFPLQSYGFQPTNGVGYQPYRVVVLSFELLHAPATVCGPKKSTNLVKNKCVNFNFNGLTGTGVLTESNKKFLPFQQFGRDIADTTDAVRDPQTLEILDITPCSFGGVSVITPGTNTSNQVAVLYQDVNCTEVPVAIHADQLTPTWRVYSTGSNVFQTRAGCLIGAEHVNNSYECDIPIGAGICASYQTQTNSPRRARSVASQSIIAYTMSLGAENSVAYSNNSIAIPTNFTISVTTEILPVSMTKTSVDCTMYICGDSTECSNLLLQYGSFCTQLNRALTGIAVEQDKNTQEVFAQVKQIYKTPPIKDFGGFNFSQILPDSSKPSKRSFIEDLLFNKVTLADAGFIKQYGDCLGDIAARDLICAQKFNGLTVLPPLLTDEMIAQYTSALLAGTITSGWTFCAGAALQIPFAMQMAYRFNGIGVTQNVLYENQKLIANQFNSAIGKIQDSLSSTASALGKLQDVVNQNAQALNTLVKQLSSNFGAISSVLNDILSRLDKVEAEVQIDRLITGRLQSLQTYVTQQLIRAAEIRASANLAATKMSECVCGQSKRVDFCGKGYHLMSFPQSAPHGVVFLHVTYVPAQEKNFTTAPAICHDGKAHFPREGVFVSNGTHWFVTQRNFYEPQIITTDNTFVSGNCDVVIGIVNNTVYDPLQPELDSFKEELDKYFKNHTSPDVDLGDISGINASVVNIQKEIDRLNEVAKNLNESLIDLQELGKYEQYIKWPWYIWLGFIAGLIAIVMVTIMLCCMTSCCSCLKGCCSCGSCCKFDEDDSEPVLKGVKLHYT

SEQ ID NO: 862 - protein, 1273 aa, Artificial Sequence
  SARS-CoV-2/Iceland/280/2020__EPI_ISL_417608 spike protein (1-1273)(G889C_L1034C)
MFVFLVLLPLVSSQCVNLTTRTQLPPAYTNSFTRGVYYPDKVFRSSVLHSTQDLFLPFFSNVTWFHAIHVSGTNGTKRFDNPVLPFNDGVYFASTEKSNIIRGWIFGTTLDSKTQSLLIVNNATNVVIKVCEFQFCNDPFLGVYYHKNNKSWMESEFRVYSSANNCTFEYVSQPFLMDLEGKQGNFKNLREFVFKNIDGYFKIYSKHTPINLVRDLPQGFSALEPLVDLPIGINITRFQTLLALHRSYLTPGDSSSGWTAGAAAYYVGYLQPRTFLLKYNENGTITDAVDCALDPLSETKCTLKSFTVEKGIYQTSNFRVQPTESIVRFPNITNLCPFGEVFNATRFASVYAWNRKRISNCVADYSVLYNSASFSTFKCYGVSPTKLNDLCFTNVYADSFVIRGDEVRQIAPGQTGKIADYNYKLPDDFTGCVIAWNSNNLDSKVGGNYNYLYRLFRKSNLKPFERDISTEIYQAGSTPCNGVEGFNCYFPLQSYGFQPTNGVGYQPYRVVVLSFELLHAPATVCGPKKSTNLVKNKCVNFNFNGLTGTGVLTESNKKFLPFQQFGRDIADTTDAVRDPQTLEILDITPCSFGGVSVITPGTNTSNQVAVLYQGVNCTEVPVAIHADQLTPTWRVYSTGSNVFQTRAGCLIGAEHVNNSYECDIPIGAGICASYHTQTNSPRRARSVASQSIIAYTMSLGAENSVAYSNNSIAIPTNFTISVTTEILPVSMTKTSVDCTMYICGDSTECSNLLLQYGSFCTQLNRALTGIAVEQDKNTQEVFAQVKQIYKTPPIKDFGGFNFSQILPDPSKPSKRSFIEDLLFNKVTLADAGFIKQYGDCLGDIAARDLICAQKFNGLTVLPPLLTDEMIAQYTSALLAGTITSGWTFCAGAALQIPFAMQMAYRFNGIGVTQNVLYENQKLIANQFNSAIGKIQDSLSSTASALGKLQDVVNQNAQALNTLVKQLSSNFGAISSVLNDILSRLDKVEAEVQIDRLITGRLQSLQTYVTQQLIRAAEIRASANLAATKMSECVCGQSKRVDFCGKGYHLMSFPQSAPHGVVFLHVTYVPAQEKNFTTAPAICHDGKAHFPREGVFVSNGTHWFVTQRNFYEPQIITTDNTFVSGNCDVVIGIVNNTVYDPLQPELDSFKEELDKYFKNHTSPDVDLGDISGINASVVNIQKEIDRLNEVAKNLNESLIDLQELGKYEQYIKWPWYIWLGFIAGLIAIVMVTIMLCCMTSCCSCLKGCCSCGSCCKFDEDDSEPVLKGVKLHYT

SEQ ID NO: 863 - protein, 1273 aa, Artificial Sequence
  SARS-CoV-2/Iceland/247/2020__EPI_ISL_417575 spike protein (1-1273)(G889C_L1034C)
MFVFLVLLPLVSSQCVNLTTRTQLPPAYTNSFTRGVYYPDKVFRSSVLHSTQDLFLPFFSNVTWFHAIHVSGTNGTKRFDNPVLPFNDGVYFASTEKSNIIRGWIFGTTLDSKTQSLLIVNNATNVVIKVCEFQFCNDPFLGVYYHKNNKSWMESEFRVYSSANNCTFEYVSQPFLMDLEGKQGNFKNLREFVFKNIDGYFKIYSKHTPINLVRDLPQGFSALEPLVDLPIGINITRFQTLLALHRSYLTPGDSSSGWTAGAAAYYVGYLQPRTFLLKYNENGTITDAVDCALDPLSETKCTLKSFTVEKGIYQTSNFRVQPTESIVRFPNITNLCPFGEVFNATRFASVYAWNRKRISNCVADYSVLYNSASFSTFKCYGVSPTKLNDLCFTNVYADSFVIRGDEVRQIAPGQTGKIADYNYKLPDDFTGCVIAWNSNNLDSKVGGNYNYLYRLFRKSNLKPFERDISTEIYQAGSTPCNGVEGFNCYFPLQSYGFQPTNGVGYQPYRVVVLSFELLHAPATVCGPKKSTNLVKNKCVNFNFNGLTGTGVLTESNKKFLPFQQFGRDIADTTDAVRDPQTLEILDITPCSFGGVSVITPGTNTSNQVAVLYQGVNCTEVPVAIHADQLTPTWRVYSTGSNVFQTRAGCLIGAEHVNNSYECDIPIGAGICASYQTQTNSPRRARSVASQSIIAYTMSLGAENSVAYSNNSIAIPTNFTISVTTEILPVSMTKTSVDCTMYICGDSTECSNLLLQYGSFCTQLNRALTGIAVEQDKNTQEVFAQVKQIYKTPPIKDFGGFNFSQILPDPSKPSKRSFIEDLLFNKVTLADAGFIKQYGDCLGDIAARDLICAQKFNGLTVLPPLLTDEMIAQYTSALLAGTITSGWTFCAGAALQIPFAMQMAYRFNGIGVTQNVLYENQKLIANQFNSAIGKIQDSLSSTASALGKLQDVVNQNAQALNTLVKQLSSNFGAISSVLNDILSRLDKVEAEVQIDRLITGRLQSLQTYVTQQLIRAAEIRASANLAATKMSECVCGQSKRVDFCGKGYHLMSFPQSAPHGVVFLHVTYVPAQEKNFTTAPAICHDGKAHFPREGVFVSNGTHWFVTQRNFYEPQIITTDNTFVSGNCDVVIGIVNNTVYDPLQPELDSFKEELDKYFKNHTSPDVDLGDISGINASVVNIQKEIDRLNEVAKNLNESLIDLQELGKYEQYIKWPWYIWLGFIAGLIAIVIVTIMLCCMTSCCSCLKGCCSCGSCCKFDEDDSEPVLKGVKLHYT

SEQ ID NO: 864 - protein, 1273 aa, Artificial Sequence
  SARS-CoV-2/Iceland/238/2020__EPI_ISL_417566 spike protein (1-1273)(G889C_L1034C)
MFVFLVLLPLVSSQCVNLTTRTQLPPAYTNSFTRGVYYPDKVFRSSVLHSTQDLFLPFFSNVTWFHAIHVSGTNGTKRFDNPVLPFNDGVYFASTEKSNIIRGWIFGTTLDSKTQSLLIVNNATNVVIKVCEFQFCNDPFLGVYYHKNNKSWMESEFRVYSSANNCTFEYVSQPFLMDLEGKQGNFKNLREFVFKNIDGYFKIYSKHTPINLVRDLPQGFSALEPLVDLPIGINITRFQTLLALHRSYLTPGDSSSGWTAGAAAYYVGYLQPRTFLLKYNENGTITDAVDCALDPLSETKCTLKSFTVEKGIYQTSNFRVQPTESIVRFPNITNLCPFGEVFNATRFASVYAWNRKRISNCVADYSVLYNSASFSTFKCYGVSPTKLNDLCFTNVYADSFVIRGDEVRQIAPGQTGKIADYNYKLPDDFTGCVIAWNSNNLDSKVGGNYNYLYRLFRKSNLKPFERDISTEIYQAGSTPCNGVEGFNCYFPLQSYGFQPTNGVGYQPYRVVVLSFELLHAPATVCGPKKSTNLVKNKCVNFNFNGLTGTGVLTESNKKFLPFQQFGRDIADTTDAVRDPQTLEILDITPCSFGGVSVITPGTNTSNQVAVLYQGVNCTEVPVAIHADQLTPTWRVYSTGSNVFQTRAGCLIGAEHVNNSYECDIPIGAGICASYQTQTNSPRRARSVASQSIIAYTMSLGAENSVAYSNNSIAIPTNFTISVTTEILPVSMTKTSVDCTMYICGDSTECSNLLLQYGSFCTQLNRALTGIAVEQDKNTQEVFAQVKQIYKTPPIKDFGGFNFSQILPDPSKPSKRSFIEDLLFNKVTLADVGFIKQYGDCLGDIAARDLICAQKFNGLTVLPPLLTDEMIAQYTSALLAGTITSGWTFCAGAALQIPFAMQMAYRFNGIGVTQNVLYENQKLIANQFNSAIGKIQDSLSSTASALGKLQDVVNQNAQALNTLVKQLSSNFGAISSVLNDILSRLDKVEAEVQIDRLITGRLQSLQTYVTQQLIRAAEIRASANLAATKMSECVCGQSKRVDFCGKGYHLMSFPQSAPHGVVFLHVTYVPAQEKNFTTAPAICHDGKAHFPREGVFVSNGTHWFVTQRNFYEPQIITTDNTFVSGNCDVVIGIVNNTVYDPLQPELDSFKEELDKYFKNHTSPDVDLGDISGINASVVNIQKEIDRLNEVAKNLNESLIDLQELGKYEQYIKWPWYIWLGFIAGLIAIVMVTIMLCCMTSCCSCLKGCCSCGSCCKFDEDDSEPVLKGVKLHYT

SEQ ID NO: 865 - protein, 1273 aa, Artificial Sequence
  SARS-CoV-2/Greece/16/2020__EPI_ISL_418265 spike protein (1-1273)(G889C_L1034C)
MFVFLVLLPLVSSQCVNLTTRTQLPPAYTNSFTRGVYYPDKVFRSSVLHSTQDLFLPFFSNVTWFHAIHVSGTNGTKRFDNPVLPFNDGVYFASTEKSNIIRGWIFGTTLDSKTQSLLIVNNATNVVIKVCEFQFCNDPFLGVYYHKNNKSWMESEFRVYSSANNCTFEYVSQPFLMDLEGKQGNFKNLREFVFKNVDGYFKIYSKHTPINLVRDLPQGFSALEPLVDLPIGINITRFQTLLALHRSYLTPGDSSSGWTAGAAAYYVGYLQPRTFLLKYNENGTITDAVDCALDPLSETKCTLKSFTVEKGIYQTSNFRVQPTESIVRFPNITNLCPFGEVFNATRFASVYAWNRKRISNCVADYSVLYNSASFSTFKCYGVSPTKLNDLCFTNVYADSFVIRGDEVRQIAPGQTGKIADYNYKLPDDFTGCVIAWNSNNLDSKVGGNYNYLYRLFRKSNLKPFERDISTEIYQAGSTPCNGVEGFNCYFPLQSYGFQPTNGVGYQPYRVVVLSFELLHAPATVCGPKKSTNLVKNKCVNFNFNGLTGTGVLTESNKKFLPFQQFGRDIADTTDAVRDPQTLEILDITPCSFGGVSVITPGTNTSNQVAVLYQDVNCTEVPVAIHADQLTPTWRVYSTGSNVFQTRAGCLIGAEHVNNSYECDIPIGAGICASYQTQTNSPRRARSVASQSIIAYTMSLGAENSVAYSNNSIAIPTNFTISVTTEILPVSMTKTSVDCTMYICGDSTECSNLLLQYGSFCTQLNRALTGIAVEQDKNTQEVFAQVKQIYKTPPIKDFGGFNFSQILPDPSKPSKRSFIEDLLFNKVTLADAGFIKQYGDCLGDIAARDLICAQKFNGLTVLPPLLTDEMIAQYTSALLAGTITSGWTFCAGAALQIPFAMQMAYRFNGIGVTQNVLYENQKLIANQFNSAIGKIQDSLSSTASALGKLQDVVNQNAQALNTLVKQLSSNFGAISSVLNDILSRLDKVEAEVQIDRLITGRLQSLQTYVTQQLIRAAEIRASANLAATKMSECVCGQSKRVDFCGKGYHLMSFPQSAPHGVVFLHVTYVPAQEKNFTTAPAICHDGKAHFPREGVFVSNGTHWFVTQRNFYEPQIITTDNTFVSGNCDVVIGIVNNTVYDPLQPELDSFKEELDKYFKNHTSPDVDLGDISGINASVVNIQKEIDRLNEVAKNLNESLIDLQELGKYEQYIKWPWYIWLGFIAGLIAIVMVTIMLCCMTSCCSCLKGCCSCGSCCKFDEDDSEPVLKGVKLHYT

SEQ ID NO: 866 - protein, 1273 aa, Artificial Sequence
  SARS-CoV-2/Iceland/319/2020__EPI_ISL_417648 spike protein (1-1273)(G889C_L1034C)
MFVFLVLLPLVSSQCVNLTTRTQLPPAYTNSFTRGVYYPDKVFRSSVLHSTQDLFLPFFSNVTWFHAIHVSGTNGTKRFDNPVLPFNDGVYFASTEKSNIIRGWIFGTTLDSKTQSLLIVNNATNVVIKVCEFQFCNDPFLGVYYHKNNKSWMESEFRVYSSANNCTFEYVSQPFLIDLEGKQGNFKNLREFVFKNIDGYFKIYSKHTPINLVRDLPQGFSALEPLVDLPIGINITRFQTLLALHRSYLTPGDSSSGWTAGAAAYYVGYLQPRTFLLKYNENGTITDAVDCALDPLSETKCTLKSFTVEKGIYQTSNFRVQPTESIVRFPNITNLCPFGEVFNATRFASVYAWNRKRISNCVADYSVLYNSASFSTFKCYGVSPTKLNDLCFTNVYADSFVIRGDEVRQIAPGQTGKIADYNYKLPDDFTGCVIAWNSNNLDSKVGGNYNYLYRLFRKSNLKPFERDISTEIYQAGSTPCNGVEGFNCYFPLQSYGFQPTNGVGYQPYRVVVLSFELLHAPATVCGPKKSTNLVKNKCVNFNFNGLTGTGVLTESNKKFLPFQQFGRDIADTTDAVRDPQTLEILDITPCSFGGVSVITPGTNTSNQVAVLYQGVNCTEVPVAIHADQLTPTWRVYSTGSNVFQTRAGCLIGAEHVNNSYECDIPIGAGICASYQTQTNSPRRARSVASQSIIAYTMSLGAENSVAYSNNSIAIPTNFTISVTTEILPVSMTKTSVDCTMYICGDSTECSNLLLQYGSFCTQLNRALTGIAVEQDKNTQEVFAQVKQIYKTPPIKDFGGFNFSQILPDPSKPSKRSFIEDLLFNKVTLADAGFIKQYGDCLGDIAARDLICAQKFNGLTVLPPLLTDEMIAQYTSALLAGTITSGWTFCAGAALQIPFAMQMAYRFNGIGVTQNVLYENQKLIANQFNSAIGKIQDSLSSTASALGKLQDVVNQNAQALNTLVKQLSSNFGAISSVLNDILSRLDKVEAEVQIDRLITGRLQSLQTYVTQQLIRAAEIRASANLAATKMSECVCGQSKRVDFCGKGYHLMSFPQSAPHGVVFLHVTYVPAQEKNFTTAPAICHDGKAHFPREGVFVSNGTHWFVTQRNFYEPQIITTDNTFVSGNCDVVIGIVNNTVYDPLQPELDSFKEELDKYFKNHTSPDVDLGDISGINASVVNIQKEIDRLNEVAKNLNESLIDLQELGKYEQYIKWPWYIWLGFIAGLIAIVMVTIMLCCMTSCCSCLKGCCSCGSCCKFDEDDSEPVLKGVKLHYT

SEQ ID NO: 867 - protein, 1273 aa, Artificial Sequence
  SARS-CoV-2/Congo/94/2020__EPI_ISL_417947 spike protein (1-1273)(G889C_L1034C)
MFVFLVLLPLVSSQCVNLTTRTQLPPAYTNSFTRGVYYPDKVFRSSVLHSTQDLFLPFFSNVTWFHAIHVSGTNGTKRFDNPVLPFNDGVYFASTEKSNIIRGWIFGTTLDSKTQSLLIVNNATNVVIKVCEFQFCNDPFLGVYYHKNNKSWMESEFRVYSSANNCTFEYVSQPFLMDLEGKQGNFKNLREFVFKNIDGYFKIYSKHTPINLVRDLPQGFSALEPLVDLPIGINITRFQTLLALHRSYLTPGDSSSGWTAGAAAYYVGYLQPRTFLLKYNENGTITDAVDCALDPLSETKCTLKSFTVEKGIYQTSNFRVQPTESIVRFPNITNLCPFGEVFNATRFASVYAWNRKRISNCVADYSVLYNSASFSTFKCYGVSPTKLNDLCFTNVYADSFVIRGDEVRQIAPGQTGKIADYNYKLPDDFTGCVIAWNSNNLDSKVGGNYNYLYRLFRKSNLKPFERDISTEIYQAGSTPCNGVEGFNCYFPLQSYGFQPTNGVGYQPYRVVVLSFELLHAPATVCGPKKSTNLVKNKCVNFNFNGLTGTGVLTESNKKFLPFQQFGRDIADTTDAVRDPQTLEILDITPCSFGGVSVITPGTNTSNQVAVLYQGVNCTEVPVAIHADQLTPTWRVYSTGSNVFQTRAGCLIGAEHVNNSYECDIPIGAGICASYQTQTNSPRRARSVASQSIIAYTMSLGAENSVAYSNNSIAIPTNFTISVTTEILPVSMTKTSVDCTMYICGDSTECSNLLLQYGSFCTQLNRALTGIAVEQDKNTQEVFAQVKQIYKTPPIKDFGGFNFSQILPDPSKPSKRSFIEDILFNKVTLADAGFIKQYGDCLGDIAARDLICAQKFNGLTVLPPLLTDEMIAQYTSALLAGTITSGWTFCAGAALQIPFAMQMAYRFNGIGVTQNVLYENQKLIANQFNSAIGKIQDSLSSTASALGKLQDVVNQNAQALNTLVKQLSSNFGAISSVLNDILSRLDKVEAEVQIDRLITGRLQSLQTYVTQQLIRAAEIRASANLAATKMSECVCGQSKRVDFCGKGYHLMSFPQSAPHGVVFLHVTYVPAQEKNFTTAPAICHDGKAHFPREGVFVSNGTHWFVTQRNFYEPQIITTDNTFVSGNCDVVIGIVNNTVYDPLQPELDSFKEELDKYFKNHTSPDVDLGDISGINASVVNIQKEIDRLNEVAKNLNESLIDLQELGKYEQYIKWPWYIWLGFIAGLIAIVMVTIMLCCMTSCCSCLKGCCSCGSCCKFDEDDSEPVLKGVKLHYT

SEQ ID NO: 868 - protein, 1273 aa, Artificial Sequence
  SARS-CoV-2/Congo/158/2020__EPI_ISL_417950 spike protein (1-1273)(G889C_L1034C)
MFVFLVLLPLVSSQCVNLTTRTQLPPAYTNSFTRGVYYPDKVFRSSVLHSTQDLFLPFFSNVTWFHAIHVSGTNGTKRFDNPVLPFNDGVYFASTEKSNIIRGWIFGTTLDSKTQSLLIVNNATNVVIKVCEFQFCNDPFLGVYYHKNNKSWMESEFRVYSSANNCTFEYVSQPFLMDLEGKQGNFKNLREFVFKNIDGYFKIYSKHTPINLVRDLPQGFSALEPLVDLPIGINITRFQTLLALHRSYLTPGDSSSGWTAGAAAYYVGYLQPRTFLLKYNENGTITDAVDCALDPLSETKCTLKSFTVEKGIYQTSNFRVQPTESIVRFPNITNLCPFGEVFNATRFASVYAWNRKRISNCVADYSVLYNSASFSTFKCYGVSPTKLNDLCFTNVYADSFVIRGDEVRQIAPGQTGKIADYNYKLPDDFTGCVIAWNSNNLDSKVGGNYNYLYRLFRKSNLKPFERDISTEIYQAGSTPCNGVEGFNCYFPLQSYGFQPTNGVGYQPYRVVVLSFELLHAPATVCGPKKSTNLVKNKCVNFNFNGLTGTGVLTESNKKFLPFQQFGRDIADTTDAVRDPQTLEILDITPCSFGGVSVITPGTNTSNQVAVLYQDVNCTEVPVAIHADQLTPTWRVYSTGSNVFQTRAGCLIGAEHVNNSYECDIPIGAGICASYQTQTNSPRRARSVASQSIIAYTMSLGAENSVAYSNNSIAIPTNFTISVTTEILPVSMTKTSVDCTMYICGDSTECSNLLLQYGSFCTQLNRALTGIAVEQDKNTQEVFAQVKQIYKTPPIKDFGGFNFSQILPDPSKPSKRSFIEDLLFNKVTLADAGFIKQYGDCLGDIAARDLICAQKFNGLTVLPPLLTDEMIAQYTSALLAGTITSGWTFCAGAALQIPFAMQMAYRFNGIGVTQNVLYENQKLIANQFNSAIGKIQDSLSSTASALGKLQDVVNQNAQALNTLVKQLSSNFGAISSVLNDILSRLDKVEAEVQIDRLITGRLQSLQTYVTQQLIRAAEIRASANLAATKMSECVCGQSKRVDFCGKGYHLMSFPQSAPHGVVFLHVTYVPAQEKNFTTAPAICHDGKAHFPREGVFVSNGTHWFVTQRNFYEPQIITTDNTFLSGNCDVVIGIVNNTVYDPLQPELDSFKEELDKYFKNHTSPDVDLGDISGINASVVNIQKEIDRLNEVAKNLNESLIDLQELGKYEQYIKWPWYIWLGFIAGLIAIVMVTIMLCCMTSCCSCLKGCCSCGSCCKFDEDDSEPVLKGVKLHYT

SEQ ID NO: 869 - protein, 1273 aa, Artificial Sequence
  SARS-CoV-2/USA/UT-00034/2020__EPI_ISL_417977 spike protein (1-1273)(G889C_L1034C)
MFVFLVLLPLVSSQCVNLTTRTQLPPAYTNSFTRGVYYPDKVFRSSVLHSTQDLFLPFFSNVTWFHAIHVSGTNGTKRFDNPVLPFNDGVYFASTEKSNIIRGWIFGTTLDSKTQSLLIVNNATNVVIKVCEFQFCNDPFLGVYYYKNNKSWMESEFRVYSSANNCTFEYVSQPFLMDLEGKQGNFKNLREFVFKNIDGYFKIYSKHTPINLVRDLPQGFSALEPLVDLPIGINITRFQTLLALHRSYLTPGDSSSGWTAGAAAYYVGYLQPRTFLLKYNENGTITDAVDCALDPLSETKCTLKSFTVEKGIYQTSNFRVQPTESIVRFPNITNLCPFGEVFNATRFASVYAWNRKRISNCVADYSVLYNSASFSTFKCYGVSPTKLNDLCFTNVYADSFVIRGDEVRQIAPGQTGKIADYNYKLPDDFTGCVIAWNSNNLDSKVGGNYNYLYRLFRKSNLKPFERDISTEIYQAGSTPCNGVEGFNCYFPLQSYGFQPTNGVGYQPYRVVVLSFELLHAPATVCGPKKSTNLVKNKCVNFNFNGLTGTGVLTESNKKFLPFQQFGRDIADTTDAVRDPQTLEILDITPCSFGGVSVITPGTNTSNQVAVLYQGVNCTEVPVAIHADQLTPTWRVYSTGSNVFQTRAGCLIGAEHVNNSYECDIPIGAGICASYQTQTNSPRRARSVASQSIIAYTMSLGAENSVAYSNNSIAIPTNFTISVTTEILPVSMTKTSVDCTMYICGDSTECSNLLLQYGSFCTQLNRALTGIAVEQDKNTQEVFAQVKQIYKTPPIKDFGGFNFSQILPDPSKPSKRSFIEDLLFNKVTLADAGFIKQYGDCLGDIAARDLICAQKFNGLTVLPPLLTDEMIAQYTSALLAGTITSGWTFCAGAALQIPFAMQMAYRFNGIGVTQNVLYENQKLIANQFNSAIGKIQDSLSSTASALGKLQDVVNQNAQALNTLVKQLSSNFGAISSVLNDILSRLDKVEAEVQIDRLITGRLQSLQTYVTQQLIRAAEIRASANLAATKMSECVCGQSKRVDFCGKGYHLMSFPQSAPHGVVFLHVTYVPAQEKNFTTAPAICHDGKAHFPREGVFVSNGTHWFVTQRNFYEPQIITTDNTFVSGNCDVVIGIVNNTVYDPLQPELDSFKEELDKYFKNHTSPDVDLGDISGINASVVNIQKEIDRLNEVAKNLNESLIDLQELGKYEQYIKWPWYIWLGFIAGLIAIVMVTIMLCCMTSCCSCLKGCCSCGSCCKFDEDDSEPVLKGVKLHYT

SEQ ID NO: 870 - protein, 1273 aa, Artificial Sequence
  SARS-CoV-2/USA/UT-00033/2020__EPI_ISL_417976 spike protein (1-1273)(G889C_L1034C)
MFVFLVLLPLVSSQCVNLTTRTQLPPAYTNSFTRGVYYPDKVFRSSVLHSTQDLFLPFFSNVTWFHAIHVSGTNGTKRFDNPVLPFNDGVYFASTEKSNIIRGWIFGTTLDSKTQSLLIVNNATNVVIKVCEFQFCNDPFLGVYYHKNNKSWMESEFRVYSSANNCTFEYVSQPFLMDLEGKQGNFKNLREFVFKNIDGYFKIYSKHTPINLVRDLPQGFSALEPLVDLPIGINITRFQTLLALHRSYLTPGDSSSGLTAGAAAYYVGYLQPRTFLLKYNENGTITDAVDCALDPLSETKCTLKSFTVEKGIYQTSNFRVQPTESIVRFPNITNLCPFGEVFNATRFASVYAWNRKRISNCVADYSVLYNSASFSTFKCYGVSPTKLNDLCFTNVYADSFVIRGDEVRQIAPGQTGKIADYNYKLPDDFTGCVIAWNSNNLDSKVGGNYNYLYRLFRKSNLKPFERDISTEIYQAGSTPCNGVEGFNCYFPLQSYGFQPTNGVGYQPYRVVVLSFELLHAPATVCGPKKSTNLVKNKCVNFNFNGLTGTGVLTESNKKFLPFQQFGRDIADTTDAVRDPQTLEILDITPCSFGGVSVITPGTNTSNQVAVLYQGVNCTEVPVAIHADQLTPTWRVYSTGSNVFQTRAGCLIGAEHVNNSYECDIPIGAGICASYQTQTNSPRRARSVASQSIIAYTMSLGAENSVAYSNNSIAIPTNFTISVTTEILPVSMTKTSVDCTMYICGDSTECSNLLLQYGSFCTQLNRALTGIAVEQDKNTQEVFAQVKQIYKTPPIKDFGGFNFSQILPDPSKPSKRSFIEDLLFNKVTLADAGFIKQYGDCLGDIAARDLICAQKFNGLTVLPPLLTDEMIAQYTSALLAGTITSGWTFCAGAALQIPFAMQMAYRFNGIGVTQNVLYENQKLIANQFNSAIGKIQDSLSSTASALGKLQDVVNQNAQALNTLVKQLSSNFGAISSVLNDILSRLDKVEAEVQIDRLITGRLQSLQTYVTQQLIRAAEIRASANLAATKMSECVCGQSKRVDFCGKGYHLMSFPQSAPHGVVFLHVTYVPAQEKNFTTAPAICHDGKAHFPREGVFVSNGTHWFVTQRNFYEPQIITTDNTFVSGNCDVVIGIVNNTVYDPLQPELDSFKEELDKYFKNHTSPDVDLGDISGINASVVNIQKEIDRLNEVAKNLNESLIDLQELGKYEQYIKWPWYIWLGFIAGLIAIVMVTIMLCCMTSCCSCLKGCCSCGSCCKFDEDDSEPVLKGVKLHYT

SEQ ID NO: 871 - protein, 1273 aa, Artificial Sequence
  SARS-CoV-2/USA/WI-13/2020__EPI_ISL_417516 spike protein (1-1273)(G889C_L1034C)
MFVFLVLLPLVSSQCVNLTTRTQLPPAYTNSFTRGVYYPDKVFRSSVLHSTQDLFLPFFSNVTWFHAIHVSGTNGTKRFDNPVLPFNDGVYFASTEKSNIIRGWIFGTTLDSKTQSLLIVNNATNVVIKVCEFQFCNDPFLGVYYHKNNKSWMESEFRVYSSANNCTFEYVSQPFLMDLEGKQGNFKNLREFVFKNIDGYFKIYSKHTPINLVRDLPQGFSALEPLVDLPIGINITRFQTLLALHRSYLTPGDSSSGWTAGAAAYYVGYLQPRTFLLKYNENGTITDAVDCALDPLSETKCTLKSFTVEKGIYQTSNFRVLPTESIVRFPNITNLCPFGEVFNATRFASVYAWNRKRISNCVADYSVLYNSASFSTFKCYGVSPTKLNDLCFTNVYADSFVIRGDEVRQIAPGQTGKIADYNYKLPDDFTGCVIAWNSNNLDSKVGGNYNYLYRLFRKSNLKPFERDISTEIYQAGSTPCNGVEGFNCYFPLQSYGFQPTNGVGYQPYRVVVLSFELLHAPATVCGPKKSTNLVKNKCVNFNFNGLTGTGVLTESNKKFLPFQQFGRDIADTTDAVRDPQTLEILDITPCSFGGVSVITPGTNTSNQVAVLYQGVNCTEVPVAIHADQLTPTWRVYSTGSNVFQTRAGCLIGAEHVNNSYECDIPIGAGICASYQTQTNSPRRARSVASQSIIAYTMSLGAENSVAYSNNSIAIPTNFTISVTTEILPVSMTKTSVDCTMYICGDSTECSNLLLQYGSFCTQLNRALTGIAVEQDKNTQEVFAQVKQIYKTPPIKDFGGFNFSQILPDPSKPSKRSFIEDLLFNKVTLADAGFIKQYGDCLGDIAARDLICAQKFNGLTVLPPLLTDEMIAQYTSALLAGTITSGWTFCAGAALQIPFAMQMAYRFNGIGVTQNVLYENQKLIANQFNSAIGKIQDSLSSTASALGKLQDVVNQNAQALNTLVKQLSSNFGAISSVLNDILSRLDKVEAEVQIDRLITGRLQSLQTYVTQQLIRAAEIRASANLAATKMSECVCGQSKRVDFCGKGYHLMSFPQSAPHGVVFLHVTYVPAQEKNFTTAPAICHDGKAHFPREGVFVSNGTHWFVTQRNFYEPQIITTDNTFVSGNCDVVIGIVNNTVYDPLQPELDSFKEELDKYFKNHTSPDVDLGDISGINASVVNIQKEIDRLNEVAKNLNESLIDLQELGKYEQYIKWPWYIWLGFIAGLIAIVMVTIMLCCMTSCCSCLKGCCSCGSCCKFDEDDSEPVLKGVKLHYT

SEQ ID NO: 872 - protein, 1272 aa, Artificial Sequence
  SARS-CoV-2/India/1-27/2020__EPI_ISL_413522 spike protein (1-1272)(G888C_L1033C)
MFVFLVLLPLVSSQCVNLTTRTQLPPAYTNSFTRGVYYPDKVFRSSVLHSTQDLFLPFFSNVTWFHAIHVSGTNGTKRFDNPVLPFNDGVYFASTEKSNIIRGWIFGTTLDSKTQSLLIVNNATNVVIKVCEFQFCNDPFLGVYHKNNKSWMESEFRVYSSANNCTFEYVSQPFLMDLEGKQGNFKNLREFVFKNIDGYFKIYSKHTPINLVRDLPQGFSALEPLVDLPIGINITRFQTLLALHRSYLTPGDSSSGWTAGAAAYYVGYLQPRTFLLKYNENGTITDAVDCALDPLSETKCTLKSFTVEKGIYQTSNFRVQPTESIVRFPNITNLCPFGEVFNATRFASVYAWNRKRISNCVADYSVLYNSASFSTFKCYGVSPTKLNDLCFTNVYADSFVIRGDEVIQIAPGQTGKIADYNYKLPDDFTGCVIAWNSNNLDSKVGGNYNYLYRLFRKSNLKPFERDISTEIYQAGSTPCNGVEGFNCYFPLQSYGFQPTNGVGYQPYRVVVLSFELLHAPATVCGPKKSTNLVKNKCVNFNFNGLTGTGVLTESNKKFLPFQQFGRDIADTTDAVRDPQTLEILDITPCSFGGVSVITPGTNTSNQVAVLYQDVNCTEVPVAIHADQLTPTWRVYSTGSNVFQTRAGCLIGAEHVNNSYECDIPIGAGICASYQTQTNSPRRARSVASQSIIAYTMSLGAENSVAYSNNSIAIPTNFTISVTTEILPVSMTKTSVDCTMYICGDSTECSNLLLQYGSFCTQLNRALTGIAVEQDKNTQEVFAQVKQIYKTPPIKDFGGFNFSQILPDPSKPSKRSFIEDLLFNKVTLADAGFIKQYGDCLGDIAARDLICAQKFNGLTVLPPLLTDEMIAQYTSALLAGTITSGWTFCAGAALQIPFAMQMAYRFNGIGVTQNVLYENQKLIANQFNSAIGKIQDSLSSTASALGKLQDVVNQNAQALNTLVKQLSSNFGAISSVLNDILSRLDKVEAEVQIDRLITGRLQSLQTYVTQQLIRAAEIRASANLAATKMSECVCGQSKRVDFCGKGYHLMSFPQSAPHGVVFLHVTYVPAQEKNFTTAPAICHDGKAHFPREGVFVSNGTHWFVTQRNFYEPQIITTDNTFVSGNCDVVIGIVNNTVYDPLQPELDSFKEELDKYFKNHTSPDVDLGDISGINASVVNIQKEIDRLNEVAKNLNESLIDLQELGKYEQYIKWPWYIWLGFIAGLIAIVMVTIMLCCMTSCCSCLKGCCSCGSCCKFDEDDSEPVLKGVKLHYT

SEQ ID NO: 873 - protein, 1267 aa, Artificial Sequence
  SARS-CoV-2/pangolin/Guangxi/P4L/2017__EPI_ISL_410538 spike protein (1-1267)(G883C_L1028C)
MFVFLFVLPLVSSQCVNLTTRTGIPPGYTNSSTRGVYYPDKVFRSSILHLTQDLFLPFFSNVTWFNTINYQGGFKKFDNPVLPFNDGVYFASTEKSNIIRGWIFGTTLDARTQSLLIVNNATNVVIKVCEFQFCTDPFLGVYYHNNNKTWVENEFRVYSSANNCTFEYISQPFLMDLEGKQGNFKNLREFVFKNVDGYFKIYSKHTPIDLVRDLPRGFAALEPLVDLPIGINITRFQTLLALHRSYLTPGNLESGWTTGAAAYYVGYLQQRTFLLSYNQNGTITDAVDCSLDPLSETKCTLKSLTVEKGIYQTSNFRVQPTISIVRFPNITNLCPFGEVFNASKFASVYAWNRKRISNCVADYSVLYNSTSFSTFKCYGVSPTKLNDLCFTNVYADSFVVKGDEVRQIAPGQTGVIADYNYKLPDDFTGCVIAWNSVKQDALTGGNYGYLYRLFRKSKLKPFERDISTEIYQAGSTPCNGQVGLNCYYPLERYGFHPTTGVNYQPFRVVVLSFELLNGPATVCGPKLSTTLVKDKCVNFNFNGLTGTGVLTTSKKQFLPFQQFGRDISDTTDAVRDPQTLEILDITPCSFGGVSVITPGTNTSNQVAVLYQDVNCTEVPMAIHAEQLTPAWRVYSAGANVFQTRAGCLVGAEHVNNSYECDIPVGAGICASYHSMSSLRSVNQRSIIAYTMSLGAENSVAYSNNSIAIPTNFTISVTTEILPVSMTKTSVDCTMYICGDSIECSNLLLQYGSFCTQLNRALTGIAVEQDKNTQEVFAQVKQIYKTPPIKDFGGFNFSQILPDPSKPSKRSFIEDLLFNKVTLADAGFIKQYGDCLGDIAARDLICAQKFNGLTVLPPLLTDEMIAQYTSALLAGTITSGWTFCAGAALQIPFAMQMAYRFNGIGVTQNVLYENQKLIANQFNSAIGKIQDSLSSTASALGKLQDVVNQNAQALNTLVKQLSSNFGAISSVLNDILSRLDKVEAEVQIDRLITGRLQSLQTYVTQQLIRAAEIRASANLAATKMSECVCGQSKRVDFCGKGYHLMSFPQSAPHGVVFLHVTYVPAQEKNFTTAPAICHEGKAHFPREGVFVSNGTHWFITQRNFYEPQIITTDNTFVSGSCDVVIGIVNNTVYDPLQPELDSFKEELDKYFKNHTSPDVDLGDISGINASVVNIQKEIDRLNEVAKNLNESPIDLQELGKYEQYIKWPWYIWLGFIAGLIAIIMVTIMLCCMTSCCSCLKGCCSCGSCCKFDEDDSEPVLKGVKLHYT

SEQ ID NO: 874 - protein, 1267 aa, Artificial Sequence
  SARS-CoV-2/pangolin/Guangxi/P5L/2017__EPI_ISL_410540 spike protein (1-1267)(G883C_L1028C)
MFVFLFVLPLVSSQCVNLTTRTGIPPGYTNSSTRGVYYPDKVFRSSILHLTQDLFLPFFSNVTWFNTINYQGGFKKFDNPVLPFNDGVYFASTEKSNIIRGWIFGTTLDARTQSLLIVNNATNVVIKVCEFQFCTDPFLGVYYHNNNKTWVENEFRVYSSANNCTFEYISQPFLMDLEGKQGNFKNLREFVFKNVDGYFKIYSKHTPIDLVRDLPRGFAALEPLVDLPIGINITRFQTLLALHRSYLTPGKLESGWTTGAAAYYVGYLQQRTFLLSYNQNGTITDAVDCSLDPLSETKCTLKSLTVEKGIYQTSNFRVQPTISIVRFPNITNLCPFGEVFNASKFASVYAWNRKRISNCVADYSVLYNSTSFSTFKCYGVSPTKLNDLCFTNVYADSFVVKGDEVRQIAPGQTGVIADYNYKLPDDFTGCVIAWNSVKQDALTGGNYGYLYRLFRKSKLKPFERDISTEIYQAGSTPCNGQVGLNCYYPLERYGFHPTTGVNYQPFRVVVLSFELLNGPATVCGPKLSTTLVKDKCVNFNFNGLTGTGVLTTSKKQFLPFQQFGRDISDTTDAVRDPQTLEILDITPCSFGGVSVITPGTNTSNQVAVLYQDVNCTEVPMAIHAEQLTPAWRVYSAGANVFQTRAGCLVGAEHVNNSYECDIPVGAGICASYHSMSSFRSVNQRSIIAYTMSLGAENSVAYSNNSIAIPTNFTISVTTEILPVSMTKTSVDCTMYICGDSIECSNLLLQYGSFCTQLNRALTGIAVEQDKNTQEVFAQVKQIYKTPPIKDFGGFNFSQILPDPSKPSKRSFIEDLLFNKVTLADAGFIKQYGDCLGDIAARDLICAQKFNGLTVLPPLLTDEMIAQYTSALLAGTITSGWTFCAGAALQIPFAMQMAYRFNGIGVTQNVLYENQKLIANQFNSAIGKIQDSLSSTASALGKLQDVVNQNAQALNTLVKQLSSNFGAISSVLNDILSRLDKVEAEVQIDRLITGRLQSLQTYVTQQLIRAAEIRASANLAATKMSECVCGQSKRVDFCGKGYHLMSFPQSAPHGVVFLHVTYVPAQEKNFTTAPAICHEGKAHFPREGVFVSNGTHWFITQRNFYEPQIITTDNTFVSGSCDVVIGIVNNTVYDPLQPELDSFKEELDKYFKNHTSPDVDLGDISGINASVVNIQKEIDRLNEVAKNLNESLIDLQELGKYEQYIKWPWYIWLGFIAGLIAIIMVTIMLCCMTSCCSCLKGCCSCGSCCKFDEDDSEPVLKGVKLHYT

SEQ ID NO: 875 - protein, 1267 aa, Artificial Sequence
  SARS-CoV-2/pangolin/Guangxi/P5E/2017__EPI_ISL_410541 spike protein (1-1267)(G883C_L1028C)
MFVFLFVLPLVSSQCVNLTTRTGIPPGYTNSSTRGVYYPDKVFRSSILHLTQDLFLPFFSNVTWFNTITYQGGSKKFDNPVLPFNDGVYFASTEKSNIIRGWIFGTTLDARTQSLLIVNNATNVVIKVCEFQFCTDPFLGVYYHNNNKTWVENEFRVYSSANNCTFEYISQPFLMDLEGKQGNFKNLREFVFKNVDGYFKIYSKHTPIDLVRDLPRGFAALEPLVDLPIGINITRFQTLLALHRSYLTPGKLESGWTTGAAAYYVGYLQQRTFLLSYNQNGTITDAVDCSLDPLSETKCTLKSLTVEKGIYQTSNFRVQPTISIVRFPNITNLCPFGEVFNASKFASVYAWNRKRISNCVADYSVLYNSTSFSTFKCYGVSPTKLNDLCFTNVYADSFVVKGDEVRQIAPGQTGVIADYNYKLPDDFTGCVIAWNSVKQDALTGDNYGYLYRLFRKSKLKPFERDISTEIYQAGSTPCNGQVGLNCYYPLERYGFHPTTGVNYQPFRVVVLSFELLNGPATVCGPKLSTTLVKDKCVNFNFNGLTGTGVLTTSKKQFLPFQQFGRDISDTTDAVRDPQTLEILDITPCSFGGVSVITPGTNTSNQVAVLYQDVNCTEVPMAIHAEQLTPAWRVYSAGANVFQTRAGCLVGAEHVNNSYECDIPVGAGICASYHSMSSFRSVNQRSIIAYTMSLGAENSVAYSNNSIAIPTNFTISVTTEILPVSMTKTSVDCTMYICGDSIECSNLLLQYGSFCTQLNRALTGIAVEQDKNTQEVFAQVKQIYKTPPIKDFGGFNFSQILPDPSKPSKRSFIEDLLFNKVTLADAGFIKQYGDCLGDIAARDLICAQKFNGLTVLPPLLTDEMIAQYTSALLAGTITSGWTFCAGAALQIPFAMQMAYRFNGIGVTQNVLYENQKLIANQFNSAIGKIQDSLSSTASALGKLQDVVNQNAQALNTLVKQLSSNFGAISSVLNDILSRLDKVEAEVQIDRLITGRLQSLQTYVTQQLIRAAEIRASANLAATKMSECVCGQSKRVDFCGKGYHLMSFPQSAPHGVVFLHVTYVPAQEKNFTTAPAICHEGKAHFPREGVFVSNGTHWFITQRNFYEPQIITTDNTFVSGSCDVVIGIVNNTVYDPLQPELDSFKEELDKYFKNHTSPDVDLGDISGINASVVNIQKEIDRLNEVAKNLNESLIDLQELGKYEQYIKWPWYIWLGFIAGLIAIIMVTIMLCCMTSCCSCLKGCCSCGSCCKFDEDDSEPVLKGVKLHYT

SEQ ID NO: 876 - protein, 1265 aa, Artificial Sequence
  SARS-CoV-2/pangolin/Guangxi/P1E/2017__EPI_ISL_410539 spike protein (1-1265)(G881C_L1026C)
MFVFLFVLPLVSSQCVNLTTRTGIQPGYTNSSTRGVYYPDKVFRSSILHLTQDLFLPFFSNVTWFNTINYQGGFKKFDNPVLPFNDGVYFASTEKSNIIRGWIFGTTLDARTQSLLIVNNATNVVIKVCEFQFCTDPFLGVYYHNNNKTWVENEFRVYSSANNCTFEYISQPFLMDLEGKQGNFKNLREFVFKNVDGYFKIYSKHTPIDLVRDLPRGFAALEPLVDLPIGINITRFQTLLALHRSYLTPGKLESGWTTGAAAYYVGYLQQRTFLLSYNQNGTITDAVDCSLDPLSETKCTLKSLTVEKGIYQTSNFRVQPTISIVRFPNITNLCPFGEVFNASKFASVYAWNRKRISNCVADYSVLYNSTSFSTFKCYGVSPTKLNDLCFTNVYADSFVVKGDEVRQIAPGQTGVIADYNYKLPDDFTGCVIAWNSVKQDALTGGNYLYRLFRKSKLKPFERDISTEIYQAGSTPCNGQVGLNCYYPLERYGFHPTTGVNYQPFRVVVLSFELLNGPATVCGPKLSTTLVKDKCVNFNFNGLTGTGVLTTSKKQFLPFQQFGRDISDTTDAVRDPQTLEILDITPCSFGGVSVITPGTNTSNQVAVLYQDVNCTEVPMAIHAEQLTPAWRVYSAGANVFQTRAGCLVGAEHVNNSYECDIPVGAGICASYHSMSSLRSVNQRSIIAYTMSLGAENSVAYSNNSIAIPTNFTISVTTEILPVSMTKTSVDCTMYICGDSIECSNLLLQYGSFCTQLNRALTGIAVEQDKNTQEVFAQVKQIYKTPPIKDFGGFNFSQILPDPSKPSKRSFIEDLLFNKVTLADAGFIKQYGDCLGDIAARDLICAQKFNGLTVLPPLLTDEMIAQYTSALLAGTITSGWTFCAGAALQIPFAMQMAYRFNGIGVTQNVLYENQKLIANQFNSAIGKIQDSLSSTASALGKLQDVVNQNAQALNTLVKQLSSNFGAISSVLNDILSRLDKVEAEVQIDRLITGRLQSLQTYVTQQLIRAAEIRASANLAATKMSECVCGQSKRVDFCGKGYHLMSFPQSAPHGVVFLHVTYVPAQEKNFTTAPAICHEGKAHFPREGVFVSNGTHWFITQRNFYEPQIITTDNTFVSGSCDVVIGIVNNTVYDPLQPELDSFKEELDKYFKNHTSPDVDLGDISGINASVVNIQKEIDRLNEVAKNLNESLIDLQELGKYEQYIKWPWYIWLGFIAGLIAIIMVTIMLCCMTSCCSCLKGCCSCGSCCKFDEDDSEPVLKGVKLHYT

SEQ ID NO: 877 - protein, 1273 aa, Artificial Sequence; identical to SEQ ID NO: 23
  SARS-CoV-2/Wuhan/WIV05/2019__EPI_ISL_402128 spike protein (1-1273)(I909C_Y1047C)

SEQ ID NO: 878 - protein, 1269 aa, Artificial Sequence
  SARS-CoV-2/bat/Yunnan/RaTG13/2013__EPI_ISL_402131 spike protein (1-1269)(I905C_Y1043C)
MFVFLVLLPLVSSQCVNLTTRTQLPPAYTNSSTRGVYYPDKVFRSSVLHLTQDLFLPFFSNVTWFHAIHVSGTNGIKRFDNPVLPFNDGVYFASTEKSNIIRGWIFGTTLDSKTQSLLIVNNATNVVIKVCEFQFCNDPFLGVYYHKNNKSWMESEFRVYSSANNCTFEYVSQPFLMDLEGKQGNFKNLREFVFKNIDGYFKIYSKHTPINLVRDLPPGFSALEPLVDLPIGINITRFQTLLALHRSYLTPGDSSSGWTAGAAAYYVGYLQPRTFLLKYNENGTITDAVDCALDPLSETKCTLKSFTVEKGIYQTSNFRVQPTDSIVRFPNITNLCPFGEVFNATTFASVYAWNRKRISNCVADYSVLYNSTSFSTFKCYGVSPTKLNDLCFTNVYADSFVITGDEVRQIAPGQTGKIADYNYKLPDDFTGCVIAWNSKHIDAKEGGNFNYLYRLFRKANLKPFERDISTEIYQAGSKPCNGQTGLNCYYPLYRYGFYPTDGVGHQPYRVVVLSFELLNAPATVCGPKKSTNLVKNKCVNFNFNGLTGTGVLTESNKKFLPFQQFGRDIADTTDAVRDPQTLEILDITPCSFGGVSVITPGTNASNQVAVLYQDVNCTEVPVAIHADQLTPTWRVYSTGSNVFQTRAGCLIGAEHVNNSYECDIPIGAGICASYQTQTNSRSVASQSIIAYTMSLGAENSVAYSNNSIAIPTNFTISVTTEILPVSMTKTSVDCTMYICGDSTECSNLLLQYGSFCTQLNRALTGIAVEQDKNTQEVFAQVKQIYKTPPIKDFGGFNFSQILPDPSKPSKRSFIEDLLFNKVTLADAGFIKQYGDCLGDIAARDLICAQKFNGLTVLPPLLTDEMIAQYTSALLAGTITSGWTFGAGAALQIPFAMQMAYRFNGCGVTQNVLYENQKLIANQFNSAIGKIQDSLSSTASALGKLQDVVNQNAQALNTLVKQLSSNFGAISSVLNDILSRLDKVEAEVQIDRLITGRLQSLQTYVTQQLIRAAEIRASANLAATKMSECVLGQSKRVDFCGKGCHLMSFPQSAPHGVVFLHVTYVPAQEKNFTTAPAICHDGKAHFPREGVFVSNGTHWFVTQRNFYEPQIITTDNTFVSGSCDVVIGIVNNTVYDPLQPELDSFKEELDKYFKNHTSPDVDLGDISGINASVVNIQKEIDRLNEVAKNLNESLIDLQELGKYEQYIKWPWYIWLGFIAGLIAIIMVTIMLCCMTSCCSCLKGCCSCGSCCKFDEDDSEPVLKGVKLHYT

SEQ ID NO: 879 - protein, 1273 aa, Artificial Sequence
  SARS-CoV-2/Wuhan/HBCDC-HB-01/2019__EPI_ISL_402132 spike protein (1-1273)(I909C_Y1047C)
MFVFLVLLPLVSSQCVNLTTRTQLPPAYTNSITRGVYYPDKVFRSSVLHSTQDLFLPFFSNVTWFHAIHVSGTNGTKRFDNPVLPFNDGVYFASTEKSNIIRGWIFGTTLDSKTQSLLIVNNATNVVIKVCEFQFCNDPFLGVYYHKNNKSWMESEFRVYSSANNCTFEYVSQPFLMDLEGKQGNFKNLREFVFKNIDGYFKIYSKHTPINLVRDLPQGFSALEPLVDLPIGINITRFQTLLALHRSYLTPGDSSSGWTAGAAAYYVGYLQPRTFLLKYNENGTITDAVDCALDPLSETKCTLKSFTVEKGIYQTSNFRVQPTESIVRFPNITNLCPFGEVFNATRFASVYAWNRKRISNCVADYSVLYNSASFSTFKCYGVSPTKLNDLCFTNVYADSFVIRGDEVRQIAPGQTGKIADYNYKLPDDFTGCVIAWNSNNLDSKVGGNYNYLYRLFRKSNLKPFERDISTEIYQAGSTPCNGVEGFNCYFPLQSYGFQPTNGVGYQPYRVVVLSFELLHAPATVCGPKKSTNLVKNKCVNFNFNGLTGTGVLTESNKKFLPFQQFGRDIADTTDAVRDPQTLEILDITPCSFGGVSVITPGTNTSNQVAVLYQDVNCTEVPVAIHADQLTPTWRVYSTGSNVFQTRAGCLIGAEHVNNSYECDIPIGAGICASYQTQTNSPRRARSVASQSIIAYTMSLGAENSVAYSNNSIAIPTNFTISVTTEILPVSMTKTSVDCTMYICGDSTECSNLLLQYGSFCTQLNRALTGIAVEQDKNTQEVFAQVKQIYKTPPIKDFGGFNFSQILPDPSKPSKRSFIEDLLFNKVTLADAGFIKQYGDCLGDIAARDLICAQKFNGLTVLPPLLTDEMIAQYTSALLAGTITSGWTFGAGAALQIPFAMQMAYRFNGCGVTQNVLYENQKLIANQFNSAIGKIQDSLSSTASALGKLQDVVNQNAQALNTLVKQLSSNFGAISSVLNDILSRLDKVEAEVQIDRLITGRLQSLQTYVTQQLIRAAEIRASANLAATKMSECVLGQSKRVDFCGKGCHLMSFPQSAPHGVVFLHVTYVPAQEKNFTTAPAICHDGKAHFPREGVFVSNGTHWFVTQRNFYEPQIITTDNTFVSGNCDVVIGIVNNTVYDPLQPELDSFKEELDKYFKNHTSPDVDLGDISGINASVVNIQKEIDRLNEVAKNLNESLIDLQELGKYEQYIKWPWYIWLGFIAGLIAIVMVTIMLCCMTSCCSCLKGCCSCGSCCKFDEDDSEPVLKGVKLHYT

SEQ ID NO: 880 - protein, 1273 aa, Artificial Sequence
  SARS-CoV-2/Guangdong/20SF028/2020__EPI_ISL_403936 spike protein (1-1273)(I909C_Y1047C)
MFVFLVLLPLVSSQCVNLTTRTQLPPAYTNSFTRGVYYPDKVFRSSVLYSTQDLFLPFFSNVTWFHAIHVSGTNGTKRFDNPVLPFNDGVYFASTEKSNIIRGWIFGTTLDSKTQSLLIVNNATNVVIKVCEFQFCNDPFLGVYYHKNNKSWMESEFRVYSSANNCTFEYVSQPFLMDLEGKQGNFKNLREFVFKNIDGYFKIYSKHTPINLVRDLPQGFSALEPLVDLPIGINITRFQTLLALHRSYLTPGDSSSGWTAGAAAYYVGYLQPRTFLLKYNENGTITDAVDCALDPLSETKCTLKSFTVEKGIYQTSNFRVQPTESIVRFPNITNLCPFGEVFNATRFASVYAWNRKRISNCVADYSVLYNSASFSTFKCYGVSPTKLNDLCFTNVYADSFVIRGDEVRQIAPGQTGKIADYNYKLPDDFTGCVIAWNSNNLDSKVGGNYNYLYRLFRKSNLKPFERDISTEIYQAGSTPCNGVEGFNCYFPLQSYGFQPTNGVGYQPYRVVVLSFELLHAPATVCGPKKSTNLVKNKCVNFNFNGLTGTGVLTESNKKFLPFQQFGRDIADTTDAVRDPQTLEILDITPCSFGGVSVITPGTNTSNQVAVLYQDVNCTEVPVAIHADQLTPTWRVYSTGSNVFQTRAGCLIGAEHVNNSYECDIPIGAGICASYQTQTNSPRRARSVASQSIIAYTMSLGAENSVAYSNNSIAIPTNFTISVTTEILPVSMTKTSVDCTMYICGDSTECSNLLLQYGSFCTQLNRALTGIAVEQDKNTQEVFAQVKQIYKTPPIKDFGGFNFSQILPDPSKPSKRSFIEDLLFNKVTLADAGFIKQYGDCLGDIAARDLICAQKFNGLTVLPPLLTDEMIAQYTSALLAGTITSGWTFGAGAALQIPFAMQMAYRFNGCGVTQNVLYENQKLIANQFNSAIGKIQDSLSSTASALGKLQDVVNQNAQALNTLVKQLSSNFGAISSVLNDILSRLDKVEAEVQIDRLITGRLQSLQTYVTQQLIRAAEIRASANLAATKMSECVLGQSKRVDFCGKGCHLMSFPQSAPHGVVFLHVTYVPAQEKNFTTAPAICHDGKAHFPREGVFVSNGTHWFVTQRNFYEPQIITTDNTFVSGNCDVVIGIVNNTVYDPLQPELDSFKEELDKYFKNHTSPDVDLGDISGINASVVNIQKEIDRLNEVAKNLNESLIDLQELGKYEQYIKWPWYIWLGFIAGLIAIVMVTIMLCCMTSCCSCLKGCCSCGSCCKFDEDDSEPVLKGVKLHYT

SEQ ID NO: 881 - protein, 1273 aa, Artificial Sequence
  SARS-CoV-2/Shenzhen/SZTH-001/2020__EPI_ISL_406592 spike protein (1-1273)(I909C_Y1047C)
MFVFLVLLPLVSSQCVNLTTRTQLPPAYTNSFTRGVYYPDKVFRSSVLHSTQDLFLPFFSNVTWFHAIHVSGTNGTKRFDNPVLPFNDGVYFASTEKSNIIRGWIFGTTLDSKTQSLLIVNNATNVVIKVCEFQFCNDPFLGVYYHKNNKSWMESEFRVYSSANNCTFEYVSQPFLMDLEGKQGNFKNLREFVFKNIDGYFKIYSKHTPINLVRDLPQGFSALEPLVDLPIGINITRFQTLLALHRSYLTPGDSSSGWTAGAAAYYVGYLQPRTFLLKYNENGTITDAVDCALDPLSETKCTLKSFTVEKGIYQTSNFRVQPTESIVRFPNITNLCPFGEVFNATRFASVYAWNRKRISNCVADYSVLYNSASFSTFKCYGVSPTKLNDLCFTNVYADSFVIRGDEVRQIAPGQTGKIADYNYKLPDDFTGCVIAWNSNNLDSKVGGNYNYLYRLFRKSNLKPFERDISTEIYQAGSTPCNGVEGFNCYFPLQSYGFQPTNGVGYQPYRVVVLSFELLHAPATVCGPKKSTNLVKNKCVNFNFNGLTGTGVLTESNKKFLPFQQFGRDIADTTDAVRDPQTLEILDITPCSFGGVSVITPGTNTSNQVAVLYQDVNCTEVPVAIHADQLTPTWRVYSTGSNVFQTRAGCLIGAEHVNNSYECDIPIGAGICASYQTQTNSPRRARSVASQSIIAYTMSLGAENSVAYSNNSIAIPTNFTISVTTEILPVSMTKTSVDCTMYICGDSTECSNLLLQYGSFCTQLNRALTGIAVEQDKNTQEVFAQVKQIYKTPPIKDFGGFNFSQILPDPSKPSKRSFIEDLLFNKVTLADAGFIKQYGDCLGDIAARDLICAQKFNGLTVLPPLLTDEMIAQYTSALLAGTITSGWTFGAGAALQIPFAMQMAYRFNGCGVTQNVLYENQKLIANQFNSAIGKIQDSLSSTASALGKLQDVVNQNAQALNTLVKQLSSNFGAISSVLNDILSRLDKVEAEVQIDRLITGRLQSLQTYVTQQLIRAAEIRASANLAATKMSECVLGQSKRVDFCGKGCHLMSFPQSAPHGVVFLHVTYVPAQEKNFTTAPAICHDGKAHFPREGVFVSNGTHWFVTQRNFYEPQIITTDNTFVSGNCDVLIGIVNNTVYDPLQPELDSFKEELDKYFKNHTSPDVDLGDISGINASVVNIQKEIDRLNEVAKNLNESLIDLQELGKYEQYIKWPWYIWLGFIAGLIAIVMVTIMLCCMTSCCSCLKGCCSCGSCCKFDEDDSGPVLKGVKLHYT

SEQ ID NO: 882 - protein, 1273 aa, Artificial Sequence
  SARS-CoV-2/Shenzhen/SZTH-004/2020__EPI_ISL_406595 spike protein (1-1273)(I909C_Y1047C)
MFVFLVLLPLVSSQCVNLTTRTQLPPAYTNSFTRGVYYPDKVFRSSVLHSTQDLFLPFFSNVTWFHAIHVSGTNGTKRFDNPVLPFNDGVYFASTEKSNIIRGWIFGTTLDSKTQSLLIVNNATNVVIKVCEFQFCNDPFLGVYYHKNNKSWMESEFRVYSSANNCTFEYVSQPFLMDLEGKQGNFKNLREFVFKNIDGYFKIYSKHTPINLVRDLPQGFSALEPLVDLPIGINITRFQTLLALHRSYLTPGDSSSGWTAGAAAYYVGYLQPRTFLLKYNENGTITDAVDCALDPLSETKCTLKSFTVEKGIYQTSNFRVQPTESIVRFPNITNLCPFGEVFNATRFASVYAWDRKRISNCVAYYSVLYNSASFSTFKCYGVSPTKLNDLCFTNVYADSFVIRGDEVRQIAPGQTGKIADYNYKLPDDFTGCVIAWNSNNLDSKVGGNYNYLYRLFRKSNLKPFERDISTEIYQAGSTPCNGVEGFNCYFPLQSYGFQPTNGVGYQPYRVVVLSFELLHAPATVCGPKKSTNLVKNKCVNFNFNGLTGTGVLTESNKKFLPFQQFGRDIADTTDAVRDPQTLEILDITPCSFGGVSVITPGTNTSNQVAVLYQDVNCTEVPVAIHADQLTPTWRVYSTGSNVFQTRAGCLIGAEHVNNSYECDIPIGAGICASYQTQTNSPRRARSVASQSIIAYTMSLGAENSVAYSNNSIAIPTNFTISVTTEILPVSMTKTSVDCTMYICGDSTECSNLLLQYGSFCTQLNRALTGIAVEQDKNTQEVFAQVKQIYKTPPIKDFGGFNFSQILPDPSKPSKRSFIEDLLFNKVTLADAGFIKQYGDCLGDIAARDLICAQKFNGLTVLPPLLTDEMIAQYTSALLAGTITSGWTFGAGAALQIPFAMQMAYRFNGCGVTQNVLYENQKLIANQFNSAIGKIQDSLSSTASALGKLQDVVNQNAQALNTLVKQLSSNFGAISSVLNDILSRLDKVEAEVQIDRLITGRLQSLQTYVTQQLIRAAEIRASANLAATKMSECVLGQSKRVDFCGKGCHLMSFPQSAPHGVVFLHVTYVPAQEKNFTTAPAICHDGKAHFPREGVFVSNGTHWFVTQRNFYEPQIITTDNTFVSGNCDVVIGIVNNTVYDPLQPELDSFKEELDKYFKNHTSPDVDLGDISGINASVVNIQKEIDRLNEVAKNLNESLIDLQELGKYEQYIKWPWYIWLGFIAGLIAIVMVTIMLCCMTSCCSCLKGCCSCGSCCKFDEDDSEPVLKGVKLHYT

SEQ ID NO: 883 - protein, 1273 aa, Artificial Sequence
  SARS-CoV-2/France/IDF0372/2020__EPI_ISL_406596 spike protein (1-1273)(I909C_Y1047C)
MFVFLVLLPLVSSQCVNLTTRTQLPPAYTNSFTRGVYYPDKVFRSSVLHSTQDLFLPFFSNVTWFHAIHVSGTNGTKRFDNPVLPFNDGVYFASTEKSNIIRGWIFGTTLDSKTQSLLIVNNATNVVIKVCEFQFCNDPFLGVYYHKNNKSWMESEFRVYSSANNCTFEYVSQPFLMDLEGKQGNFKNLREFVFKNIDGYFKIYSKHTPINLVRDLPQGFSALEPLVDLPIGINITRFQTLLALHRSYLTPGDSSSGWTAGAAAYYVGYLQPRTFLLKYNENGTITDAVDCALDPLSETKCTLKSFTVEKGIYQTSNFRVQPTESIVRFPNITNLCPFGEVFNATRFASVYAWNRKRISNCVADYSFLYNSASFSTFKCYGVSPTKLNDLCFTNVYADSFVIRGDEVRQIAPGQTGKIADYNYKLPDDFTGCVIAWNSNNLDSKVGGNYNYLYRLFRKSNLKPFERDISTEIYQAGSTPCNGVEGFNCYFPLQSYGFQPTNGVGYQPYRVVVLSFELLHAPATVCGPKKSTNLVKNKCVNFNFNGLTGTGVLTESNKKFLPFQQFGRDIADTTDAVRDPQTLEILDITPCSFGGVSVITPGTNTSNQVAVLYQDVNCTEVPVAIHADQLTPTWRVYSTGSNVFQTRAGCLIGAEHVNNSYECDIPIGAGICASYQTQTNSPRRARSVASQSIIAYTMSLGAENSVAYSNNSIAIPTNFTISVTTEILPVSMTKTSVDCTMYICGDSTECSNLLLQYGSFCTQLNRALTGIAVEQDKNTQEVFAQVKQIYKTPPIKDFGGFNFSQILPDPSKPSKRSFIEDLLFNKVTLADAGFIKQYGDCLGDIAARDLICAQKFNGLTVLPPLLTDEMIAQYTSALLAGTITSGWTFGAGAALQIPFAMQMAYRFNGCGVTQNVLYENQKLIANQFNSAIGKIQDSLSSTASALGKLQDVVNQNAQALNTLVKQLSSNFGAISSVLNDILSRLDKVEAEVQIDRLITGRLQSLQTYVTQQLIRAAEIRASANLAATKMSECVLGQSKRVDFCGKGCHLMSFPQSAPHGVVFLHVTYVPAQEKNFTTAPAICHDGKAHFPREGVFVSNGTHWFVTQRNFYEPQIITTDNTFVSGNCDVVIGIVNNTVYDPLQPELDSFKEELDKYFKNHTSPDVDLGDISGINASVVNIQKEIDRLNEVAKNLNESLIDLQELGKYEQYIKWPWYIWLGFIAGLIAIVMVTIMLCCMTSCCSCLKGCCSCGSCCKFDEDDSEPVLKGVKLHYT

SEQ ID NO: 884 - protein, 1273 aa, Artificial Sequence
  SARS-CoV-2/Australia/VIC01/2020__EPI_ISL_406844 spike protein (1-1273)(I909C_Y1047C)
MFVFLVLLPLVSSQCVNLTTRTQLPPAYTNSFTRGVYYPDKVFRSSVLHSTQDLFLPFFSNVTWFHAIHVSGTNGTKRFDNPVLPFNDGVYFASTEKSNIIRGWIFGTTLDSKTQSLLIVNNATNVVIKVCEFQFCNDPFLGVYYHKNNKSWMESEFRVYSSANNCTFEYVSQPFLMDLEGKQGNFKNLREFVFKNIDGYFKIYSKHTPINLVRDLPQGFSALEPLVDLPIGINITRFQTLLALHRRYLTPGDSSSGWTAGAAAYYVGYLQPRTFLLKYNENGTITDAVDCALDPLSETKCTLKSFTVEKGIYQTSNFRVQPTESIVRFPNITNLCPFGEVFNATRFASVYAWNRKRISNCVADYSVLYNSASFSTFKCYGVSPTKLNDLCFTNVYADSFVIRGDEVRQIAPGQTGKIADYNYKLPDDFTGCVIAWNSNNLDSKVGGNYNYLYRLFRKSNLKPFERDISTEIYQAGSTPCNGVEGFNCYFPLQSYGFQPTNGVGYQPYRVVVLSFELLHAPATVCGPKKSTNLVKNKCVNFNFNGLTGTGVLTESNKKFLPFQQFGRDIADTTDAVRDPQTLEILDITPCSFGGVSVITPGTNTSNQVAVLYQDVNCTEVPVAIHADQLTPTWRVYSTGSNVFQTRAGCLIGAEHVNNSYECDIPIGAGICASYQTQTNSPRRARSVASQSIIAYTMSLGAENSVAYSNNSIAIPTNFTISVTTEILPVSMTKTSVDCTMYICGDSTECSNLLLQYGSFCTQLNRALTGIAVEQDKNTQEVFAQVKQIYKTPPIKDFGGFNFSQILPDPSKPSKRSFIEDLLFNKVTLADAGFIKQYGDCLGDIAARDLICAQKFNGLTVLPPLLTDEMIAQYTSALLAGTITSGWTFGAGAALQIPFAMQMAYRFNGCGVTQNVLYENQKLIANQFNSAIGKIQDSLSSTASALGKLQDVVNQNAQALNTLVKQLSSNFGAISSVLNDILSRLDKVEAEVQIDRLITGRLQSLQTYVTQQLIRAAEIRASANLAATKMSECVLGQSKRVDFCGKGCHLMSFPQSAPHGVVFLHVTYVPAQEKNFTTAPAICHDGKAHFPREGVFVSNGTHWFVTQRNFYEPQIITTDNTFVSGNCDVVIGIVNNTVYDPLQPELDSFKEELDKYFKNHTSPDVDLGDISGINASVVNIQKEIDRLNEVAKNLNESLIDLQELGKYEQYIKWPWYIWLGFIAGLIAIVMVTIMLCCMTSCCSCLKGCCSCGSCCKFDEDDSEPVLKGVKLHYT

SEQ ID NO: 885 - protein, 1273 aa, Artificial Sequence
  SARS-CoV-2/Germany/BavPat1/2020__EPI_ISL_406862 spike protein (1-1273)(I909C_Y1047C)
MFVFLVLLPLVSSQCVNLTTRTQLPPAYTNSFTRGVYYPDKVFRSSVLHSTQDLFLPFFSNVTWFHAIHVSGTNGTKRFDNPVLPFNDGVYFASTEKSNIIRGWIFGTTLDSKTQSLLIVNNATNVVIKVCEFQFCNDPFLGVYYHKNNKSWMESEFRVYSSANNCTFEYVSQPFLMDLEGKQGNFKNLREFVFKNIDGYFKIYSKHTPINLVRDLPQGFSALEPLVDLPIGINITRFQTLLALHRSYLTPGDSSSGWTAGAAAYYVGYLQPRTFLLKYNENGTITDAVDCALDPLSETKCTLKSFTVEKGIYQTSNFRVQPTESIVRFPNITNLCPFGEVFNATRFASVYAWNRKRISNCVADYSVLYNSASFSTFKCYGVSPTKLNDLCFTNVYADSFVIRGDEVRQIAPGQTGKIADYNYKLPDDFTGCVIAWNSNNLDSKVGGNYNYLYRLFRKSNLKPFERDISTEIYQAGSTPCNGVEGFNCYFPLQSYGFQPTNGVGYQPYRVVVLSFELLHAPATVCGPKKSTNLVKNKCVNFNFNGLTGTGVLTESNKKFLPFQQFGRDIADTTDAVRDPQTLEILDITPCSFGGVSVITPGTNTSNQVAVLYQGVNCTEVPVAIHADQLTPTWRVYSTGSNVFQTRAGCLIGAEHVNNSYECDIPIGAGICASYQTQTNSPRRARSVASQSIIAYTMSLGAENSVAYSNNSIAIPTNFTISVTTEILPVSMTKTSVDCTMYICGDSTECSNLLLQYGSFCTQLNRALTGIAVEQDKNTQEVFAQVKQIYKTPPIKDFGGFNFSQILPDPSKPSKRSFIEDLLFNKVTLADAGFIKQYGDCLGDIAARDLICAQKFNGLTVLPPLLTDEMIAQYTSALLAGTITSGWTFGAGAALQIPFAMQMAYRFNGCGVTQNVLYENQKLIANQFNSAIGKIQDSLSSTASALGKLQDVVNQNAQALNTLVKQLSSNFGAISSVLNDILSRLDKVEAEVQIDRLITGRLQSLQTYVTQQLIRAAEIRASANLAATKMSECVLGQSKRVDFCGKGCHLMSFPQSAPHGVVFLHVTYVPAQEKNFTTAPAICHDGKAHFPREGVFVSNGTHWFVTQRNFYEPQIITTDNTFVSGNCDVVIGIVNNTVYDPLQPELDSFKEELDKYFKNHTSPDVDLGDISGINASVVNIQKEIDRLNEVAKNLNESLIDLQELGKYEQYIKWPWYIWLGFIAGLIAIVMVTIMLCCMTSCCSCLKGCCSCGSCCKFDEDDSEPVLKGVKLHYT

SEQ ID NO: 886 - protein, 1273 aa, Artificial Sequence
  SARS-CoV-2/Wuhan/HBCDC-HB-02/2020__EPI_ISL_412978 spike protein (1-1273)(I909C_Y1047C)
MFVFLVLLPLVSSQCVNLTTRTQLPPAYTNSFTRGVYYPDKVFRSSVLHSTQDLFLPFFSNVTWFHAIHVSGTNGTKRFDNPVLPFNDGVYFASTEKSNIIRGWIFGTTLDSKTQSLLIVNNATNVVIKVCEFQFCNDPFLGVYYHKNNKSWMESEFRVYSSANNCTFEYVSQPFLMDLEGKQGNFKNLREFVFKNIDGYFKIYSKHTPINLVRDLPQGFSALEPLVDLPIGINITRFQTLLALHRSYLTPGDSSSGWTAGAAAYYVGYLQPRTFLLKYNENGTITDAVDCALDPLSETKCTLKSFTVEKGIYQTSNFRVQPTESIVRFPNITNLCPFGEVFNATRFASVYAWNRKRISNCVADYSVLYNSASFSTFKCYGVSPTKLNDLCFTNVYADSFVIRGDEVRQIAPGQTGKIADYNYKLPDDFTGCVIAWNSNNLDSKVGGNYNYLYRLFRKSNLKPFERDISTEIYQAGSTPCNGVEGFNCYFPLQSYGFQPTNGVGYQPYRVVVLSFELLHAPATVCGPKKSTNLVKNKCVNFNFNGLTGTGVLTESNKKFLPFQQFGRDIADTTDAVRDPQTLEILDITPCSFGGVSVITPGTNTSNQVAVLYQDVNCTEVPVAIHADQLTPTWRVYSTGSNVFQTRAGCLIGAEHVNNSYECDIPIGAGICASYQTQTNSPRRARSVASQSIIAYTMSLGAENSVAYSNNSIAIPTNFTISVTTEILPVSMTKTSVDCTMYICGDSTECSNFLLQYGSFCTQLNRALTGIAVEQDKNTQEVFAQVKQIYKTPPIKDFGGFNFSQILPDPSKPSKRSFIEDLLFNKVTLADAGFIKQYGDCLGDIAARDLICAQKFNGLTVLPPLLTDEMIAQYTSALLAGTITSGWTFGAGAALQIPFAMQMAYRFNGCGVTQNVLYENQKLIANQFNSAIGKIQDSLSSTASALGKLQDVVNQNAQALNTLVKQLSSNFGAISSVLNDILSRLDKVEAEVQIDRLITGRLQSLQTYVTQQLIRAAEIRASANLAATKMSECVLGQSKRVDFCGKGCHLMSFPQSAPHGVVFLHVTYVPAQEKNFTTAPAICHDGKAHFPREGVFVSNGTHWFVTQRNFYEPQIITTDNTFVSGNCDVVIGIVNNTVYDPLQPELDSFKEELDKYFKNHTSPDVDLGDISGINASVVNIQKEIDRLNEVAKNLNESLIDLQELGKYEQYIKWPWYIWLGFIAGLIAIVMVTIMLCCMTSCCSCLKGCCSCGSCCKFDEDDSEPVLKGVKLHYT

SEQ ID NO: 887 - protein, 1273 aa, Artificial Sequence
  SARS-CoV-2/Australia/QLD02/2020__EPI_ISL_407896 spike protein (1-1273)(I909C_Y1047C)
MFVFLVLLPLVSSQCVNLTTRTQLPPAYTNSFTRGVYYPDKVFRSSVLHSTQDLFLPFFSNVTWFHAIHVSGTNGTKRFDNPVLPFNDGVYFASTEKSNIIRGWIFGTTLDSKTQSLLIVNNATNVVIKVCEFQFCNDPFLGVYYHKNNKSWMESEFRVYSSANNCTFEYVSQPFLMDLEGKQGNFKNLREFVFKNIDGYFKIYSKHTPINLVRDLPQGFSALEPLVDLPIGINITRFQTLLALHRSYLTPGDSSSGWTAGAAAYYVGYLQPRTFLLKYNENGTITDAVDCALDPLSETKCTLKSFTVEKGIYQTSNFRVQPTESIVRFPNITNLCPFGEVFNATRFASVYAWNRKRISNCVADYSVLYNSASFSTFKCYGVSPTKLNDLCFTNVYADSFVIRGDEVRQIAPGQTGKIADYNYKLPDDFTGCVIAWNSNNLDSKVGGNYNYLYRLFRKSNLKPFERDISTEIYQAGSTPCNGVEGFNCYFPLQSYGFQPTNGVGYQPYRVVVLSFELLHAPATVCGPKKSTNLVKNKCVNFNFNGLTGTGVLTESNKKFLPFQQFGRDIADTTDAVRDPQTLEILDITPCSFGGVSVITPGTNTSNQVAVLYQDVNCTEVPVAIHADQLTPTWRVYSTGSNVFQTRAGCLIGAEHVNNSYECDIPIGAGICASYQTQTNSPRRARSVASQSIIAYTMSLGAENSVAYSNNSIAIPTNFTISVTTEILPVSMTKTSVDCTMYICGDSTECSNLLLQYGSFCTQLNRALTGIAVEQDKNTQEVFAQVKQIYKTPPIKDFGGFNFSQILPDPSKPSKRSFIEDLLFNKVTLADAGFIKQYGDCLGDIAARDLICAQKFNGLTVLPPLLTDEMIAQYTSALLAGTITSGWTFGAGAALQIPFAMQMAYRFNGCGVTQNVLYENQKLIANQFNSAIGKIQDSLSSTASALGKLQDVVNQNAQALNTLVKQLSSNFGAISSVLNDILSRLDKVEAEVQIDRLITGRLQSLQTYVTQQLIRAAEIRASANLAATKMSECVLGQSKRVDFCGKGCHLMSFPQSAPHGVVFLHVTYVPAQEKNFTTAPAICHDGKAHFPREGVFVSNGTHWFVTQRNFYEPQIITTDNTFVSGNCDVVIGIVNNTVYDPLQLELDSFKEELDKYFKNHTSPDVDLGDISGINASVVNIQKEIDRLNEVAKNLNESLIDLQELGKYEQYIKWPWYIWLGFIAGLIAIVMVTIMLCCMTSCCSCLKGCCSCGSCCKFDEDDSEPVLKGVKLHYT

SEQ ID NO: 888 - protein, 1273 aa, Artificial Sequence
  SARS-CoV-2/India/1-31/2020__EPI_ISL_413523 spike protein (1-1273)(I909C_Y1047C)
MFVFLVLLPLVSSQCVNLTTRTQLPPAYTNSFTRGVYYPDKVFRSSVLHSTQDLFLPFFSNVTWFHAIHVSGTNGTKRFDNPVLPFNDGVYFASTEKSNIIRGWIFGTTLDSKTQSLLIVNNATNVVIKVCEFQFCNDPFLGVYYHKNNKSWMESEFRVYSSANNCTFEYVSQPFLMDLEGKQGNFKNLREFVFKNIDGYFKIYSKHTPINLVRDLPQGFSALEPLVDLPIGINITRFQTLLALHRSYLTPGDSSSGWTAGAAAYYVGYLQPRTFLLKYNENGTITDAVDCALDPLSETKCTLKSFTVEKGIYQTSNFRVQPTESIVRFPNITNLCPFGEVFNATRFASVYAWNRKRISNCVADYSVLYNSASFSTFKCYGVSPTKLNDLCFTNVYADSFVIRGDEVRQIAPGQTGKIADYNYKLPDDFTGCVIAWNSNNLDSKVGGNYNYLYRLFRKSNLKPFERDISTEIYQAGSTPCNGVEGFNCYFPLQSYGFQPTNGVGYQPYRVVVLSFELLHAPATVCGPKKSTNLVKNKCVNFNFNGLTGTGVLTESNKKFLPFQQFGRDIADTTDAVRDPQTLEILDITPCSFGGVSVITPGTNTSNQVAVLYQDVNCTEVPVAIHADQLTPTWRVYSTGSNVFQTRAGCLIGAEHVNNSYECDIPIGAGICASYQTQTNSPRRARSVASQSIIAYTMSLGAENSVAYSNNSIAIPTNFTISVTTEILPVSMTKTSVDCTMYICGDSTECSNLLLQYGSFCTQLNRALTGIAVEQDKNTQEVFAQVKQIYKTPPIKDFGGFNFSQILPDPSKPSKRSFIEDLLFNKVTLADAGFIKQYGDCLGDIAARDLICAQKFNGLTVLPPLLTDEMIAQYTSALLAGTITSGWTFGAGAALQIPFAMQMAYRFNGCGVTQNVLYENQKLIANQFNSVIGKIQDSLSSTASALGKLQDVVNQNAQALNTLVKQLSSNFGAISSVLNDILSRLDKVEAEVQIDRLITGRLQSLQTYVTQQLIRAAEIRASANLAATKMSECVLGQSKRVDFCGKGCHLMSFPQSAPHGVVFLHVTYVPAQEKNFTTAPAICHDGKAHFPREGVFVSNGTHWFVTQRNFYEPQIITTDNTFVSGNCDVVIGIVNNTVYDPLQPELDSFKEELDKYFKNHTSPDVDLGDISGINASVVNIQKEIDRLNEVAKNLNESLIDLQELGKYEQYIKWPWYIWLGFIAGLIAIVMVTIMLCCMTSCCSCLKGCCSCGSCCKFDEDDSEPVLKGVKLHYT

SEQ ID NO: 889 - protein, 1273 aa, Artificial Sequence
  SARS-CoV-2/Guangdong/GD2020087-P0008/2020__EPI_ISL_413863 spike protein (1-1273)(I909C_Y1047C)
MFVFLVLLPLVSSQCVNLTTRTQLPPAYTNSFTRGVYYPDKVFRSSVLHSTQDLFLPFFSNVTWFHAIHVSGTNGTKRFDNPVLPFNDGVYFASTEKSNIIRGWIFGTTLDSKTQSLLIVNNATNVVIKVCEFQFCNDPFLGVYYHKNNKSWMESEFRVYSSANNCTFEYVSQPFLMDLEGKQGNFKNLREFVFKNIDGYFKIYSKHTPINLVRDLPQGFSALEPLVDLPIGINITRFQTLLALHRSYLTPGDSSSGWTAGAAAYYVGYLQPRTFLLKYNENGTITDAVDCALDPLSETKCTLKSFTVEKGIYQTSNFRVQPTESIVRFPNITNLCPFGEVFNATRFASVYAWNRKRISNCVADYSVLYNSASFSTFKCYGVSPTKLNDLCFTNVYADSFVIRGDEVREIAPGQTGKIADYNYKLPDDFTGCVIAWNSNNLDSKVGGNYNYLYRLFRKSNLKPFERDISTEIYQAGSTPCNGVEGFNCYFPLQSYGFQPTNGVGYQPYRVVVLSFELLHAPATVCGPKKSTNLVKNKCVNFNFNGLTGTGVLTESNKKFLPFQQFGRDIADTTDAVRDPQTLEILDITPCSFGGVSVITPGTNTSNQVAVLYQDVNCTEVPVAIHADQLTPTWRVYSTGSNVFQTRAGCLIGAEHVNNSYECDIPIGAGICASYQTQTNSPRRARSVASQSIIAYTMSLGAENSVAYSNNSIAIPTNFTISVTTEILPVSMTKTSVDCTMYICGDSTECSNLLLQYGSFCTQLNRALTGIAVEQDKNTQEVFAQVKQIYKTPPIKDFGGFNFSQILPDPSKPSKRSFIEDLLFNKVTLADAGFIKQYGDCLGDIAARDLICAQKFNGLTVLPPLLTDEMIAQYTSALLAGTITSGWTFGAGAALQIPFAMQMAYRFNGCGVTQNVLYENQKLIANQFNSAIGKIQDSLSSTASALGKLQDVVNQNAQALNTLVKQLSSNFGAISSVLNDILSRLDKVEAEVQIDRLITGRLQSLQTYVTQQLIRAAEIRASANLAATKMSECVLGQSKRVDFCGKGCHLMSFPQSAPHGVVFLHVTYVPAQEKNFTTAPAICHDGKAHFPREGVFVSNGTHWFVTQRNFYEPQIITTDNTFVSGNCDVVIGIVNNTVYDPLQPELDSFKEELDKYFKNHTSPDVDLGDISGINASVVNIQKEIDRLNEVAKNLNESLIDLQELGKYEQYIKWPWYIWLGFIAGLIAIVMVTIMLCCMTSCCSCLKGCCSCGSCCKFDEDDSEPVLKGVKLHYT

SEQ ID NO: 890 - protein, 1273 aa, Artificial Sequence
  SARS-CoV-2/Sweden/01/2020__EPI_ISL_411951 spike protein (1-1273)(I909C_Y1047C)
MFVFLVLLPLVSSQCVNLTTRTQLPPAYTNSFTRGVYYPDKVFRSSVLHSTQDLFLPFFSNVTWFHAIHVSGTNGTKRFDNPVLPFNDGVYFASTEKSNIIRGWIFGTTLDSKTQSLLIVNNATNVVIKVCEFQFCNDPFLGVYYHKNNKSWMESEFRVYSSANNCTFEYVSQPFLMDLEGKQGNFKNLREFVFKNIDGYFKIYSKHTPINLVRDLPQGFSALEPLVDLPIGINITRFQTLLALHRSYLTPGDSSSGWTAGAAAYYVGYLQPRTFLLKYNENGTITDAVDCALDPLSETKCTLKSFTVEKGIYQTSNFRVQPTESIVRFPNITNLCPFGEVFNATRFASVYAWNRKRISNCVADYSVLYNSASFSTFKCYGVSPTKLNDLCFTNVYADSFVIRGDEVRQIAPGQTGKIADYNYKLPDDFTGCVIAWNSNNLDSKVGGNYNYLYRLFRKSNLKPFERDISTEIYQAGSTPCNGVEGFNCYFPLQSYGFQPTNGVGYQPYRVVVLSFELLHAPATVCGPKKSTNLVKNKCVNFNFNGLTGTGVLTESNKKFLPFQQFGRDIADTTDAVRDPQTLEILDITPCSFGGVSVITPGTNTSNQVAVLYQDVNCTEVPVAIHADQLTPTWRVYSTGSNVFQTRAGCLIGAEHVNNSYECDIPIGAGICASYQTQTNSPRRARSVASQSIIAYTMSLGAENSVAYSNNSIAIPTNFTISVTTEILPVSMTKTSVDCTMYICGDSTECSNLLLQYGSFCTQLNRALTGIAVEQDKNTQEVFAQVKQIYKTPPIKDCGGFNFSQILPDPSKPSKRSFIEDLLFNKVTLADAGFIKQYGDCLGDIAARDLICAQKFNGLTVLPPLLTDEMIAQYTSALLAGTITSGWTFGAGAALQIPFAMQMAYRFNGCGVTQNVLYENQKLIANQFNSAIGKIQDSLSSTASALGKLQDVVNQNAQALNTLVKQLSSNFGAISSVLNDILSRLDKVEAEVQIDRLITGRLQSLQTYVTQQLIRAAEIRASANLAATKMSECVLGQSKRVDFCGKGCHLMSFPQSAPHGVVFLHVTYVPAQEKNFTTAPAICHDGKAHFPREGVFVSNGTHWFVTQRNFYEPQIITTDNTFVSGNCDVVIGIVNNTVYDPLQPELDSFKEELDKYFKNHTSPDVDLGDISGINASVVNIQKEIDRLNEVAKNLNESLIDLQELGKYEQYIKWPWYIWLGFIAGLIAIVMVTIMLCCMTSCCSCLKGCCSCGSCCKFDEDDSEPVLKGVKLHYT

SEQ ID NO: 891 - protein, 1273 aa, Artificial Sequence
  SARS-CoV-2/Tianmen/HBCDC-HB-07/2020__EPI_ISL_412983 spike protein (1-1273)(I909C_Y1047C)
MFVFLVLLPLVSSQCVNLTTRTQLPPAYTNSFTRGVYYPDKVFRSSVLHSTQDLFLPFFSNVTWFHAIHVSGTNGTKRFDNPVLPFNDGVYFASTEKSNIIRGWIFGTTLDSKTQSLLIVNNATNVVIKVCEFQFCNDPFLGVYYHKNNKSWMESEFRVYSSANNCTFEYVSQPFLMDLEGKQGNFKNLREFVFKNIDGYFKIYSKHTPINLVRDLPQGFSALEPLVDLPIGINITRFQTLLALHRSYLTPGDSSSGWTAGAAAYYVGYLQPRTFLLKYNENGTITDAVDCALDPLSETKCTLKSFTVEKGIYQTSNFRVQPTESIVRFPNITNLCPFGEVFNATRFASVYAWNRKRISNCVADYSVLYNSASFSTFKCYGVSPTKLNDLCFTNVYADSFVIRGDEVRQIAPGQTGKIADYNYKLPDDFTGCVIAWNSNNLDSKVGGNYNYLYRLFRKSNLKPFERDISTEIYQAGSTPCNGVEGFNCYFPLQSYGFQPTNGVGYQPYRVVVLSFELLHAPATVCGPKKSTNLVKNKCVNFNFNGLTGTGVLTESNKKFLPFQQFGRDIADTTDAVRDPQTLEILDITPCSFGGVSVITPGTNTSNQVAVLYQDLNCTEVPVAIHADQLTPTWRVYSTGSNVFQTRAGCLIGAEHVNNSYECDIPIGAGICASYQTQTNSPRRARSVASQSIIAYTMSLGAENSVAYSNNSIAIPTNFTISVTTEILPVSMTKTSVDCTMYICGDSTECSNLLLQYGSFCTQLNRALTGIAVEQDKNTQEVFAQVKQIYKTPPIKDFGGFNFSQILPDPSKPSKRSFIEDLLFNKVTLADAGFIKQYGDCLGDIAARDLICAQKFNGLTVLPPLLTDEMIAQYTSALLAGTITSGWTFGAGAALQIPFAMQMAYRFNGCGVTQNVLYENQKLIANQFNSAIGKIQDSLSSTASALGKLQDVVNQNAQALNTLVKQLSSNFGAISSVLNDILSRLDKVEAEVQIDRLITGRLQSLQTYVTQQLIRAAEIRASANLAATKMSECVLGQSKRVDFCGKGCHLMSFPQSAPHGVVFLHVTYVPAQEKNFTTAPAICHDGKAHFPREGVFVSNGTHWFVTQRNFYEPQIITTDNTFVSGNCDVVIGIVNNTVYDPLQPELDSFKEELDKYFKNHTSPDVDLGDISGINASVVNIQKEIDRLNEVAKNLNESLIDLQELGKYEQYIKWPWYIWLGFIAGLIAIVMVTIMLCCMTSCCSCLKGCCSCGSCCKFDEDDSEPVLKGVKLHYT

SEQ ID NO: 892 - protein, 1273 aa, Artificial Sequence
  SARS-CoV-2/Hong Kong/case42_VM20002493/2020__EPI_ISL_414527 spike protein (1-1273)(I909C_Y1047C)
MFVFLVLLPLVSSQCVNLTTRTQLPPAYTNSFTRGVYYPDKVFRSSVLHSTQDLFLPFFSNVTWFHAIHVSGTNGTKRFDNPVLPFNDGVYFASTEKSNIIRGWIFGTTLDSKTQSLLIVNNATNVVIKVCEFQFCNDPFLGVYYHKNNKSWMESEFRVYSSANNCTFEYVSQPFLMDLEGKQGNFKNLREFVFKNIDGYFKIYSKHTPINLVRDLPQGFSALEPLVDLPIGINITRFQTLLALHRSYLTPGDSSSGWTAGAAAYYVGYLQPRTFLLKYNENGTITDAVDCALDPLSETKCTLKSFTVEKGIYQTSNFRVQPTESIVRFPNITNLCPFGEVFNATRFASVYAWNRKRISNCVADYSVLYNSASFSTFKCYGVSPTKLNDLCFTNVYADSFVIRGDEVRQIAPGQTGKIADYNYKLPDDFTGCVIAWNSNNLDSKVGGNYNYLYRLFRKSNLKPFERDISTEIYQAGSTPCNGVEGFNCYFPLQSYGFQPTNGVGYQPYRVVVLSFELLHAPATVCGPKKSTNLVKNKCVNFNFNGLTGTGVLTESNKKFLPFQQFGRDIADTTDAVRDPQTLEILDITPCSFGGVSVITPGTNTSNQVAVLYQDVNCTEVPVAIHADQLTPTWRVYSTGSNVFQTRAGCLIGAEHVNNSYECDIPIGAGICASYQTQTNSPRRARSVASQSIIAYTMSLGAENSVAYSNNSIAIPTNFAISVTTEILPVSMTKTSVDCTMYICGDSTECSNLLLQYGSFCTQLNRALTGIAVEQDKNTQEVFAQVKQIYKTPPIKDFGGFNFSQILPDPSKPSKRSFIEDLLFNKVTLADAGFIKQYGDCLGDIAARDLICAQKFNGLTVLPPLLTDEMIAQYTSALLAGTITSGWTFGAGAALQIPFAMQMAYRFNGCGVTQNVLYENQKLIANQFNSAIGKIQDSLSSTASALGKLQDVVNQNAQALNTLVKQLSSNFGAISSVLNDILSRLDKVEAEVQIDRLITGRLQSLQTYVTQQLIRAAEIRASANLAATKMSECVLGQSKRVDFCGKGCHLMSFPQSAPHGVVFLHVTYVPAQEKNFTTAPAICHDGKAHFPREGVFVSNGTHWFVTQRNFYEPQIITTDNTFVSGNCDVVIGIVNNTVYDPLQPELDSFKEELDKYFKNHTSPDVDLGDISGINASVVNIQKEIDRLNEVAKNLNESLIDLQELGKYEQYIKWPWYIWLGFIAGLIAIVMVTIMLCCMTSCCSCLKGCCSCGSCCKFDEDDSEPVLKGVKLHYT

SEQ ID NO: 893 - protein, 1273 aa, Artificial Sequence
  SARS-CoV-2/USA/CruiseA-23/2020__EPI_ISL_414482 spike protein (1-1273)(I909C_Y1047C)
MFVFLVLLPLVSSQCVNLTTRTQLPPAYTNSFTRGVYYPDKVFRSSVLHSTQDLFLPFFSNVTWFHAIHVSGTNGTKRFDNPVLPFNDGVYFASTEKSNIIRGWIFGTTLDSKTQSLLIVNNATNVVIKVCEFQFCNDPFLGVYYHKNNKSWMESEFRVYSSANNCTFEYVSQPFLMDLEVKQGNFKNLREFVFKNIDGYFKIYSKHTPINLVRDLPQGFSALEPLVDLPIGINITRFQTLLALHRSYLTPGDSSSGWTAGAAAYYVGYLQPRTFLLKYNENGTITDAVDCALDPLSETKCTLKSFTVEKGIYQTSNFRVQPTESIVRFPNITNLCPFGEVFNATRFASVYAWNRKRISNCVADYSVLYNSASFSTFKCYGVSPTKLNDLCFTNVYADSFVIRGDEVRQIAPGQTGKIADYNYKLPDDFTGCVIAWNSNNLDSKVGGNYNYLYRLFRKSNLKPFERDISTEIYQAGSTPCNGVEGFNCYFPLQSYGFQPTNGVGYQPYRVVVLSFELLHAPATVCGPKKSTNLVKNKCVNFNFNGLTGTGVLTESNKKFLPFQQFGRDIADTTDAVRDPQTLEILDITPCSFGGVSVITPGTNTSNQVAVLYQDVNCTEVPVAIHADQLTPTWRVYSTGSNVFQTRAGCLIGAEHVNNSYECDIPIGAGICASYQTQTNSPRRARSVASQSIIAYTMSLGAENSVAYSNNSIAIPTNFTISVTTEILPVSMTKTSVDCTMYICGDSTECSNLLLQYGSFCTQLNRALTGIAVEQDKNTQEVFAQVKQIYKTPPIKDFGGFNFSQILPDPSKPSKRSFIEDLLFNKVTLADAGFIKQYGDCLGDIAARDLICAQKFNGLTVLPPLLTDEMIAQYTSALLAGTITSGWTFGAGAALQIPFAMQMAYRFNGCGVTQNVLYENQKLIANQFNSAIGKIQDSLSSTASALGKLQDVVNQNAQALNTLVKQLSSNFGAISSVLNDILSRLDKVEAEVQIDRLITGRLQSLQTYVTQQLIRAAEIRASANLAATKMSECVLGQSKRVDFCGKGCHLMSFPQSAPHGVVFLHVTYVPAQEKNFTTAPAICHDGKAHFPREGVFVSNGTHWFVTQRNFYEPQIITTDNTFVSGNCDVVIGIVNNTVYDPLQPELDSFKEELDKYFKNHTSPDVDLGDISGINASVVNIQKEIDRLNEVAKNLNESLIDLQELGKYEQYIKWPWYIWLGFIAGLIAIVMVTIMLCCMTSCCSCLKGCCSCGSCCKFDEDDSEPVLKGVKLHYT

SEQ ID NO: 894 - protein, 1273 aa, Artificial Sequence
  SARS-CoV-2/Hong Kong/case85_VM20002868/2020__EPI_ISL_414519 spike protein (1-1273)(I909C_Y1047C)
MFVFLVLVPLVSSQCVNLTTRTQLPPAYTNSFTRGVYYPDKVFRSSVLHSTQDLFLPFFSNVTWFHAIHVSGTNGTKRFDNPVLPFNDGVYFASTEKSNIIRGWIFGTTLDSKTQSLLIVNNATNVVIKVCEFQFCNDPFLGVYYHKNNKSWMESEFRVYSSANNCTFEYVSQPFLMDLEGKQGNFKNLREFVFKNIDGYFKIYSKHTPINLVRDLPQGFSALEPLVDLPIGINITRFQTLLALHRSYLTPGDSSSGWTAGAAAYYVGYLQPRTFLLKYNENGTITDAVDCALDPLSETKCTLKSFTVEKGIYQTSNFRVQPTESIVRFPNITNLCPFGEVFNATRFASVYAWNRKRISNCVADYSVLYNSASFSTFKCYGVSPTKLNDLCFTNVYADSFVIRGDEVRQIAPGQTGKIADYNYKLPDDFTGCVIAWNSNNLDSKVGGNYNYLYRLFRKSNLKPFERDISTEIYQAGSTPCNGVEGFNCYFPLQSYGFQPTNGVGYQPYRVVVLSFELLHAPATVCGPKKSTNLVKNKCVNFNFNGLTGTGVLTESNKKFLPFQQFGRDIADTTDAVRDPQTLEILDITPCSFGGVSVITPGTNTSNQVAVLYQDVNCTEVPVAIHADQLTPTWRVYSTGSNVFQTRAGCLIGAEHVNNSYECDIPIGAGICASYQTQTNSPRRARSVASQSIIAYTMSLGAENSVAYSNNSIAIPTNFTISVTTEILPVSMTKTSVDCTMYICGDSTECSNLLLQYGSFCTQLNRALTGIAVEQDKNTQEVFAQVKQIYKTPPIKDFGGFNFSQILPDPSKPSKRSFIEDLLFNKVTLADAGFIKQYGDCLGDIAARDLICAQKFNGLTVLPPLLTDEMIAQYTSALLAGTITSGWTFGAGAALQIPFAMQMAYRFNGCGVTQNVLYENQKLIANQFNSAIGKIQDSLSSTASALGKLQDVVNQNAQALNTLVKQLSSNFGAISSVLNDILSRLDKVEAEVQIDRLITGRLQSLQTYVTQQLIRAAEIRASANLAATKMSECVLGQSKRVDFCGKGCHLMSFPQSAPHGVVFLHVTYVPAQEKNFTTAPAICHDGKAHFPREGVFVSNGTHWFVTQRNFYEPQIITTDNTFVSGNCDVVIGIVNNTVYDPLQPELDSFKEELDKYFKNHTSPDVDLGDISGINASVVNIQKEIDRLNEVAKNLNESLIDLQELGKYEQYIKWPWYIWLGFIAGLIAIVMVTIMLCCMTSCCSCLKGCCSCGSCCKFDEDDSEPVLKGVKLHYT

SEQ ID NO: 895 - protein, 1273 aa, Artificial Sequence
  SARS-CoV-2/England/200990660/2020__EPI_ISL_414523 spike protein (1-1273)(I909C_Y1047C)
MFVFLVLLPLVSSQCVNLTTRTQLPPAYTNSFTRGVYYPDKVFRSSVLHSTQDLFLPFFSNVTWFHAIHVSGTNGTKRFDNPVLPFNDGVYFASTEKSNIIRGWIFGTTLDSKTQSLLIVNNATNVVIKVCEFQFCNDPFLGVYYHKNNKSWMESEFRVYSSANNCTFEYVSQPFLMDLEGKQGNFKNLREFVFKNIDGYFKIYSKHTPINLVRDLPQGFSALEPLVDLPIGINITRFQTLLALHRSYLTPGDSSSGWTAGAAAYYVGYLQPRTFLLKYNENGTITDAVDCALDPLSETKCTLKSFTVEKGIYQTSNFRVQPTESIVRFPNITNLCPFGEVFNATRFASVYAWNRKRISNCVADYSVLYNSASFSTFKCYGVSPTKLNDLCFTNVYADSFVIRGDEVRQIAPGQTGKIADYNYKLPDDFTGCVIAWNSNNLDSKVGGNYNYLYRLFRKSNLKPFERDISTEIYQAGSTPCNGVEGFNCYFPLQSYGFQPTNGVGYQPYRVVVLSFELLHAPATVCGPKKSTNLVKNKCVNFNFNGLTGTGVLTESNKKFLPFQQFGRDIADTTDAVRDPQTLEILDITPCSFGGVSVITPGTNTSNQVAVLYQGVNCTEVPVAIHADQLTPTWRVYSTGSNVFQTRAGCLIGAEHVNNSYECDIPIGAGICASYQTQTNSPRRARSVASQSIIAYTMSLGAENSVAYSNNSIAIPTNFTISVTTEILPVSMTKTSVDCTMYICGDSTECSNLLLQYGSFCTQLNRALTGIAVEQDKNTQEVFAQVKQIYKTPPIKDFGGFNFSQILPDPSKPSKRSFIEDLLFNKVTLADAGFIKQYGDCLGDIAARDLICAQKFNGLTVLPPLLTDEMIAQYTSALLAGTITSGWTFGAGAALQIPFAMQMAYRFNGCGVTQNVLYENQKLIANQFNSAIGKIQDSLSSTASALGKLQDVVNQNAQALNTLVKQLSSNFGAISSVLNDILSRLDKVEAEVQIDRLITGRLQSLQTYVTQQLIRAAEIRASANLAATKMSECVLGQSKRVDFCGKGCHLMSFPQSAPHGVVFLHVTYVPAQEKNFTTAPAICHDGKAHFPREGVFVSNGTHWFVTQRNFYEPQIITTDNTFVSGNCDVVIGIVNNTVYDPLQPELDSFKEELDKYFKNHTSPDVDLGDISGINASVVNIQKEIDRLNEVAKNLNESLIDLQELGKYEQYIKWPWYIWLGFIAGLIAIVMVTIMLCCMTSCCSCLKGCCSCGSCCKFDEDDSELVLKGVKLHYT

SEQ ID NO: 896 - protein, 1273 aa, Artificial Sequence
  SARS-CoV-2/Australia/NSW09/2020__EPI_ISL_413595 spike protein (1-1273)(I909C_Y1047C)
MFVFLVLLPLVSSQCVNLTTRTQLPPAYTNSFTRGVYYPDKVFRSSVLHSTQDLFLPFFSNVTWFHAIHVSGTNGTKRFDNPVLPFNDGVYFASTEKSNIIRGWIFGTTLDSKTQSLLIVNNATNVVIKVCEFQFCNDPFLGVYYHKNNKSWMESEFRVYSSANNCTFEYVSQPFLMDLEGKQGNFKNLREFVFKNIDGYFKIYSKHTPINLVRDLPQGFSALEPLVDLPIGINITRFQTLLALHRSYLTPGDSSSGWTAGAAAYYVGYLQPRTFLLKYNENGTITDAVDCALDPLSETKCTLKSFTVEKGIYQTSNFRVQPTESIVRFPNITNLCPFGEVFNATRFASVYAWNRKRISNCVADYSVLYNSASFSTFKCYGVSPTKLNDLCFTNVYADSFVIRGDEVRQIAPGQTGKIADYNYKLPDDFTGCVIAWNSNNLDSKVGGNYNYLYRLFRKSNLKPFERDISTEIYQAGSTPCNGVEGFNCYFPLQSYGFQPTNGVGYQPYRVVVLSFELLHAPATVCGPKKSTNLVKNKCVNFNFNGLTGTGVLTESNKKFLPFQQFGRDIADTTDAVRDPQTLEILDITPCSFGGVSVITPGTNTSNQVAVLYQDVNCTEVPVAIHADQLTPTWRVYSTGSNVFQTRAGCLIGAEHVNNSYECDIPIGAGICASYQTQTNSPRRARSVASQSIIAYTMSLGAENSVAYSNNSIAIPTNFTISVTTEILPVSMTKTSVDCTMYICGDSTECSNLLLQYGSFCTQLNRALTGIAVEQDKNTQEVFAQVKQIYKTPPIKDFGGFNFSQILPDPSKPSKRSFIEDLLFNKVTLADAGFIKQYGDCLGDIAARDLICAQKFNGLTVLPPLLTDEMIAQYTSALLAGTITSGWTFGAGAALQIPFAMQMAYRFNGCGVTQNVLYENQKLIANQFNSAIGKIQDSLSFTASALGKLQDVVNQNAQALNTLVKQLSSNFGAISSVLNDILSRLDKVEAEVQIDRLITGRLQSLQTYVTQQLIRAAEIRASANLAATKMSECVLGQSKRVDFCGKGCHLMSFPQSAPHGVVFLHVTYVPAQEKNFTTAPAICHDGKAHFPREGVFVSNGTHWFVTQRNFYEPQIITTDNTFVSGNCDVVIGIVNNTVYDPLQPELDSFKEELDKYFKNHTSPDVDLGDISGINASVVNIQKEIDRLNEVAKNLNESLIDLQELGKYEQYIKWPWYIWLGFIAGLIAIVMVTIMLCCMTSCCSCLKGCCSCGSCCKFDEDDSEPVLKGVKLHYT

SEQ ID NO: 897 - protein, 1273 aa, Artificial Sequence
  SARS-CoV-2/Australia/NSW10/2020__EPI_ISL_413596 spike protein (1-1273)(I909C_Y1047C)
MFVFLVLLPLVSSQCVNLTTRTQLPPAYTNSFTRGVYYPDKVFRSSVLHSTQDLFLPFFSNVTWFHAIHVSGTNGTKRFDNPVLPFNDGVYFASTEKSNIIRGWIFGTTLDSKTQSLLIVNNATNVVIKVCEFQFCNDPFLGVYYHKNNKSWMESEFRVYSSANNCTFEYVSQPFLMDLEGKQGNFKNLREFVFKNIDGYFKIYSKHTPINLVRDLPQGFSALEPLVDLPIGINITRFQTLLALHRSYLTPGDSSSGWTAGAAAYYVGYLQPRTFLLKYNENGTITDAVDCALDPLSETKCTLKSFTVEKGIYQTSNFRVQPTESIVRFPNITNLCPFGEVFNATRFASVYAWNRKRISNCVADYSVLYNSASFSTFKCYGVSPTKLNDLCFTNVYADSFVIRGDEVRQIAPGQTGKIADYNYKLPDDFTGCVIAWNSNNLDSKVGGNYNYLYRLFRKSNLKPFERDISTEIYQAGSTPCNGVEGFNCYFPLQSYGFQPTNGVGYQPYRVVVLSFELLHAPATVCGPKKSTNLVKNKCVNFNFNGLTGTGVLTESNKKFLPFQQFGRDIADTTDAVRDPQTLEILDITPCSFGGVSVITPGTNTSNQVAVLYQDVNCTEVPVAIHADQLTPTWRVYSTGSNVFQTRAGCLIGAEHVNNSYECDIPIGAGICASYQTQTNSPRRARSVASQSIIAYTMSLGAENSVAYSNNSIAIPTNFTISVTTEILPVSMTKTSVDCTMYICGDSTECSNLLLQYGSFCTQLNRALTGIAVEQDKNTQEVFAQVKQIYKTPPIKDFGGFNFSQILPDPSKPSKRSFIEDLLFNKVTLADAGFIKQYGDCLGDIAARDLICAQKFNGLTVLPPLLTDEMIAQYTSALLAGTITSGWTFGAGAALQIPFAMQMAYRFNGCGVTQNVLYENQKLIANQFNSAIGKIQDSLSSTASALGKLQDVVNQNAQALNTLVKQLSSNFGAISSVLNDILSRLDKVEAEVQIDRLITGRLQSLQTYVTQQLIRAAEIRASANLAATKMSECVLGQSKRVDFCGKGCHLMSFPQSAPHGVVFLHVTYVPAQEKNFTTAPAICHDGKAHFPREGVFVSNGTHWFVTQRNFYEPQIITTDNTFVSGNCDVVIGIVNNTVYDPLQPELDSFKEELDKYFKNHTSPDVDLGDISGINASVVNIQKEIDRLNEVAKNLNESLIDLQELGKYEQYIKWPWYIWLGFIAGLIAIVMVTIMLCCMTSCCSCLKGCCSCGSCFKFDEDDSEPVLKGVKLHYT

SEQ ID NO: 898 - protein, 1273 aa, Artificial Sequence
  SARS-CoV-2/Switzerland/1000477797/2020__EPI_ISL_413023 spike protein (1-1273)(I909C_Y1047C)
MFVFLVLLPLVSSQCVNLTTRTQLPPAYTNSFTRGVYYPDKVFRSSVLHSTQDLFLPFFSNVTWFHAIHVSGTNGTKRFDNPVLPFNDGVYFASTEKSNIIRGWIFGTTLDSKTQSLLIVNNATNVVIKVCEFQFCNDPFLGVYYHKNNKSWMESEFRVYSSANNCTFEYVSQPFLMDLEGKQGNFKNLREFVFKNIDGYFNIYSKHTPINLVRDLPQGFSALEPLVDLPIGINITRFQTLLALHRSYLTPGDSSSGWTAGAAAYYVGYLQPRTFLLKYNENGTITDAVDCALDPLSETKCTLKSFTVEKGIYQTSNFRVQPTESIVRFPNITNLCPFGEVFNATRFASVYAWNRKRISNCVADYSVLYNSASFSTFKCYGVSPTKLNDLCFTNVYADSFVIRGDEVRQIAPGQTGKIADYNYKLPDDFTGCVIAWNSNNLDSKVGGNYNYLYRLFRKSNLKPFERDISTEIYQAGSTPCNGVEGFNCYFPLQSYGFQPTNGVGYQPYRVVVLSFELLHAPATVCGPKKSTNLVKNKCVNFNFNGLTGTGVLTESNKKFLPFQQFGRDIADTTDAVRDPQTLEILDITPCSFGGVSVITPGTNTSNQVAVLYQGVNCTEVPVAIHADQLTPTWRVYSTGSNVFQTRAGCLIGAEHVNNSYECDIPIGAGICASYQTQTNSPRRARSVASQSIIAYTMSLGAENSVAYSNNSIAIPTNFTISVTTEILPVSMTKTSVDCTMYICGDSTECSNLLLQYGSFCTQLNRALTGIAVEQDKNTQEVFAQVKQIYKTPPIKDFGGFNFSQILPDPSKPSKRSFIEDLLFNKVTLADAGFIKQYGDCLGDIAARDLICAQKFNGLTVLPPLLTDEMIAQYTSALLAGTITSGWTFGAGAALQIPFAMQMAYRFNGCGVTQNVLYENQKLIANQFNSAIGKIQDSLSSTASALGKLQDVVNQNAQALNTLVKQLSSNFGAISSVLNDILSRLDKVEAEVQIDRLITGRLQSLQTYVTQQLIRAAEIRASANLAATKMSECVLGQSKRVDFCGKGCHLMSFPQSAPHGVVFLHVTYVPAQEKNFTTAPAICHDGKAHFPREGVFVSNGTHWFVTQRNFYEPQIITTDNTFVSGNCDVVIGIVNNTVYDPLQPELDSFKEELDKYFKNHTSPDVDLGDISGINASVVNIQKEIDRLNEVAKNLNESLIDLQELGKYEQYIKWPWYIWLGFIAGLIAIVMVTIMLCCMTSCCSCLKGCCSCGSCCKFDEDDSEPVLKGVKLHYT

SEQ ID NO: 899 - protein, 1273 aa, Artificial Sequence
  SARS-CoV-2/Belgium/BA-02291/2020__EPI_ISL_415159 spike protein (1-1273)(I909C_Y1047C)
MFVFLVLLPLVSSQCVNLTTRTQLPPAYTNSFTRGVYYPDKVFRSSVLHSTQDLFLPFFSNVTWFHAIHVSGTNGTKRFDNPVLPFNDGVYFASTEKSNIIRGWIFGTTLDSKTQSLLIVNNATNVVIKVCEFQFCNDPFLGVYYHKNNKSWMESEFRVYSSANNCTFEYVSQPFLMDLEGKQGNFKNLREFVFKNIDGYFKIYSKHTPINLVRDLPQGFSALEPLVDLPIGINITRFQTLLALHRSYLTPGDSSSGWTAGAAAYYVGYLQPRTFLLKYNENGTITDAVDCALDPLSETKCTLKSFTVEKGIYQTSNFRVQPTESIVRFPNITNLCPFGEVFNATRFASVYAWNRKRISNCVADYSVLYNSASFSTFKCYGVSPTKLNDLCFTNVYADSFVIRGDEVRQIAPGQTGKIADYNYKLPDDFTGCVIAWNSNNLDSKVGGNYNYLYRLFRRSNLKPFERDISTEIYQAGSTPCNGVEGFNCYFPLQSYGFQPTNGVGYQPYRVVVLSFELLPAPATVCGPKKSTNLVKNKCVNFNFNGLTGTGVLTESNKKFLPFQQFGRDIADTTDAVRDPQTLEILDITPCSFGGVSVITPGTNTSNQVAVLYQGVNCTEVPVAIHADQLTPTWRVYSTGSNVFQTRAGCLIGAEHVNNSYECDIPIGAGICASYQTQTNSPRRARSVASQSIIAYTMSLGAENSVAYSNNSIAIPTNFTISVTTEILPVSMTKTSVDCTMYICGDSTECSNLLLQYGSFCTQLNRALTGIAVEQDKNTQEVFAQVKQIYKTPPIKDFGGFNFSQILPDPSKPSKRSFIEDLLFNKVTLADAGFIKQYGDCLGDIAARDLICAQKFNGLTVLPPLLTDEMIAQYTSALLAGTITSGWTFGAGAALQIPFAMQMAYRFNGCGVTQNVLYENQKLIANQFNSAIGKIQDSLSSAAPALGKLQDVVNQNAQALNTLVKQLSSNFGAISSVLNDILSRLDKVEAEVQIDRLITGRLQSLQTYVTQQLIRAAEIRASANLAATKMSECVLGQSKRVDFCGKGCHLMSFPQSAPHGVVFLHVTYVPAQEKNFTTAPAICHDGKAHFPREGVFVSNGTHWFVTQRNFYEPQIITTDNTFVSGNCDVVIGIVNNTVYDPLQPELDSFKEELDKYFKNHTSPDVDLGDISGINASVVNIQKEIDRLNEVAKNLNESLIDLQELGKYEQYIKWPWYIWLGFIAGLIAIVMVTIMLCCMTSCCSCLKGCCSCGSCCKFDEDDSEPVLKGVKLHYT

SEQ ID NO: 900 - protein, 1273 aa, Artificial Sequence
  SARS-CoV-2/USA/WA8-UW5/2020__EPI_ISL_413486 spike protein (1-1273)(I909C_Y1047C)
MFVFLVLLPLVSSQCVNLTTRTQLPPAYTNSFTRGVYYPDKVFRSSVLHSTQDLFLPFFSNVTWFHAIHVSGTNGTKRFDNPVLPFNDGVYFASTEKSNIIRGWIFGTTLDSKTQSLLIVNNATNVVIKVCEFQFCNDPFLGVYYHKNNKSWMESEFRVYSSANNCTFEYVSQPFLMDLEGKQGNFKNLREFVFKNIDGYFKIYSKHTPINLVRDLPQGFSALEPLVDLPIGINITRFQTLLALHRSYLTPGDSSSGWTAGAAAYYVGYLQPRTFLLKYNENGTITDAVDCALDPLSETKCTLKSFTVEKGIYQTSNFRVQPTESIVRFPNITNLCPFGEVFNATRFASVYAWNRKRISNCVADYSVLYNSASFSTFKCYGVSPTKLNDLCFTNVYADSFVIRGDEVRQIAPGQTGKIADYNYKLPDDFTGCVIAWNSNNLDSKVGGNYNYLYRLFRKSNLKPFERDISTEIYQAGSTPCNGVEGFNCYFPLQSYGFQPTNGVGYQPYRVVVLSFELLHAPATVCGPKKSTNLVKNKCVNFNFNGLTGTGVLTESNKKFLPFQQFGRDIADTTDAVRDPQTLEILDITPCSFGGVSVITPGTNTSNQVAVLYQDVNCTEVPVAIHADQLTPTWRVYSTGSNVFQTRAGCLIGAEYVNNSYECDIPIGAGICASYQTQTNSPRRARSVASQSIIAYTMSLGAENSVAYSNNSIAIPTNFTISVTTEILPVSMTKTSVDCTMYICGDSTECSNLLLQYGSFCTQLNRALTGIAVEQDKNTQEVFAQVKQIYKTPPIKDFGGFNFSQILPDPSKPSKRSFIEDLLFNKVTLADAGFIKQYGDCLGDIAARDLICAQKFNGLTVLPPLLTDEMIAQYTSALLAGTITSGWTFGAGAALQIPFAMQMAYRFNGCGVTQNVLYENQKLIANQFNSAIGKIQDSLSSTASALGKLQDVVNQNAQALNTLVKQLSSNFGAISSVLNDILSRLDKVEAEVQIDRLITGRLQSLQTYVTQQLIRAAEIRASANLAATKMSECVLGQSKRVDFCGKGCHLMSFPQSAPHGVVFLHVTYVPAQEKNFTTAPAICHDGKAHFPREGVFVSNGTHWFVTQRNFYEPQIITTDNTFVSGNCDVVIGIVNNTVYDPLQPELDSFKEELDKYFKNHTSPDVDLGDISGINASVVNIQKEIDRLNEVAKNLNESLIDLQELGKYEQYIKWPWYIWLGFIAGLIAIVMVTIMLCCMTSCCSCLKGCCSCGSCCKFDEDDSEPVLKGVKLHYT

SEQ ID NO: 901 - protein, 1273 aa, Artificial Sequence
  SARS-CoV-2/England/20102000506/2020__EPI_ISL_415147 spike protein (1-1273)(I909C_Y1047C)
MFVFLVLLPLVSSQCVNLTTRTQLPPAYTNSFTRGVYYPDKVFRSSVLHSTQDLFLPFFSNVTWFHAIHVSGTNGTKRFDNPVLPFNDGVYFASTEKSNIIRGWIFGTTLDSKTQSLLIVNNATNVVIKVCEFQFCNDPFLGVYYHKNNKSWMESEFRVYSSANNCTFEYVSQPFLMDLEGKQGNFKNLREFVFKNIDGYFKIYSKHTPINLVRDLPQGFSALEPLVDLPIGINITRFQTLLALHRSYLTPGDSSSGWTAGAAAYYVGYLQPRTFLLKYNENGTITDAVDCALDPLSETKCTLKSFTVEKGIYQTSNFRVQPTESIVRFPNITNLCPFGEVFNATRFASVYAWNRKRISNCVADYSVLYNSASFSTFKCYGVSPTKLNDLCFTNVYADSFVIRGDEVRQIAPGQTGKIADYNYKLPDDFTGCVIAWNSNNLDSKVGGNYNYLYRLFRKSNLKPFERDISTEIYQAGSTPCNGVEGFNCYFPLQSYGFQPTNGVGYQPYRVVVLSFELLHAPATVCGPKKSTNLVKNKCVNFNFNGLTGTGVLTESNKKFLPFQQFGRDIADTTDAVRDPQTLEILDITPCSFGGVSVITPGTNTSNQVAVLYQGVNCTEVPVAIHADQLTPTWRVYSTGSNVFQTRAGCLIGAEHVNNSYECDIPIGAGICASYQTQTNSPRRARSVASQSIIAYTMSLGAENSVAYSNNSIAIPTNFTISVTTEILPVSMTKTSVDCTMYICGDSTECSNLLLQYGSFCTQLNRALTGIAVEQDKNTQEVFAQVKQIYKTPPIKDFGGFNFSQILPDPSKPSKRSFIEDLLFNKVTLADAGFIKQYGYCLGDIAARDLICAQKFNGLTVLPPLLTDEMIAQYTSALLAGTITSGWTFGAGAALQIPFAMQMAYRFNGCGVTQNVLYENQKLIANQFNSAIGKIQDSLSSTASALGKLQDVVNQNAQALNTLVKQLSSNFGAISSVLNDILSRLDKVEAEVQIDRLITGRLQSLQTYVTQQLIRAAEIRASANLAATKMSECVLGQSKRVDFCGKGCHLMSFPQSAPHGVVFLHVTYVPAQEKNFTTAPAICHDGKAHFPREGVFVSNGTHWFVTQRNFYEPQIITTDNTFVSGNCDVVIGIVNNTVYDPLQPELDSFKEELDKYFKNHTSPDVDLGDISGINASVVNIQKEIDRLNEVAKNLNESLIDLQELGKYEQYIKWPWYIWLGFIAGLIAIVMVTIMLCCMTSCCSCLKGCCSCGSCCKFDEDDSEPVLKGVKLHYT

SEQ ID NO: 902 - protein, 1273 aa, Artificial Sequence
  SARS-CoV-2/Belgium/VAG-03013/2020__EPI_ISL_415155 spike protein (1-1273)(I909C_Y1047C)
MFVFLVLLPLVSSQCVNLTTRTQLPPAYTNSFTRGVYYPDKVFRSSVLHSTQDLFLPFFSNVTWFHAIHVSGTNGTKRFDNPVLPFNDGVYFASTEKSNIIRGWIFGTTLDSKTQSLLIVNNATNVVIKVCEFQFCNDPFLGVYYHKNNKSWMESEFRVYSSANNCTFEYVSQPFLMDLEGKQGNFKNLREFVFKNIDGYFKIYSKHTPINLVRDLPQGFSALEPLVDLPIGINITRFQTLLALHRSYLTPGDSSSGWTAGAAAYYVGYLQPRTFLLKYNENGTITDAVDCALDPLSETKCTLKSFTVEKGIYQTSNFRVQPTESIVRFPNITNLCPFGEVFNATRFASVYAWNRKRISNCVADYSVLYNSASFSTFKCYGVSPTKLNDLCFTNVYADSFVIRGDEVRQIAPGQTGKIADYNYKLPDDFTGCVIAWNSNNLDSKVGGNYNYLYRLFRKSNLKPFERDISTEIYQAGSTPCNGVEGFNCYFPLQSYGFQPTNGVGYQPYRVVVLSFELLHAPATVCGPKKSTNLVKNKCVNFNFNGLTGTGVLTESNKKFLPFQQFGRDIADTTDAVRDPQTLEILDITPCSFGGVSVITPGTNTSNQVAVLYQGVNCTEVPVAIHADQLTPTWRVYSTGSNVFQTRAGCLIGAEHVNNSYECDIPIGAGICASYQTQTNSPRRARSVASQSIIAYTMSLGAENSVAYSNNSIAIPTNFTISVTTEILPVSMTKTSVDCTMYICGDSTECSNLLLQYGSFCTQLNRALTGIAVEQDKNTQEVFAQVKQIYKTPPIKDFGGFNFSQILPDPSKPSKRSFIEDLLFNKVTLADAGFIKQYGDCLGDIAARDLICAQKFNGLTVLPPLLTDEMIAQYTSALLAGTITSGWTFGAGAALQIPFAMQMAYRFNGCGVTQNVLYENQKLIANQFNSAIGKIQDSLSSTATALGKLQDVVNQNAQALNTLVKQLSSNFGAISSVLNDILSRLDKVEAEVQIDRLITGRLQSLQTYVTQQLIRAAEIRASANLAATKMSECVLGQSKRVDFCGKGCHLMSFPQSAPHGVVFLHVTYVPAQEKNFTTAPAICHDGKAHFPREGVFVSNGTHWFVTQRNFYEPQIITTDNTFVSGNCDVVIGIVNNTVYDPLQPELDSFKEELDKYFKNHTSPDVDLGDISGINASVVNIQKEIDRLNEVAKNLNESLIDLQELGKYEQYIKWPWYIWLGFIAGLIAIVMVTIMLCCMTSCCSCLKGCCSCGSCCKFDEDDSEPVLKGVKLHYT

SEQ ID NO: 903 - protein, 1273 aa, Artificial Sequence
  SARS-CoV-2/Belgium/BC-03016/2020__EPI_ISL_415157 spike protein (1-1273)(I909C_Y1047C)
MFVFLVLLPLVSSQCVNLTTRTQLPPAYTNSFTRGVYYPDKVFRSSVLHSTQDLFLPFFSNVTWFHAIHVSGTNGTKRFDNPVLPFNDGVYFASTEKSNIIRGWIFGTTLDSKTQSLLIVNNATNVVIKVCEFQFCNDPFLGVYYHKNNKSWMESEFRVYSSANNCTFEYVSQPFLMDLEGKQGNFKNLREFVFKNIDGYFKIYSKHTPINLVRDLPQGFSALEPLVDLPIGINITRFQTLLALHRSYLTPGDSSSGWTAGAAAYYVGYLQPRTFLLKYNENGTITDAVDCALDPLSETKCTLKSFTVEKGIYQTSNFRVQPTESIVRFPNITNLCPFGEVFNATRFASVYAWNRKRISNCVADYSVLYNSASFSTFKCYGVSPTKLNDLCFTNVYADSFVIRGDEVRQIAPGQTGKIADYNYKLPDDFTGCVIAWNSNNLDSKVGGNYNYLYRLFRKSNLKPFERDISTEIYQAGSTPCNGVEGFNCYFPLQSYGFQPTNGVGYQPYRVVVLSFELLHAPATVCGPKKSTNLVKNKCVNFNFNGLTGTGVLTESNKKFLPFQQFGRDIADTTDAVRDPQTLEILDITPCSFGGVSVITPGTNTSNQVAVLYQGVNCTEVPVAIHADQLTPTWRVYSTGSNVFQTRAGCLIGAEHVNNSYECDIPIGAGICASYQTQTNSPRRARSVASQSIIAYTMSLGAENSVAYSNNSIAIPTNFTISVTTEILPVSMTKTSVDCTMYICGDSTECSNLLLQYGSFCTQLNRALTGIAVEQDKNTQEVFAQVKQIYKTPPIKDFGGFNFSQILPDPSKPSKRSFIEDLLFNKVTLADAGFIKQYGDCLGDIAARDLICAQKFNGLTVLPPLLTDEMIAQYTSALLAGTITSGWTFGAGAALQIPFAMQMAYRFNGCGVTQNVLYENQKLIANQFNSAIGKIQDSLSSTAPALGKLQDVVNQNAQALNTLVKQLSSNFGAISSVLNDILSRLDKVEAEVQIDRLITGRLQSLQTYVTQQLIRAAEIRASANLAATKMSECVLGQSKRVDFCGKGCHLMSFPQSAPHGVVFLHVTYVPAQEKNFTTAPAICHDGKAHFPREGVFVSNGTHWFVTQRNFYEPQIITTDNTFVSGNCDVVIGIVNNTVYDPLQPELDSFKEELDKYFKNHTSPDVDLGDISGINASVVNIQKEIDRLNEVAKNLNESLIDLQELGKYEQYIKWPWYIWLGFIAGLIAIVMVTIMLCCMTSCCSCLKGCCSCGSCCKFDEDDSEPVLKGVKLHYT

SEQ ID NO: 904 - protein, 1273 aa, Artificial Sequence
  SARS-CoV-2/Germany/BavPat3/2020__EPI_ISL_414521 spike protein (1-1273)(I909C_Y1047C)
MFVFLVLLPLVSSQCVNLTTRTQLPPAYTNSFTRGVYYPDKVFRSSVLHSTQDLFLPFFSNVTWFHAIHVSGTNGTKRFDNPVLPFNDGVYFASTEKSNIIRGWIFGTTLDSKTQSLLIVNNATNVVIKVCEFQFCNDPFLGVYYHKNNKSWMESEFRVYSSANNCTFEYVSQPFLMDLEGKQGNFKNLREFVFKNIDGYFKIYSKHTPINLVRDLPQGFSALEPLVDLPIGINITRFQTLLALHRSYLTPGDSSSGWTAGAAAYYVGYLQPRTFLLKYNENGTITDAVDCALDPLSETKCTLKSFTVEKGIYQTSNFRVQPTESIVRFPNITNLCPFGEVFNATRFASVYAWNRKRISNCVADYSVLYNSASFSTFKCYGVSPTKLNDLCFTNVYADSFVIRGDEVRQIAPGQTGKIADYNYKLPDDFTGCVIAWNSNNLDSKVGGNYNYLYRLFRKSNLKPFERDISTEIYQAGSTPCNGVEGFNCYFPLQSYGFQPTNGVGYQPYRVVVLSFELLHAPATVCGPKKSTNLVKNKCVNFNFNGLTGTGVLTESNKKFLPFQQFGRDIADTTDAVRDPQTLEILDITPCSFGGVSVITPGTNTSNQVAVLYQDVNCTEVPVAIHADQLTPTWRVYSTGSNVFQTRAGCLIGAEHVNNSYECDIPIGAGICASYQTQTNSPRRARSVASQSIIAYTMSLGAENSVAYSNNSIAIPTNFTISVTTEILPVSMTKTSVDCTMYICGDSTECSNLLLQYGSFCTQLNRALTGIAVEQDKNTQQVFAQVKQIYKTPPIKDFGGFNFSQILPDPSKPSKRSFIEDLLFNKVTLADAGFIKQYGDCLGDIAARDLICAQKFNGLTVLPPLLTDEMIAQYTSALLAGTITSGWTFGAGAALQIPFAMQMAYRFNGCGVTQNVLYENQKLIANQFNSAIGKIQDSLSSTASALGKLQDVVNQNAQALNTLVKQLSSNFGAISSVLNDILSRLDKVEAEVQIDRLITGRLQSLQTYVTQQLIRAAEIRASANLAATKMSECVLGQSKRVDFCGKGCHLMSFPQSAPHGVVFLHVTYVPAQEKNFTTAPAICHDGKAHFPREGVFVSNGTHWFVTQRNFYEPQIITTDNTFVSGNCDVVIGIVNNTVYDPLQPELDSFKEELDKYFKNHTSPDVDLGDISGINASVVNIQKEIDRLNEVAKNLNESLIDLQELGKYEQYIKWPWYIWLGFIAGLIAIVMVTIMLCCMTSCCSCLKGCCSCGSCCKFDEDDSEPVLKGVKLHYT

SEQ ID NO: 905 - protein, 1273 aa, Artificial Sequence
  SARS-CoV-2/France/HF1805/2020__EPI_ISL_414628 spike protein (1-1273)(I909C_Y1047C)
MFVFLVLLPLVSSQCVNLTTRTQLPPAYTNSFTRGVYYPDKVFRSSVLHSTQDLFLPFFSNVTWFHAIHVSGTNGTKRFDNPVLPFNDGVYFASTEKSNIIRGWIFGTTLDSKTQSLLIVNNATNVVIKVCEFQFCNDPFLGVYYHKNNKSWMESEFRVYSSANNCTFEYVSQPFLMDLEGKQGNFKNLREFVFKNIDGYFKIYSKHTPINLVRDLPQGFSALEPLVDLPIGINITRFQTLLALHRSYLTPGDSSSGWTAGAAAYYVGYLQPRTFLLKYNENGTITDAVDCALDPLSETKCTLKSFTVEKGIYQTSNFRVQPTESIVRFPNITNLCPFGEVFNATRFASVYAWNRKRISNCVADYSVLYNSASFSTFKCYGVSPTKLNDLCFTNVYADSFVIRGDEVRQIAPGQTGKIADYNYKLPDDFTGCVIAWNSNNLDSKVGGNYNYLYRLFRKSNLKPFERDISTEIYQAGSTPCNGVEGFNCYFPLQSYGFQPTNGVGYQPYRVVVLSFELLHAPATVCGPKKSTNLVKNKCVNFNFNGLTGTGVLTESNKKFLPFQQFGRDIADTTDAVRDPQTLEILDITPCSFGGVSVITPGTNTSNQVAVLYQGVNCTEVPVAIHADQLTPTWRVYSTGSNVFQTRAGCLIGAEHVNNSYECDIPIGAGICASYQTQTNSPRRARSVASQSIIAYTMSLGAENSVAYSNNSIAIPTNFTISVTTEILPVSMTKTSVDCTMYICGDSTECSNLLLQYGSFCTQLNRALTGIAVEQDKNTQEVFAQVKQIYKTPPIKDFGGFNFSQILPDPSKPSKRSFIEDLLFNKVTLADAGFIKQYGDCLGDIAARDLICAQKFNGLTVLPPLLTDEMIAQYTSALLAGTITSGWTFGAGAALQIPFAMQMAYRFNGCGVTQNVLYENQKLIANQFNSAIGKIQDSLSSTASALGKLQDVVNQNAQALNTLVKQLSSNFGAISSVLNDILSRLDKVEAEVQIDRLITGRLQSLQTYVTQQLIRAAEIRASANLAATKMSECVLGQSKRVDFCGKGCHLMSFPQSAPHGVVFLHVTYVPAQEKNFTTAPAICHDGKAHFPREGVFVSNGTHWFVTQRNFYEPQIITTDNTFVSGNCDVVIGVVNNTVYDPLQPELDSFKEELDKYFKNHTSPDVDLGDISGINASVVNIQKEIDRLNEVAKNLNESLIDLQELGKYEQYIKWPWYIWLGFIAGLIAIVMVTIMLCCMTSCCSCLKGCCSCGSCCKFDEDDSEPVLKGVKLHYT

SEQ ID NO: 906 - protein, 1273 aa, Artificial Sequence
  SARS-CoV-2/Netherlands/ZuidHolland_9/2020__EPI_ISL_414445 spike protein (1-1273)(I909C_Y1047C)
MFVFLVLLPLVSSQCVNLTTRTQLPPAYTNSFTRGVYYPDKVFRSSVLHSTQDLFLPFFSNVTWFHAIHVSGTNGTKRFDNPVLPFNDGVYFASTEKSNIIRGWIFGTTLDSKTQSLLIVNNATNVVIKVCEFQFCNDPFLGVYYHKNNKSWMESEFRVYSSANNCTFEYVSQPFLMDLEGKQGNFKNLREFVFKNIDGYFKIYSKHTPINLVRDLPQGFSALEPLVDLPIGINITRFQTLLALHRSYLTPGDSSSGWTAGAAAYYVGYLQPRTFLLKYNENGTITDAVDCALDPLSETKCTLKSFTVEKGIYQTSNFRVQPTESIVRFPNITNLCPFGEVFNATRFASVYAWNRKRISNCVADYSVLYNSASFSTFKCYGVSPTKLNDLCFTNVYADSFVIRGDEVRQIAPGQTGKIADYNYKLPDDFTGCVIAWNSNNLDSKVGGNYNYLYRLFRKSNLKPFERDISTEIYQAGSTPCNGVEGFNCYFPLQSYGFQPTNGVGYQPYRVVVLSFELLHAPATVCGPKKSTNLVKNKCVNFNFNGLTGTGVLTESNKKFLPFQQFGRDIADTTDAVRDPQTLEILDITPCSFGGVSVITPGTNTSNQVAVLYQGVNCTEVPVAIHADQLTPTWRVYSTGSNVFQTRAGCLIGAEHVNNSYECDIPIGAGICASYQTQTNSPRRARSVASQSIIAYTMSLGAENSVAYSNNSIAIPTNFTISVTTEILPVSMTKTSVDCTMYICGDSTECSNLLLQYGSFCTQLNRALTGIAVEQDKNTQEVFAQVKQIYKTPPIKDFGGFNFSQILPDPSKPSKRSFIEDLLFNKVTLADAGFIKQYGDCLGDIAARDLICVQKFNGLTVLPPLLTDEMIAQYTSALLAGTITSGWTFGAGAALQIPFAMQMAYRFNGCGVTQNVLYENQKLIANQFNSAIGKIQDSLSSTASALGKLQDVVNQNAQALNTLVKQLSSNFGAISSVLNDILSRLDKVEAEVQIDRLITGRLQSLQTYVTQQLIRAAEIRASANLAATKMSECVLGQSKRVDFCGKGCHLMSFPQSAPHGVVFLHVTYVPAQEKNFTTAPAICHDGKAHFPREGVFVSNGTHWFVTQRNFYEPQIITTDNTFVSGNCDVVIGIVNNTVYDPLQPELDSFKEELDKYFKNHTSPDVDLGDISGINASVVNIQKEIDRLNEVAKNLNESLIDLQELGKYEQYIKWPWYIWLGFIAGLIAIVMVTIMLCCMTSCCSCLKGCCSCGSCCKFDEDDSEPVLKGVKLHYT

SEQ ID NO: 907 - protein, 1273 aa, Artificial Sequence
  SARS-CoV-2/Finland/FIN03032020A/2020__EPI_ISL_413602 spike protein (1-1273)(I909C_Y1047C)
MFVFLVLLPLVSSQCVNLTTRTQLPPAYTNSFTRGVYYPDKVFRSSVLHSTQDLFLPFFSNVTWFHAIHVSGTNGTKRFDNPVLPFNDGVYFASTEKSNIIRGWIFGTTLDSKTQSLLIVNNATNVVIKVCEFQFCNDPFLGVYYHKNNKSWMESEFRVYSSANNCTFEYVSQPFLMDLEGKQGNFKNLREFVFKNIDGYFKIYSKHTPINLVRDLPQGFSALEPLVDLPIGINITRFQTLLALHRSYLTPGDSSSGWTAGAAAYYVGYLQPRTFLLKYNENGTITDAVDCALDPLSETKCTLKSFTVEKGIYQTSNFRVQPTESIVRFPNITNLCPFGEVFNATRFASVYAWNRKRISNCVADYSVLYNSASFSTFKCYGVSPTKLNDLCFTNVYADSFVIRGDEVRQIAPGQTGKIADYNYKLPDDFTGCVISWNSNNLDSKVGGNYNYLYRLFRKSNLKPFERDISTEIYQAGSTPCNGVEGFNCYFPLQSYGFQPTNGVGYQPYRVVVLSFELLHAPATVCGPKKSTNLVKNKCVNFNFNGLTGTGVLTESNKKFLPFQQFGRDIADTTDAVRDPQTLEILDITPCSFGGVSVITPGTNTSNQVAVLYQGVNCTEVPVAIHADQLTPTWRVYSTGSNVFQTRAGCLIGAEHVNNSYECDIPIGAGICASYQTQTNSPRRARSVASQSIIAYTMSLGAENSVAYSNNSIAIPTNFTISVTTEILPVSMTKTSVDCTMYICGDSTECSNLLLQYGSFCTQLNRALTGIAVEQDKNTQEVFAQVKQIYKTPPIKDFGGFNFSQILPDPSKPSKRSFIEDLLFNKVTLADAGFIKQYGDCLGDIAARDLICAQKFNGLTVLPPLLTDEMIAQYTSALLAGTITSGWTFGAGAALQIPFAMQMAYRFNGCGVTQNVLYENQKLIANQFNSAIGKIQDSLSSTASALGKLQDVVNQNAQALNTLVKQLSSNFGAISSVLNDILSRLDKVEAEVQIDRLITGRLQSLQTYVTQQLIRAAEIRASANLAATKMSECVLGQSKRVDFCGKGCHLMSFPQSAPHGVVFLHVTYVPAQEKNFTTAPAICHDGKAHFPREGVFVSNGTHWFVTQRNFYEPQIITTDNTFVSGNCDVVIGIVNNTVYDPLQPELDSFKEELDKYFKNHTSPDVDLGDISGINASVVNIQKEIDRLNEVAKNLNESLIDLQELGKYEQYIKWPWYIWLGFIAGLIAIVMVTIMLCCMTSCCSCLKGCCSCGSCCKFDEDDSEPVLKGVKLHYT

SEQ ID NO: 908 - protein, 1273 aa, Artificial Sequence
  SARS-CoV-2/France/GE1977/2020__EPI_ISL_414632 spike protein (1-1273)(I909C_Y1047C)
MFVFLVLLPLVSSQCVNLTTRTQLPPAYTNSFTRGVYYPDKVFRSSVLHSTQDLFLPFFSNVTWFHAIHVSGTNGTKRFDNPVLPFNDGVYFASTEKSNIIRGWIFGTTLDSKTQSLLIVNNATNVVIKVCEFQFCNDPFLGVYYHKNNKSWMESEFRVYSSANNCTFEYVSQPFLMDLEGKQGNFKNLREFVFKNIDGYFKIYSKHTPINLVRDLPQGFSALEPLVDLPIGINITRFQTLLALHRSYLTPGDSSSGWTAGAAAYYVGYLQPRTFLLKYNENGTITDAVDCALDPLSETKCTLKSFTVEKGIYQTSNFRVQPTESIVRFPNITNLCPFGEVFNATRFASVYAWNRKRISNCVADYSVLYNSASFSTFKCYGVSPTKLNDLCFTNVYADSFVIRGDEVRQIAPGQTGKIADYNYKLPDDFTGCVIAWNSNNLDSKVGGNYNYLYRLFRKSNLKPFERDISTEIYQAGSTPCNGVEGFNCYFPLQSYGFQPTNGVGYQPYRVVVLSFELLHAPATVCGPKKSTNLVKNKCVNFNFNGLTGTGVLTESNKKFLPFQQFGRDIADTTDAVRDPQTLEILDITPCSFGGVSVITPGTNTSNQVAVLYQGVNCTEVPVAIHADQLTPTWRVYSTGSNVFQTRAGCLIGAEHVNNSYECDIPIGAGICASYQTQTNSPRRARSVASQSIIAYTMSLGAENSVAYSNNSIAIPTNFTISVTTEILPVSMTKTSVDCTMYICGDSTECSNLLLQYGSFCTQLNRALTGIAVEQDKNTQEVFAQVKQIYKTPPIKDFGGFNFSQILPDPSKPSKRSFIEDLLFNKVTLADAGFIKQYGDCLGDIAARDLICAQKFNGLTVLPPLLTDEMIAQYTSALLAGTITSGWTFGAGAALQIPFAMQMAYRFNGCGVTQNVLYENQKLIANQFNSAIGKIQDSLFSTASALGKLQDVVNQNAQALNTLVKQLSSNFGAISSVLNDILSRLDKVEAEVQIDRLITGRLQSLQTYVTQQLIRAAEIRASANLAATKMSECVLGQSKRVDFCGKGCHLMSFPQSAPHGVVFLHVTYVPAQEKNFTTAPAICHDGKAHFPREGVFVSNGTHWFVTQRNFYEPQIITTDNTFVSGNCDVVIGIVNNTVYDPLQPELDSFKEELDKYFKNHTSPDVDLGDISGINASVVNIQKEIDRLNEVAKNLNESLIDLQELGKYEQYIKWPWYIWLGFIAGLIAIVMVTIMLCCMTSCCSCLKGCCSCGSCCKFDEDDSEPVLKGVKLHYT

SEQ ID NO: 909 - protein, 1273 aa, Artificial Sequence
  SARS-CoV-2/Finland/FIN-313/2020__EPI_ISL_414641 spike protein (1-1273)(I909C_Y1047C)
MFVFLVLLPLVSSQCVNLTTRTQLPPAYTNSFTRGVYYPDKVFRSSVLHSTQDLFLPFFSNVTWFHAIHVSGTNGTKRFDNPVLPFNDGVYFASTEKSNIIRGWIFGTTLDSKTQSLLIVNNATNVVIKVCEFQFCNDPFLGVYYHKNNKSWMESEFRVYSSANNCTFEYVSQPFLMDLEGKQGNFKNLREFVFKNIDGYFKIYSKHTPINLVRDLPQGFSALEPLVDLPIGINITRFKTLLALHRSYLTPGDSSSGWTAGAAAYYVGYLQPRTFLLKYNENGTITDAVDCALDPLSETKCTLKSFTVEKGIYQTSNFRVQPTESIVRFPNITNLCPFGEVFNATRFASVYAWNRKRISNCVADYSVLYNSASFSTFKCYGVSPTKLNDLCFTNVYADSFVIRGDEVRQIAPGQTGKIADYNYKLPDDFTGCVIAWNSNNLDSKVGGNYNYLYRLFRKSNLKPFERDISTEIYQAGSTPCNGVEGFNCYFPLQSYGFQPTNGVGYQPYRVVVLSFELLHAPATVCGPKKSTNLVKNKCVNFNFNGLTGTGVLTESNKKFLPFQQFGRDIADTTDAVRDPQTLEILDITPCSFGGVSVITPGTNTSNQVAVLYQGVNCTEVPVAIHADQLTPTWRVYSTGSNVFQTRAGCLIGAEHVNNSYECDIPIGAGICASYQTQTNSPRRARSVASQSIIAYTMSLGAENSVAYSNNSIAIPTNFTISVTTEILPVSMTKTSVDCTMYICGDSTECSNLLLQYGSFCTQLNRALTGIAVEQDKNTQEVFAQVKQIYKTPPIKDFGGFNFSQILPDPSKPSKRSFIEDLLFNKVTLADAGFIKQYGDCLGDIAARDLICAQKFNGLTVLPPLLTDEMIAQYTSALLAGTITSGWTFGAGAALQIPFAMQMAYRFNGCGVTQNVLYENQKLIANQFNSAIGKIQDSLSSTASALGKLQDVVNQNAQALNTLVKQLSSNFGAISSVLNDILSRLDKVEAEVQIDRLITGRLQSLQTYVTQQLIRAAEIRASANLAATKMSECVLGQSKRVDFCGKGCHLMSFPQSAPHGVVFLHVTYVPAQEKNFTTAPAICHDGKAHFPREGVFVSNGTHWFVTQRNFYEPQIITTDNTFVSGNCDVVIGIVNNTVYDPLQPELDSFKEELDKYFKNHTSPDVDLGDISGINASVVNIQKEIDRLNEVAKNLNESLIDLQELGKYEQYIKWPWYIWLGFIAGLIAIVMVTIMLCCMTSCCSCLKGCCSCGSCCKFDEDDSEPVLKGVKLHYT

SEQ ID NO: 910 - protein, 1273 aa, Artificial Sequence
  SARS-CoV-2/Netherlands/ZuidHolland_2/2020__EPI_ISL_414556 spike protein (1-1273)(I909C_Y1047C)
MFVFLVLLPLVSSQCVNLTTRTQLPPAYTNSFTRGVYYPDKVFRSSVLHSTQDLFLPFFSNVTWFHAIHVSGTNGTKRFDNPVLPFNDGVYFASTEKSNIIRGWIFGTTLDSKTQSLLIVNNATNVVIKVCEFQFCNDPFLGVYYHKNNKSWMESEFRVYSSANNCTFEYVSQPFLMDLEGKQGNFKNLREFVFKNIDGYFKIYSKHTPINLVRDLPQGFSALEPLVDLPIGINITRFQTLLALHRSYLTPGDSSSGWTAGAAAYYVGYLQPRTFLLKYNENGTITDAVDCALDPLSETKCTLKSFTVEKGIYQTSNFRVQPTESIVRFPNITNLCPFGEVFNATRFASVYAWNRKRISNCVADYSVLYNSASFSTFKCYGVSPTKLNDLCFTNVYADSFVIRGDEVRQIAPGQTGKIADYNYKLPDDFTGCVIAWNSNNLDSKVGGNYNYLYRLFRKSNLKPFERDISTEIYQAGSTPCNGVEGFNCYFPLQSYGFQPTNGVGYQPYRVVVLSFELLHAPATVCGPKKSTNLVKNKCVNFNFNGLTGTGVLTESNKKFLPFQQFGRDIADTTDAVRDPQTLEILDITPCSFGGVSVITPGTNTSNQVAVLYQGVNCTEVPVAIHADQLTPTWRVYSTGSNVFQTRAGCLIGAEHVNNSYECDIPIGAGICASYQTQTNSPRRARSVASQSIIAYTMSLGAENSVAYSNNSIAIPTNFTISVTTEILPVSMTKTSVDCTMYICGDSTECSNLLLQYGSFCTQLNRALTGIALEQDKNTQEVFAQVKQIYKTPPIKDFGGFNFSQILPDPSKPSKRSFIEDLLFNKVTLADAGFIKQYGDCLGDIAARDLICAQKFNGLTVLPPLLTDEMIAQYTSALLAGTITSGWTFGAGAALQIPFAMQMAYRFNGCGVTQNVLYENQKLIANQFNSAIGKIQDSLSSTASALGKLQDVVNQNAQALNTLVKQLSSNFGAISSVLNDILSRLDKVEAEVQIDRLITGRLQSLQTYVTQQLIRAAEIRASANLAATKMSECVLGQSKRVDFCGKGCHLMSFPQSAPHGVVFLHVTYVPAQEKNFTTAPAICHDGKAHFPREGVFVSNGTHWFVTQRNFYEPQIITTDNTFVSGNCDVVIGIVNNTVYDPLQPELDSFKEELDKYFKNHTSPDVDLGDISGINASVVNIQKEIDRLNEVAKNLNESLIDLQELGKYEQYIKWPWYIWLGFIAGLIAIVMVTIMLCCMTSCCSCLKGCCSCGSCCKFDEDDSEPVLKGVKLHYT

SEQ ID NO: 911 - protein, 1273 aa, Artificial Sequence
  SARS-CoV-2/USA/WA-UW31/2020__EPI_ISL_414618 spike protein (1-1273)(I909C_Y1047C)
MFVFLVLLPLVSSQCVNLTTRTQLPPAYTNSFTRGVYYPDKVFRSSVLHSTQDLFLPFFSNVTWFHAIHVSGTNGTKRFDNPVLPFNDGVYFASTEKSNIIRGWIFGTTLDSKTQSLLIVNNATNVVIKVCEFQFCNDPFLGVYYHKNNKSWMESEFRVYSSANNCTFEYVSQPFLMDLEGKQGNFKNLREFVFKNIDGYFKIYSKHTPINLVRDLPQGFSALEPLVDLPIGINITRFQTLLALHRSYLTPGDSSSGWTAGAAAYYVGYLQPRTFLLKYNENGTITDAVDCALDPLSETKCTLKSFTVEKGIYQTSNFRVQPTESIVRFPNITNLCPFGEVFNATRFASVYAWNRKRISNCVADYSVLYNSASFSTFKCYGVSPTKLNDLCFTNVYADSFVIRGDEVRQIAPGQTGKIADYNYKLPDDFTGCVIAWNSNNLDSKVGGNYNYLYRLFRKSNLKPFERDISTEIYQAGSTPCNGAEGFNCYFPLQSYGFQPTNGVGYQPYRVVVLSFELLHAPATVCGPKKSTNLVKNKCVNFNFNGLTGTGVLTESNKKFLPFQQFGRDIADTTDAVRDPQTLEILDITPCSFGGVSVITPGTNTSNQVAVLYQDVNCTEVPVAIHADQLTPTWRVYSTGSNVFQTRAGCLIGAEHVNNSYECDIPIGAGICASYQTQTNSPRRARSVASQSIIAYTMSLGAENSVAYSNNSIAIPTNFTISVTTEILPVSMTKTSVDCTMYICGDSTECSNLLLQYGSFCTQLNRALTGIAVEQDKNTQEVFAQVKQIYKTPPIKDFGGFNFSQILPDPSKPSKRSFIEDLLFNKVTLADAGFIKQYGDCLGDIAARDLICAQKFNGLTVLPPLLTDEMIAQYTSALLAGTITSGWTFGAGAALQIPFAMQMAYRFNGCGVTQNVLYENQKLIANQFNSAIGKIQDSLSSTASALGKLQDVVNQNAQALNTLVKQLSSNFGAISSVLNDILSRLDKVEAEVQIDRLITGRLQSLQTYVTQQLIRAAEIRASANLAATKMSECVLGQSKRVDFCGKGCHLMSFPQSAPHGVVFLHVTYVPAQEKNFTTAPAICHDGKAHFPREGVFVSNGTHWFVTQRNFYEPQIITTDNTFVSGNCDVVIGIVNNTVYDPLQPELDSFKEELDKYFKNHTSPDVDLGDISGINASVVNIQKEIDRLNEVAKNLNESLIDLQELGKYEQYIKWPWYIWLGFIAGLIAIVMVTIMLCCMTSCCSCLKGCCSCGSCCKFDEDDSEPVLKGVKLHYT

SEQ ID NO: 912 - protein, 1273 aa, Artificial Sequence
  SARS-CoV-2/South Korea/SNU01/2020__EPI_ISL_411929 spike protein (1-1273)(I909C_Y1047C)
MFVFLVLLPLVSSQCVNLTTRTQLPPAYTNSFTRGVYYPDKVFRSSVLHSTQDLFLPFFSNVTWFHAIHVSGTNGTKRFDNPVLPFNDGVYFASTEKSNIIRGWIFGTTLDSKTQSLLIVNNATNVVIKVCEFQFCNDPFLGVYYHKNNKSWMESEFRVYSSANNCTFEYVSQPFLMDLEGKQGNFKNLREFVFKNIDGYFKIYSKHTPINLVRDLPQGFWALEPLVDLPIGINITRFQTLLALHRSYLTPGDSSSGWTAGAAAYYVGYLQPRTFLLKYNENGTITDAVDCALDPLSETKCTLKSFTVEKGIYQTSNFRVQPTESIVRFPNITNLCPFGEVFNATRFASVYAWNRKRISNCVADYSVLYNSASFSTFKCYGVSPTKLNDLCFTNVYADSFVIRGDEVRQIAPGQTGKIADYNYKLPDDFTGCVIAWNSNNLDSKVGGNYNYLYRLFRKSNLKPFERDISTEIYQAGSTPCNGVEGFNCYFPLQSYGFQPTNGVGYQPYRVVVLSFELLHAPATVCGPKKSTNLVKNKCVNFNFNGLTGTGVLTESNKKFLPFQQFGRDIADTTDAVRDPQTLEILDITPCSFGGVSVITPGTNTSNQVAVLYQDVNCTEVPVAIHADQLTPTWRVYSTGSNVFQTRAGCLIGAEHVNNSYECDIPIGAGICASYQTQTNSPRRARSVASQSIIAYTMSLGAENSVAYSNNSIAIPTNFTISVTTEILPVSMTKTSVDCTMYICGDSTECSNLLLQYGSFCTQLNRALTGIAVEQDKNTQEVFAQVKQIYKTPPIKDFGGFNFSQILPDPSKPSKRSFIEDLLFNKVTLADAGFIKQYGDCLGDIAARDLICAQKFNGLTVLPPLLTDEMIAQYTSALLAGTITSGWTFGAGAALQIPFAMQMAYRFNGCGVTQNVLYENQKLIANQFNSAIGKIQDSLSSTASALGKLQDVVNQNAQALNTLVKQLSSNFGAISSVLNDILSRLDKVEAEVQIDRLITGRLQSLQTYVTQQLIRAAEIRASANLAATKMSECVLGQSKRVDFCGKGCHLMSFPQSAPHGVVFLHVTYVPAQEKNFTTAPAICHDGKAHFPREGVFVSNGTHWFVTQRNFYEPQIITTDNTFVSGNCDVVIGIVNNTVYDPLQPELDSFKEELDKYFKNHTSPDVDLGDISGINASVVNIQKEIDRLNEVAKNLNESLIDLQELGKYEQYIKWPWYIWLGFIAGLIAIVMVTIMLCCMTSCCSCLKGCCSCGSCCKFDEDDSEPVLKGVKLHYT

SEQ ID NO: 913 - protein, 1273 aa, Artificial Sequence
  SARS-CoV-2/China/WF0004/2020__EPI_ISL_413694 spike protein (1-1273)(I909C_Y1047C)
MFVFLVLLPLVSSQCVNLTTRTQLPPAYTNSFTRGVYYPDKVFRSSVLHSTQDLFLPFFSNVTWFHAIHVSGTNGTKRFDNPVLPFNDGVYFASTEKSNIIRGWIFGTTLDSKTQSLLIVNNATNVVIKVCEFQFCNDPFLGVYYHKNNKSWTESEFRVYSSANNCTFEYVSQPFLMDLEGKQGNFKNLREFVFKNIDGYFKIYSKHTPINLVRDLPQGFSALEPLVDLPIGINITRFQTLLALHRSYLTPGDSSSGWTAGAAAYYVGYLQPRTFLLKYNENGTITDAVDCALDPLSETKCTLKSFTVEKGIYQTSNFRVQPTESIVRFPNITNLCPFGEVFNATRFASVYAWNRKRISNCVADYSVLYNSASFSTFKCYGVSPTKLNDLCFTNVYADSFVIRGDEVRQIAPGQTGKIADYNYKLPDDFTGCVIAWNSNNLDSKVGGNYNYLYRLFRKSNLKPFERDISTEIYQAGSTPCNGVEGFNCYFPLQSYGFQPTNGVGYQPYRVVVLSFELLHAPATVCGPKKSTNLVKNKCVNFNFNGLTGTGVLTESNKKFLPFQQFGRDIADTTDAVRDPQTLEILDITPCSFGGVSVITPGTNTSNQVAVLYQDVNCTEVPVAIHADQLTPTWRVYSTGSNVFQTRAGCLIGAEHVNNSYECDIPIGAGICASYQTQTNSPRRARSVASQSIIAYTMSLGAENSVAYSNNSIAIPTNFTISVTTEILPVSMTKTSVDCTMYICGDSTECSNLLLQYGSFCTQLNRALTGIAVEQDKNTQEVFAQVKQIYKTPPIKDFGGFNFSQILPDPSKPSKRSFIEDLLFNKVTLADAGFIKQYGDCLGDIAARDLICAQKFNGLTVLPPLLTDEMIAQYTSALLAGTITSGWTFGAGAALQIPFAMQMAYRFNGCGVTQNVLYENQKLIANQFNSAIGKIQDSLSSTASALGKLQDVVNQNAQALNTLVKQLSSNFGAISSVLNDILSRLDKVEAEVQIDRLITGRLQSLQTYVTQQLIRAAEIRASANLAATKMSECVLGQSKRFDFCGKGCHLMSFPQSAPHGVVFLHVTYVPAQEKNFTTAPAICHDGKAHFPREGVFVSNGTHWFVTQRNFYEPQIITTDNTFVSGNCDVVIGIVNNTVYDPLQPELDSFKEELDKYFKNHTSPDVDLGDISGINASVVNIQKEIDRLNEVAKNLNESLIDLQELGKYEQYIKWPWYIWLGFIAGLIAIVMVTIMLCCMTSCCSCLKGCCSCGSCCKFDEDDSEPVLKGVKLHYT

SEQ ID NO: 914 - protein, 1273 aa, Artificial Sequence
  SARS-CoV-2/China/WF0028/2020__EPI_ISL_413791 spike protein (1-1273)(I909C_Y1047C)
MFVFLVLLPLVSSQCVNLTTRTQLPPAYTNSFTRGVYYPDKVFRSSVLHSTQDLFLPFFSNVTWFHAIHVSGTNGTKRFDNPVLPFNDGVYFASTEKSNIIRGWIFGTTLDSKTQSLLIVNNATNVVIKVCEFQFCNDPFLGVYYHKNNKSWMESEFRVYSSANNCTFEYVSQPFLMDLEGKQGNFKNLREFVFKNIDGYFKIYSKHTPINLVRDLPQGFSALEPLVDLPIGINITRFQTLLALHRSYLTPGDSSSGWTAGAAAYYVGYLQPRTFLLKYNENGTITDAVDCALDPLSETKCTLKSFTVEKGIYQTSNFRVQPTESIVRFPNITNLCPFGEVFNATRFASVYAWNRKRISNCVADYSVLYNSASFSTFKCYGVSPTKLNDLCFTNVYADSFVIRGDEVRQIAPGQTGKIADYNYKLPDDFTGCVIAWNSNNLDSKVGGNYNYLYRLFRKSNLKPFERDISTEIYQAGSTPCNGVEGFNCYFPLQSYGFQPTNGVGYQPYRVVVLSFELLHAPATVCGPKKSTNLVKNKCVNFNFNGLTGTGVLTESNKKFLPFQQFGRDIADTTDAVRDPQTLEILDITPCSFGGVSVITPGTNTSNQVAVLYQDVNCTEVPVAIHADQLTPTWRVYSTGSNVFQTRAGCLIGAEHVNNSYECDIPIGAGICASYQTQTNSPRRARSVASQSIIAYTMSLGAENSVAYSNNSIAIPTNFTISVTTEILPVSMTKTSVDCTMYICGDSTECSNLLLQYGSFCTQLNRALTGIAVEQDKNTQEVFAQVKQIYKTPPIKDFGGFNFSQILPDPSKPSKRSFIEDLLFNKVTLADAGFIKQYGDCLGDIAARDLICAQKFNGLTVLPPLLTDEMIAQYTSALLAGTITSGWTFGAGAALQIPFAMQMAYRFNGCGVTQNVLYENQKLIANQFNSAIGKIQDSLSSTASALGKLQDVVNQNAQALNTLVKQLSSNFGAISSVLNDILSRLDKVEAEVQIDRLITGRLQSLQTYVTQQLIRAAEIRASANLAATKMSECVLGQSKRVDFCGKGCHLMSFPQSAPHGVVFLHVTYVPAQEKNFTTAPAICHDGKAHFPREGVFVSNGTHWFVTQRNFYEPQIITTDNTFVSGNCDVVIGIVNNTVYDPLQPELESFKEELDKYFKNHTSPDVDLGDISGINASVVNIQKEIDRLNEVAKNLNESLIDLQELGKYEQYIKWPWYIWLGFIAGLIAIVMVTIMLCCMTSCCSCLKGCCSCGSCCKFDEDDSEPVLKGVKLHYT

SEQ ID NO: 915 - protein, 1273 aa, Artificial Sequence
  SARS-CoV-2/2019-nCoV/USA-CruiseA-18/2020__MT159716.1 spike protein (1-1273)(I909C_Y1047C)
MFVFLVLLPLVSSQCVNLTTRTQLPPAYTNSFTRGVYYPDKVFRSSVLHSTQDLFLPFFSNVTWFHAIHVSGTNGTKRFDNPVLPFNDGVYFASTEKSNIIRGWIFGTTLDSKTQSLLIVNNATNVVIKVCEFQFCNDPFLGVYYHKNNKSWMESELRVYSSANNCTFEYVSQPFLMDLEGKQGNFKNLREFVFKNIDGYFKIYSKHTPINLVRDLPQGFSALEPLVDLPIGINITRFQTLLALHRSYLTPGDSSSGWTAGAAAYYVGYLQPRTFLLKYNENGTITDAVDCALDPLSETKCTLKSFTVEKGIYQTSNFRVQPTESIVRFPNITNLCPFGEVFNATRFASVYAWNRKRISNCVADYSVLYNSASFSTFKCYGVSPTKLNDLCFTNVYADSFVIRGDEVRQIAPGQTGKIADYNYKLPDDFTGCVIAWNSNNLDSKVGGNYNYLYRLFRKSNLKPFERDISTEIYQAGSTPCNGVEGFNCYFPLQSYGFQPTNGVGYQPYRVVVLSFELLHAPATVCGPKKSTNLVKNKCVNFNFNGLTGTGVLTESNKKFLPFQQFGRDIADTTDAVRDPQTLEILDITPCSFGGVSVITPGTNTSNQVAVLYQDVNCTEVPVAIHADQLTPTWRVYSTGSNVFQTRAGCLIGAEHVNNSYECDIPIGAGICASYQTQTNSPRRARSVASQSIIAYTMSLGAENSVAYSNNSIAIPTNFTISVTTEILPVSMTKTSVDCTMYICGDSTECSNLLLQYGSFCTQLNRALTGIAVEQDKNTQEVFAQVKQIYKTPPIKDFGGFNFSQILPDPSKPSKRSFIEDLLFNKVTLADAGFIKQYGDCLGDIAARDLICAQKFNGLTVLPPLLTDEMIAQYTSALLAGTITSGWTFGAGAALQIPFAMQMAYRFNGCGVTQNVLYENQKLIANQFNSAIGKIQDSLSSTASALGKLQDVVNQNAQALNTLVKQLSSNFGAISSVLNDILSRLDKVEAEVQIDRLITGRLQSLQTYVTQQLIRAAEIRASANLAATKMSECVLGQSKRVDFCGKGCHLMSFPQSAPHGVVFLHVTYVPAQEKNFTTAPAICHDGKAHFPREGVFVSNGTHWFVTQRNFYEPQIITTDNTFVSGNCDVVIGIVNNTVYDPLQPELDSFKEELDKYFKNHTSPDVDLGDISGINASVVNIQKEIDRLNEVAKNLNESLIDLQELGKYEQYIKWPWYIWLGFIAGLIAIVMVTIMLCCMTSCCSCLKGCCSCGSCCKFDEDDSEPVLKGVKLHYT

SEQ ID NO: 916 - protein, 1273 aa, Artificial Sequence
  SARS-CoV-2/SARS-CoV-2/Yunnan-01/human/2020/CHN__MT049951.1 spike protein (1-1273)(I909C_Y1047C)
MFVFLVLLPLVSSQCVNLTTRTQLPPANTNSFTRGVYYPDKVFRSSVLHSTQDLFLPFFSNVTWFHAIHVSGTNGTKRFDNPVLPFNDGVYFASTEKSNIIRGWIFGTTLDSKTQSLLIVNNATNVVIKVCEFQFCNDPFLGVYYHKNNKSWMESEFRVYSSANNCTFEYVSQPFLMDLEGKQGNFKNLREFVFKNIDGYFKIYSKHTPINLVRDLPQGFSALEPLVDLPIGINITRFQTLLALHRSYLTPGDSSSGWTAGAAAYYVGYLQPRTFLLKYNENGTITDAVDCALDPLSETKCTLKSFTVEKGIYQTSNFRVQPTESIVRFPNITNLCPFGEVFNATRFASVYAWNRKRISNCVADYSVLYNSASFSTFKCYGVSPTKLNDLCFTNVYADSFVIRGDEVRQIAPGQTGKIADYNYKLPDDFTGCVIAWNSNNLDSKVGGNYNYLYRLFRKSNLKPFERDISTEIYQAGSTPCNGVEGFNCYFPLQSYGFQPTNGVGYQPYRVVVLSFELLHAPATVCGPKKSTNLVKNKCVNFNFNGLTGTGVLTESNKKFLPFQQFGRDIADTTDAVRDPQTLEILDITPCSFGGVSVITPGTNTSNQVAVLYQDVNCTEVPVAIHADQLTPTWRVYSTGSNVFQTRAGCLIGAEHVNNSYECDIPIGAGICASYQTQTNSPRRARSVASQSIIAYTMSLGAENSVAYSNNSIAIPTNFTISVTTEILPVSMTKTSVDCTMYICGDSTECSNLLLQYGSFCTQLNRALTGIAVEQDKNTQEVFAQVKQIYKTPPIKDFGGFNFSQILPDPSKPSKRSFIEDLLFNKVTLADAGFIKQYGDCLGDIAARDLICAQKFNGLTVLPPLLTDEMIAQYTSALLAGTITSGWTFGAGAALQIPFAMQMAYRFNGCGVTQNVLYENQKLIANQFNSAIGKIQDSLSSTASALGKLQDVVNQNAQALNTLVKQLSSNFGAISSVLNDILSRLDKVEAEVQIDRLITGRLQSLQTYVTQQLIRAAEIRASANLAATKMSECVLGQSKRVDFCGKGCHLMSFPQSAPHGVVFLHVTYVPAQEKNFTTAPAICHDGKAHFPREGVFVSNGTHWFVTQRNFYEPQIITTDNTFVSGNCDVVIGIVNNTVYDPLQPELDSFKEELDKYFKNHTSPDVDLGDISGINASVVNIQKEIDRLNEVAKNLNESLIDLQELGKYEQYIKWPWYIWLGFIAGLIAIVMVTIMLCCMTSCCSCLKGCCSCGSCCKFDEDDSEPVLKGVKLHYT

SEQ ID NO: 917 - protein, 1273 aa, Artificial Sequence
  SARS-CoV-2/USA/WA-UW292/2020__EPI_ISL_418077 spike protein (1-1273)(I909C_Y1047C)
MFVFLVLLPLVSSQCVNLTTRTQLPPAYTNSFTRGVYYPDKVFRSSVLHSTQDLFLPFFSNVTWFHAIHVSGTNGTKRFDNPVLPFNDGVYFASTEKSNIIRGWIFGTTLDSKTQSLLIVNNATNVVIKVCEFQFCNDPFLGVYYHKNNKSWMESEFRVYSSANNCTFEYVSQPFLMDLEGKQGNFKNLREFVFKNIDGYFKIYSKHTPINLVRDLPQGFSALEPLVDLPIGINITRFQTLLALHRSYLTPGDSSSGWTAGAAAYYVGYLQPRTFLLKYNENGTITDAVDCALDPLSETKCTLKSFTVEKGIYQTSNFRVQPTESIVRFPNITNLCPFGEVFNATRFASVYAWNRKRISNCVADYSVLYNSASFSTFKCYGVSPTKLNDLCFTNVYADSFVIRGDEVRQIAPGQTGKIADYNYKLPDDFTGCVIAWNSNNLDSKVGGNYNYLYRLFRKSNLKPFERDISTEIYQASSTPCNGVEGFNCYFPLQSYGFQPTNGVGYQPYRVVVLSFELLHAPATVCGPKKSTNLVKNKCVNFNFNGLTGTGVLTESNKKFLPFQQFGRDIADTTDAVRDPQTLEILDITPCSFGGVSVITPGTNTSNQVAVLYQDVNCTEVPVAIHADQLTPTWRVYSTGSNVFQTRAGCLIGAEHVNNSYECDIPIGAGICASYQTQTNSPRRARSVASQSIIAYTMSLGAENSVAYSNNSIAIPTNFTISVTTEILPVSMTKTSVDCTMYICGDSTECSNLLLQYGSFCTQLNRALTGIAVEQDKNTQEVFAQVKQIYKTPPIKDFGGFNFSQILPDPSKPSKRSFIEDLLFNKVTLADAGFIKQYGDCLGDIAARDLICAQKFNGLTVLPPLLTDEMIAQYTSALLAGTITSGWTFGAGAALQIPFAMQMAYRFNGCGVTQNVLYENQKLIANQFNSAIGKIQDSLSSTASALGKLQDVVNQNAQALNTLVKQLSSNFGAISSVLNDILSRLDKVEAEVQIDRLITGRLQSLQTYVTQQLIRAAEIRASANLAATKMSECVLGQSKRVDFCGKGCHLMSFPQSAPHGVVFLHVTYVPAQEKNFTTAPAICHDGKAHFPREGVFVSNGTHWFVTQRNFYEPQIITTDNTFVSGNCDVVIGIVNNTVYDPLQPELDSFKEELDKYFKNHTSPDVDLGDISGINASVVNIQKEIDRLNEVAKNLNESLIDLQELGKYEQYIKWPWYIWLGFIAGLIAIVMVTIMLCCMTSCCSCLKGCCSCGSCCKFDEDDSEPVLKGVKLHYT

SEQ ID NO: 918 - protein, 1273 aa, Artificial Sequence
  SARS-CoV-2/Iceland/192/2020__EPI_ISL_417819 spike protein (1-1273)(I909C_Y1047C)
MFVFFVLLPLVSSQCVNLTTRTQLPPAYTNSFTRGVYYPDKVFRSSVLHSTQDLFLPFFSNVTWFHAIHVSGTNGTKRFDNPVLPFNDGVYFASTEKSNIIRGWIFGTTLDSKTQSLLIVNNATNVVIKVCEFQFCNDPFLGVYYHKNNKSWMESEFRVYSSANNCTFEYVSQPFLMDLEGKQGNFKNLREFVFKNIDGYFKIYSKHTPINLVRDLPQGFSALEPLVDLPIGINITRFQTLLALHRSYLTPGDSSSGWTAGAAAYYVGYLQPRTFLLKYNENGTITDAVDCALDPLSETKCTLKSFTVEKGIYQTSNFRVQPTESIVRFPNITNLCPFGEVFNATRFASVYAWNRKRISNCVADYSVLYNSASFSTFKCYGVSPTKLNDLCFTNVYADSFVIRGDEVRQIAPGQTGKIADYNYKLPDDFTGCVIAWNSNNLDSKVGGNYNYLYRLFRKSNLKPFERDISTEIYQAGSTPCNGVEGFNCYFPLQSYGFQPTNGVGYQPYRVVVLSFELLHAPATVCGPKKSTNLVKNKCVNFNFNGLTGTGVLTESNKKFLPFQQFGRDIADTTDAVRDPQTLEILDITPCSFGGVSVITPGTNTSNQVAVLYQGVNCTEVPVAIHADQLTPTWRVYSTGSNVFQTRAGCLIGAEHVNNSYECDIPIGAGICASYQTQTNSPRRARSVASQSIIAYTMSLGAENSVAYSNNSIAIPTNFTISVTTEILPVSMTKTSVDCTMYICGDSTECSNLLLQYGSFCTQLNRALTGIAVEQDKNTQEVFAQVKQIYKTPPIKDFGGFNFSQILPDPSKPSKRSFIEDLLFNKVTLADAGFIKQYGDCLGDIAARDLICAQKFNGLTVLPPLLTDEMIAQYTSALLAGTITSGWTFGAGAALQIPFAMQMAYRFNGCGVTQNVLYENQKLIANQFNSAIGKIQDSLSSTASALGKLQDVVNQNAQALNTLVKQLSSNFGAISSVLNDILSRLDKVEAEVQIDRLITGRLQSLQTYVTQQLIRAAEIRASANLAATKMSECVLGQSKRVDFCGKGCHLMSFPQSAPHGVVFLHVTYVPAQEKNFTTAPAICHDGKAHFPREGVFVSNGTHWFVTQRNFYEPQIITTDNTFVSGNCDVVIGIVNNTVYDPLQPELDSFKEELDKYFKNHTSPDVDLGDISGINASVVNIQKEIDRLNEVAKNLNESLIDLQELGKYEQYIKWPWYIWLGFIAGLIAIVMVTIMLCCMTSCCSCLKGCCSCGSCCKFDEDDSEPVLKGVKLHYT

SEQ ID NO: 919 - protein, 1273 aa, Artificial Sequence
  SARS-CoV-2/Belgium/ULG-6939/2020__EPI_ISL_417020 spike protein (1-1273)(I909C_Y1047C)
MFVFLVLLPLVSSQCVNLTTRTQLPPAYTNSFTRGVYYPDKVFRSSVLHSTQDLFLPFFSNVTWFHAIHVSGTNGTKRFDNPVLPFNDGVYFASTEKSNIIRGWIFGTTLDSKTQSLLIVNNATNVVIKVCEFQFCNDPFLGVYYHKNNKSWMESEFRVYSSANNCTFEYVSQPFLMDLEGKQGNFKNLREFVFKNIDGYFKIYSKHTPINLVRDLPQGFSALEPLVDLPIGINITRFQTLLALHRSYLTPGDSSSGWTAGAAAYYVGYLQPRTFLLKYNENGTITDAVDCALDPLSETKCTLKSFTVEKGIYQTSNFRVQPTESIVRFPNITNLCPFGEVFNATRFASVYAWNRKRISNCVADYSVLYNSASFSTFKCYGVSPTKLNDLCFTNVYADSFVIRGDEVRQIAPGQTGKIADYNYKLPDDFTGCVIAWNSNNLDSKVGGNYNYLYRLFRKSNLKPFERDISTEIYQAGSTPCNGVEGFNCYFPLQSYGFQPTNGVGYQPYRVVVLSFELLHAPATVCGPKKSTNLVKNKCVNFNFNGLTGTGVLTESNKKFLPFQQFGRDIADTTDAVRDPQTLEILDITPCSFGGVSVITPGTNTSNQVAVLYQGVNCTEVPVAIHADQLTPTWRVYSTGSNVFQTRAGCLIGAEHVNNSYECDIPIGAGICASYQTQTNSPRRARSVASQSIIAYTMSLGAENSVVYSNNSIAIPTNFTISVTTEILPVSMTKTSVDCTMYICGDSTECSNLLLQYGSFCTQLNRALTGIAVEQDKNTQEVFAQVKQIYKTPPIKDFGGFNFSQILPDPSKPSKRSFIEDLLFNKVTLADAGFIKQYGDCLGDIAARDLICAQKFNGLTVLPPLLTDEMIAQYTSALLAGTITSGWTFGAGAALQIPFAMQMAYRFNGCGVTQNVLYENQKLIANQFNSAIGKIQDSLSSTASALGKLQDVVNQNAQALNTLVKQLSSNFGAISSVLNDILSRLDKVEAEVQIDRLITGRLQSLQTYVTQQLIRAAEIRASANLAATKMSECVLGQSKRVDFCGKGCHLMSFPQSAPHGVVFLHVTYVPAQEKNFTTAPAICHDGKAHFPREGVFVSNGTHWFVTQRNFYEPQIITTDNTFVSGNCDVVIGIVNNTVYDPLQPELDSFKEELDKYFKNHTSPDVDLGDISGINASVVNIQKEIDRLNEVAKNLNESLIDLQELGKYEQYIKWPWYIWLGFIAGLIAIVMVTIMLCCMTSCCSCLKGCCSCGSCCKFDEDDSEPVLKGVKLHYT

SEQ ID NO: 920 - protein, 1273 aa, Artificial Sequence
  SARS-CoV-2/France/HF2496/2020__EPI_ISL_418231 spike protein (1-1273)(I909C_Y1047C)
MFVFLVLLPLVSSQCVNLTTRTQLPPAYTNSFTRGVYYPDKVFRSSVLHSTQDLFLPFFSNVTWFHAIHVSGTNGTKRFDNPVLPFNDGVYFASTEKSNIIRGWIFGTTLDSKTQSLLIVNNATNVVIKVCEFQFCNDPFLGVYYHKNNKSWMESEFRVYSSANNCTFEYVSQPFLMDLEGKQGNFKNLREFVFKNIDGYFKIYSKHTPINLVRDLPQGFSALEPLVDLPIGINITRFQTLLALHRSYLTPGDSSSGWTAGAAAYYVGYLQPRTFLLKYNENGTITDAVDCALDPLSETKCTLKSFTVEKGIYQTSNFRVQPTESIVRFPNITNLCPFGEVFNATRFASVYAWNRKRISNCVADYSVLYNSASFSTFKCYGVSPTKLNDLCFTNVYADSFVIRGDEVRQIAPGQTGKIADYNYKLPDDFTGCVIAWNSNNLDSKVGGNYNYLYRLFRKSNLKPFERDISTEIYQAGSTPCNGVEGFNCYFPLQSYGFQPTNGVGYQPYRVVVLSFELLHAPATVCGPKKSTNLVKNKCVNFNFNGLTGTGVLTESNKKFLPFQQFGRDIADTTDAVRDPQTLEILDITPCSFGGVSVITPGTNTSNQVAVLYQGVNCTEVPVAIHADQLTPTWRVYSTGSNVFQTRAGCLIGAEHVNNSYECDIPIGAGICASYQTQTNSPRRARSVASQSIIAYTMSLGAENSVAYSNNSIAIPTNFTISVTTEILPVSMTKTSVDCTMYICGDSTECSNLLLQYGSFCTQLNRALTGIAVEQDKNTQEVFAQVKQIYKTPPIKDFGGFNFSQILPDPSKPSKRSFIEDLLFNKVTLADAGFIKQYGDCLGDIVARDLICAQKFNGLTVLPPLLTDEMIAQYTSALLAGTITSGWTFGAGAALQIPFAMQMAYRFNGCGVTQNVLYENQKLIANQFNSAIGKIQDSLSSTASALGKLQDVVNQNAQALNTLVKQLSSNFGAISSVLNDILSRLDKVEAEVQIDRLITGRLQSLQTYVTQQLIRAAEIRASANLAATKMSECVLGQSKRVDFCGKGCHLMSFPQSAPHGVVFLHVTYVPAQEKNFTTAPAICHDGKAHFPREGVFVSNGTHWFVTQRNFYEPQIITTDNTFVSGNCDVVIGIVNNTVYDPLQPELDSFKEELDKYFKNHTSPDVDLGDISGINASVVNIQKEIDRLNEVAKNLNESLIDLQELGKYEQYIKWPWYIWLGFIAGLIAIVMVTIMLCCMTSCCSCLKGCCSCGSCCKFDEDDSEPVLKGVKLHYT

SEQ ID NO: 921 - protein, 1273 aa, Artificial Sequence
  SARS-CoV-2/USA/WA-UW291/2020__EPI_ISL_418076 spike protein (1-1273)(I909C_Y1047C)
MFVFLVLLPLVSSQCVNLTTRTQLPPAYTNSFTRGVYYPDKVFRSSVLHSTQDLFLPFFSNVTWFHAIHVSGTNGTKRFDNPVLPFNDGVYFASTEKSNIIRGWIFGTTLDSKTQSLLIVNNATNVVIKVCEFQFCNDPFLGVYYHKNNKSWMESEFRVYSSANNCTFEYVSQPFLMDLEGKQGNFKNLREFVFKNIDGYFKIYSKHTPINLVRDLPQGFSALEPLVDLPIGINITRFQTLLALHRSYLTPGDSSSGWTAGAAAYYVGYLQPRTFLLKYNENGTITDAVDCALDPLSETKCTLKSFTVEKGIYQTSNFRVQPTESIVRFPNITNLCPFGEVFNATRFASVYAWNRKRISNCVADYSVLYNSASFSTFKCYGVSPTKLNDLCFTNVYADSFVIRGDEVRQIAPGQTGKIADYNYKLPDDFTGCVIAWNSNNLDSKVGGNYNYLYRLFRKSNLKPFERDISTEIYQAGSTPCNGVEGFNCYFPLQSYGFQPTNGVGYQPYRVVVLSFELLHAPATVCGPKKSTNLVKNKCVNFNFNGLTGTGVLTESNKKFLPFQQFGRDIADTTDAVRDPQTLEILDITPCSFGGVSVITPGTNTSNQVAVLYQGVNCTEVPVAIHADQLTPTWRVYSTGSNVFQTRAGCLIGAEHVNNSYECDIPIGAGICASYQTQTNSPRRARSVASQSIIAYTMSLGAENSVAYSNNSIAIPTNFTISVTTEILPVSMTKTSVDCTMYICGDSTECSNLLLQYGSFCTQLNRALTGIAVEQDKNTQEVFAQVKQIYKTPPIKDFGGFNFSQILPDPSKPSKRSFIEDLLFNKVTLADAGFIKQYGDCLGDIAARDLICAQKFNGLTVLPPLLTDEMIAQYTSALLAGTITSGWTFGAGAALQIPFAMQMAYRFNGCGVTQNVLYENQKLIANQFNSAIGKIQYSLSSTASALGKLQDVVNQNAQALNTLVKQLSSNFGAISSVLNDILSRLDKVEAEVQIDRLITGRLQSLQTYVTQQLIRAAEIRASANLAATKMSECVLGQSKRVDFCGKGCHLMSFPQSAPHGVVFLHVTYVPAQEKNFTTAPAICHDGKAHFPREGVFVSNGTHWFVTQRNFYEPQIITTDNTFVSGNCDVVIGIVNNTVYDPLQPELDSFKEELDKYFKNHTSPDVDLGDISGINASVVNIQKEIDRLNEVAKNLNESLIDLQELGKYEQYIKWPWYIWLGFIAGLIAIVMVTIMLCCMTSCCSCLKGCCSCGSCCKFDEDDSEPVLKGVKLHYT

SEQ ID NO: 922 - protein, 1273 aa, Artificial Sequence
  SARS-CoV-2/Portugal/PT0034/2020__EPI_ISL_418019 spike protein (1-1273)(I909C_Y1047C)
MFVFLVLLPLVSSQCVNLTTRTQLPPAYTNSFTRGVYYPDKVFRSSVLHSTQDLFLPFFSNVTWFHAIHVSGTNGTKRFDNPVLPFNDGVYFASTEKSNIIRGWIFGTTLDSKTQSLLIVNNATNVVIKVCEFQFCNDPFLGVYYHKNNKSWMESEFRVYSSANNCTFEYVSQPFLMDLEGKQGNFKNLREFVFKNIDGYFKIYSKHTPINLVRDLPQGFSALEPLVDLPIGINITRFQTLLALHRSYLTPGDSSSGWTAGAAAYYVGYLQPRTFLLKYNENGTITDAVDCALDPLSETKCTLKSFTVEKGIYQTSNFRVQPTESIVRFPNITNLCPFGEVFNATRFASVYAWNRKRISNCVADYSVLYNSASFSTFKCYGVSPTKLNDLCFTNVYADSFVIRGDEVRQIAPGQTGKIADYNYKLPDDFTGCVIAWNSNNLDSKVGGNYNYLYRLFRKSNLKPFERDISTEIYQAGSTPCNGVEGFNCYFPLQSYGFQPTNGVGYQPYRVVVLSFELLHAPATVCGPKKSTNLVKNKCVNFNFNGLTGTGVLTESNKKFLPFQQFGRDIADTTDAVRDPQTLEILDITPCSFGGVSVITPGTNTSNQVAVLYQGVNCTEVPVAIHADQLTPTWRVYSTGSNVFQTRAGCLIGAEHVNNSYECDIPIGAGICASYQTQTNSPRRARSVASQSIIAYTMSLGAENSVAYSNNSIAIPTNFTISVTTEILPVSMTKTSVDCTMYICGDSTECSNLLLQYGSFCTQLNRALTGIAVEQDKNTQEVFAQVKQIYKTPPIKDFGGFNFSQILPDPSKPSKRSFIEDLLFNKVTLADAGFIKQYGDCLGDIAARDLICAQKFNGLTVLPPLLTDEMIAQYTSALLAGTITSGWTFGAGAALQIPFAMQMAYRFNGCGVTQNVLYENQKLIANQFNSAIGKIQDSLSSTASALGKLQDVVNQNAQALNTLVKQLSSNFGAISSVLNDILSRLDKVEAEVQIDRLITGRLQSLQTYVTQQLIRAAEIRASANLAATKMSECVLGQSKRVDFCGKGCHLMSFPQSAPHGVVFLHVTYVPAQEKNFTTAPAICHDGKAHFPREGVFVSNGTHWFVTQRNFYEPQIITTDNTFVSGNCDVVIGIVNNTVYDPLQPELDSFKEELDKYFKNHTSPDVDLGDISGINASVVNIQKEIDRLNEVAKNLNESLIDLQELGKYEQYIKWPWYIWLGFIAGLIAIVMVTIMLCCITSCCSCLKGCCSCGSCCKFDEDDSEPVLKGVKLHYT

SEQ ID NO: 923 - protein, 1273 aa, Artificial Sequence
  SARS-CoV-2/Iceland/202/2020__EPI_ISL_417750 spike protein (1-1273)(I909C_Y1047C)
MFVFLVLLPLVSSQCVNLTTRTQLPPAYTNSFTRGVYYPDKVFRSSVLHSTQDLFLPFFSNVTWFHAIHVSGTNGTKRFDNPVLPFNDGVYFASTEKSNIIRGWIFGTTLDSKTQSLLIVNNATNVVIKVCEFQFCNDPFLGVYYHKNNKSWMESEFRVYSSANNCTFEYVSQPFLMDLEGKQGNFKNLREFVFKNIDGYFKIYSKHTPINLVRDLPQGFSALEPLVDLPIGINITRFQTLLALHRSYLTPGDSSSGWTAGAAAYYVGYLQPRTFLLKYNENGTITDAVDCALDPLSETKCTLKSFTVEKGIYQTSNFRVQPTESIVRFPNITNLCPFGEVFNATRFASVYAWNRKRISNCVADYSVLYNSASFSTFKCYGVSPTKLNDLCFTNVYADSFVIRGDEVRQIAPGQTGKIADYNYKLPDDFTGCVIAWNSNNLDSKVGGNYNYLYRLFRKSNLKPFERDISTEIYQAGSTPCNGVEGFNCYFPLQSYGFQPTNGVGYQPYRVVVLSFELLHAPATVCGPKKSTNLVKNKCVNFNFNGLTGTGVLTESNKKFLPFQQFGRDIADTTDAVRDPQTLEILDITPCSFGGVSVITPGTNTSNQVAVLYQDVNCTEVPVAIHADQLTPTWRVYSTGSNVFQTRAGCLIGAEHVNNSYECDIPIGAGICASYQTQTNSPRRARSVASQSIIAYTMSLGAENSVAYSNNSIAIPTNFTISVTTEILPVSMTKTSVDCTMYICGDSTECSNLLLQYGSFCTQLNRALTGIAVEQDKNTQEVFAQVKQIYKTPPIKDFGGFNFSQILPDPSKPSKRSFIEDLLFNKVTLADAGFIKQYGDCLGDIAARDLICAQKFNGLTVLPPLLTDEMIAQYTSALLAGTITSGWTFGAGAALQIPFAMQMAYRFNGCGVTQNVLYENQKLIANQFNSAIGKIQDSLSSTASALGKLQDVVNQNAQALNTLVKQLSSNFGAISSVLNDILSRLDKVEAEVQIDRLITGRLQSLQTYVTQQLIRAAEIRASANLAATKMSECVLGQSKRVDFCGKGCHLMSFPQSAPHGVVFLHVTYVPAQEKNFTTAPAICHDGKAHFPREGVFVSNGTHWFVTQRNFYEPQIITTDNTFVSGNCDVVIGIVNNTVYDPLQPELDSFKEELDKYFKNHTSPDVDLGDIPGINASVVNIQKEIDRLNEVAKNLNESLIDLQELGKYEQYIKWPWYIWLGFIAGLIAIVMVTIMLCCMTSCCSCLKGCCSCGSCCKFDEDDSEPVLKGVKLHYT

SEQ ID NO: 924 - protein, 1273 aa, Artificial Sequence
  SARS-CoV-2/USA/WA-UW261/2020__EPI_ISL_418046 spike protein (1-1273)(I909C_Y1047C)
MFVFLVLLPLVSSQCVNLTTRTQLPPAYTNSFTRGVYYPDKVFRSSVLHSTQDLFLPFFSNVTWFHAIHVSGTNGTKRFDNPVLPFNDGVYFASTEKSNIIRGWIFGTTLDSKTQSLLIVNNATNVVIKVCEFQFCNDPFLGVYYHKNNKSWMESEFRVYSSANNCTFEYVSQPFLMDLEGKQGNFKNLREFVFKNIDGYFKIYSKHTPINLVRDLPQGFSALEPLVDLPIGINITRFQTLLALHRSYLTPGDSSSGWTAGAAAYYVGYLQPRTFLLKYNENGTITDAVDCALDPLSETKCTLKSFTVEKGIYQTSNFRVQPTESIVRFPNITNLCPFGEVFNATRFTSVYAWNRKRISNCVADYSVLYNSASFSTFKCYGVSPTKLNDLCFTNVYADSFVIRGDEVRQIAPGQTGKIADYNYKLPDDFTGCVIAWNSNNLDSKVGGNYNYLYRLFRKSNLKPFERDISTEIYQAGSTPCNGVEGFNCYFPLQSYGFQPTNGVGYQPYRVVVLSFELLHAPATVCGPKKSTNLVKNKCVNFNFNGLTGTGVLTESNKKFLPFQQFGRDIADTTDAVRDPQTLEILDITPCSFGGVSVITPGTNTSNQVAVLYQDVNCTEVPVAIHADQLTPTWRVYSTGSNVFQTRAGCLIGAEHVNNSYECDIPIGAGICASYQTQTNSPRRARSVASQSIIAYTMSLGAENSVAYSNNSIAIPTNFTISVTTEILPVSMTKTSVDCTMYICGDSTECSNLLLQYGSFCTQLNRALTGIAVEQDKNTQEVFAQVKQIYKTPPIKDFGGFNFSQILPDPSKPSKRSFIEDLLFNKVTLADAGFIKQYGDCLGDIAARDLICAQKFNGLTVLPPLLTDEMIAQYTSALLAGTITSGWTFGAGAALQIPFAMQMAYRFNGCGVTQNVLYENQKLIANQFNSAIGKIQDSLSSTASALGKLQDVVNQNAQALNTLVKQLSSNFGAISSVLNDILSRLDKVEAEVQIDRLITGRLQSLQTYVTQQLIRAAEIRASANLAATKMSECVLGQSKRVDFCGKGCHLMSFPQSAPHGVVFLHVTYVPAQEKNFTTAPAICHDGKAHFPREGVFVSNGTHWFVTQRNFYEPQIITTDNTFVSGNCDVVIGIVNNTVYDPLQPELDSFKEELDKYFKNHTSPDVDLGDISGINASVVNIQKEIDRLNEVAKNLNESLIDLQELGKYEQYIKWPWYIWLGFIAGLIAIVMVTIMLCCMTSCCSCLKGCCSCGSCCKFDEDDSEPVLKGVKLHYT

SEQ ID NO: 925 - protein, 1273 aa, Artificial Sequence
  SARS-CoV-2/Portugal/PT0035/2020__EPI_ISL_418020 spike protein (1-1273)(I909C_Y1047C)
MFVFLVLLPLVSSQCVNLTTRTQLPPAYTNSFTRGVYYPDKVFRSSVLHSTQDLFLPFFSNVTWFHAIHVSGTNGTKRFDNPVLPFNDGVYFASTEKSNIIRGWIFGTTLDSKTQSLLIVNNATNVVIKVCEFQFCNDPFLGVYYHKNNKSWMESEFRVYSSANNCTFEYVSQPFLMDLEGKQGNFKNLREFVFKNIDGYFKIYSKHTPINLVRDLPQGFSALEPLVDLPIGINITRFQTLLALHRSYLTPGDSSSGWTAGAAAYYVGYLQPRTFLLKYNENGTITDAVDCALDPLSETKCTLKSFTVEKGIYQTSNFRVQPTESIVRFPNITNLCPFGEVFNATRFASVYAWNRKRISNCVADYSVLYNSASFSTFKCYGVSPTKLNDLCFTNVYADSFVIRGDEVRQIAPGQTGKIADYNYKLPDDFTGCVIAWNSNNLDSKVGGNYNYLYRLFRKSNLKPFERDISTEIYQAGSTPCNGVEGFNCYFPLQSYGFQPTNGVGYQPYRVVVLSFELLHAPATVCGPKKSTNLVKNKCVNFNFNGLTGTGVLTESNKKFLPFQQFGRDIADTTDAVRDPQTLEILDITPCSFGGVSVITPGTNTSNQVAVLYQDVNCTEVPVAIHADQLTPTWRVYSTGSNVFQTRAGCLIGAEHVNNSYECDIPIGAGICASYQTQTNSPRRARSVASQSIIAYTMSLGAENSVAYSNNSIAIPTNFTISVTTEILPVSMTKTSVDCTMYICGDSTECSNLLLQYGSFCTQLNRALTGIAVEQDKNTQEVFAQVKQIYKTPPIKDFGGFNFSQILPDPSKPSKRSFIEDLLFNKVTLADAGFIKQYGDCLGDISARDLICAQKFNGLTVLPPLLTDEMIAQYTSALLAGTITSGWTFGAGAALQIPFAMQMAYRFNGCGVTQNVLYENQKLIANQFNSAIGKIQDSLSSTASALGKLQDVVNQNAQALNTLVKQLSSNFGAISSVLNDILSRLDKVEAEVQIDRLITGRLQSLQTYVTQQLIRAAEIRASANLAATKMSECVLGQSKRVDFCGKGCHLMSFPQSAPHGVVFLHVTYVPAQEKNFTTAPAICHDGKAHFPREGVFVSNGTHWFVTQRNFYEPQIITTDNTFVSGNCDVVIGIVNNTVYDPLQPELDSFKEELDKYFKNHTSPDVDLGDISGINASVVNIQKEIDRLNEVAKNLNESLIDLQELGKYEQYIKWPWYIWLGFIAGLIAIVMVTIMLCCMTSCCSCLKGCCSCGSCCKFDEDDSEPVLKGVKLHYT

SEQ ID NO: 926 - protein, 1273 aa, Artificial Sequence
  SARS-CoV-2/USA/NY-NYUMC7/2020__EPI_ISL_418192 spike protein (1-1273)(I909C_Y1047C)
MFVFLVLLPLVSSQCVNLTTRTQLPPAYTNSFTRGVYYPDKVFRSSVLHSTQDLFLPFFSNVTWFHAIHVSGTNGTKRFDNPVLPFNDGVYFASTEKSNIIRGWIFGTTLDSKTQSLLIVNNATNVVIKVCEFQFCNDPFLGVYHHKNNKSWMESEFRVYSSANNCTFEYVSQPFLMDLEGKQGNFKNLREFVFKNIDGYFKIYSKHTPINLVRDLPQGFSALEPLVDLPIGINITRFQTLLALHRSYLTPGDSSSGWTAGAAAYYVGYLQPRTFLLKYNENGTITDAVDCALDPLSETKCTLKSFTVEKGIYQTSNFRVQPTESIVRFPNITNLCPFGEVFNATRFASVYAWNRKRISNCVADYSVLYNSASFSTFKCYGVSPTKLNDLCFTNVYADSFVIRGDEVRQIAPGQTGKIADYNYKLPDDFTGCVIAWNSNNLDSKVGGNYNYLYRLFRKSNLKPFERDISTEIYQAGSTPCNGVEGFNCYFPLQSYGFQPTNGVGYQPYRVVVLSFELLHAPATVCGPKKSTNLVKNKCVNFNFNGLTGTGVLTESNKKFLPFQQFGRDIADTTDAVRDPQTLEILDITPCSFGGVSVITPGTNTSNQVAVLYQGVNCTEVPVAIHADQLTPTWRVYSTGSNVFQTRAGCLIGAEHVNNSYECDIPIGAGICASYQTQTNSPRRARSVASQSIIAYTMSLGAENSVAYSNNSIAIPTNFTISVTTEILPVSMTKTSVDCTMYICGDSTECSNLLLQYGSFCTQLNRALTGIAVEQDKNTQEVFAQVKQIYKTPPIKDFGGFNFSQILPDPSKPSKRSFIEDLLFNKVTLADAGFIKQYGDCLGDIAARDLICAQKFNGLTVLPPLLTDEMIAQYTSALLAGTITSGWTFGAGAALQIPFAMQMAYRFNGCGVTQNVLYENQKLIANQFNSAIGKIQDSLSSTASALGKLQDVVNQNAQALNTLVKQLSSNFGAISSVLNDILSRLDKVEAEVQIDRLITGRLQSLQTYVTQQLIRAAEIRASANLAATKMSECVLGQSKRVDFCGKGCHLMSFPQSAPHGVVFLHVTYVPAQEKNFTTAPAICHDGKAHFPREGVFVSNGTHWFVTQRNFYEPQIITTDNTFVSGNCDVVIGIVNNTVYDPLQPELDSFKEELDKYFKNHTSPDVDLGDISGINASVVNIQKEIDRLNEVAKNLNESLIDLQELGKYEQYIKWPWYIWLGFIAGLIAIVMVTIMLCCMTSCCSCLKGCCSCGSCCKFDEDDSEPVLKGVKLHYT

SEQ ID NO: 927 - protein, 1273 aa, Artificial Sequence
  SARS-CoV-2/Iceland/189/2020__EPI_ISL_417709 spike protein (1-1273)(I909C_Y1047C)
MFVFLVLLPLVSSQCVNLTTRTQLPPAYTNSFTRGVYYPDKVFRSSVLHSTQDLFLPFFSNVTWFHAIHVSGTNGTKRFDNPVLPFNDGVYFASTEKSNIIRGWIFGTTLDSKTQSLLIVNNATNVVIKVCEFQFCNDPFLGVYYHKNNKSWMESEFRVYSSANNCTFEYVSQPFLMDLEGKQGNFKNLREFVFKNIDGYFKIYSKHTPINLVRDLPQGFSALEPLVDLPIGINITRFQTLLALHRSYLTPGDSSSGWTAGAAAYYVGYLQPRTFLLKYNENGTITDAVDCALDPLSETKCTLKSFTVEKGIYQTSNFRVQPTESIVRFPNITNLCPFGEVFNATRFASVYAWNRKRISNCVADYSVLYNSASFSTFKCYGVSPTKLNDLCFTNVYADSFVIRGDEVRQIAPGQTGKIADYNYKLPDDFTGCVIAWNSNNLDSKVGGNYNYLYRLFRKSNLKPFERDISTEIYQAGSTPCNGVEGFNCYFPLQSYGFQPTNGVGYQPYRVVVLSFELLHAPATVCGPKKSTNLVKNKCVNFNFNGLTGTGVLTESNKKFLPFQQFGRDIADTTDAVRDPQTLEILDITPCSFGGVSVITPGTNTSNQVAVLYQGVNCTEVPVAIHADQLTPTWRVYSTGSNVFQTRAGCLIGAEHVNNSYECDIPIGAGICASYQTQTNSPRRARSVASQSIIAYTMSLGAENSVAYSNNSIAIPTNFTISVTTEILPVSMTKTSVDCTMYICGDSTECSNLLLQYGSFCTQLNRALTGIAVEQDKNTQEVFAQVKQIYKTPPIKDFGGFNFSQILPDPSKPSKRSFIEDLLFNKVTLADAGFTKQYGDCLGDIAARDLICAQKFNGLTVLPPLLTDEMIAQYTSALLAGTITSGWTFGAGAALQIPFAMQMAYRFNGCGVTQNVLYENQKLIANQFNSAIGKIQDSLSSTASALGKLQDVVNQNAQALNTLVKQLSSNFGAISSVLNDILSRLDKVEAEVQIDRLITGRLQSLQTYVTQQLIRAAEIRASANLAATKMSECVLGQSKRVDFCGKGCHLMSFPQSAPHGVVFLHVTYVPAQEKNFTTAPAICHDGKAHFPREGVFVSNGTHWFVTQRNFYEPQIITTDNTFVSGNCDVVIGIVNNTVYDPLQPELDSFKEELDKYFKNHTSPDVDLGDISGINASVVNIQKEIDRLNEVAKNLNESLIDLQELGKYEQYIKWPWYIWLGFIAGLIAIVMVTIMLCCMTSCCSCLKGCCSCGSCCKFDEDDSEPVLKGVKLHYT

SEQ ID NO: 928 - protein, 1273 aa, Artificial Sequence
  SARS-CoV-2/Australia/NSW56/2020__EPI_ISL_417408 spike protein (1-1273)(I909C_Y1047C)
MFVFLVLLPLVSSQCVNLTTRTQLPPAYTNSFTRGVYYPDKVFRSSVLHSTQDLFLPFFSNVTWFHAIHVSGTNGTKRFDNPVLPFNDGVYFASTEKSNIIRGWIFGTTLDSKTQSLLIVNNATNVVIKVCEFQFCNDPFLGVYYHKNNKSWMESEFRVYSSANNCTFEYVSQPFLMDLEGKQGNFKNLREFVFKNIDGYFKIYSKHTPINLVRDLPQGFSALEPLVDLPIGINITRFQTLLALHRSYLTPGDSSSGWTAGAAAYYVGYLQPRTFLLKYNENGTITDAVDCALDPLSETKCTLKSFTVEKGIYQTSNFRVQPTESIVRFPNITNLCPFGEVFNATRFASVYAWNRKRISNCVADYSVLYNSASFSTFKCYGVSPTKLNDLCFTNVYADSFVIRGDEVRQIAPGQTGKIADYNYKLPDDFTGCVIAWNSNNLDSKVGGNYNYLYRLFRKSNLKPFERDISTEIYQAGSTPCNGVEGFNCYFPLQSYGFQPTNGVGYQPYRVVVLSFELLHAPATVCGPKKSTNLVKNKCVNFNFNGLTGTGVLTESNKKFLPFQQFGRDIADTTDAVRDPQTLEILDITPCSFGGVSVITPGTNTSNQVAVLYQDVNCTEVPVAIHADQLTPTWRVYSTGSNVFQTRAGCLIGAEHVNNSYECDIPIGAGICASYQTQTNSPRRARSVASQSIIAYTMSLGAENSVAYSNNSIAIPTNFTISVTTEILPVSMTKTSVDCTMYICGDSTECSNLLLQYGSFCTQLNRALTGIAVEQDKNTQEVFAQVKQIYKTPPIKDFGGFNFSQILPDSSKPSKRSFIEDLLFNKVTLADAGFIKQYGDCLGDIAARDLICAQKFNGLTVLPPLLTDEMIAQYTSALLAGTITSGWTFGAGAALQIPFAMQMAYRFNGCGVTQNVLYENQKLIANQFNSAIGKIQDSLSSTASALGKLQDVVNQNAQALNTLVKQLSSNFGAISSVLNDILSRLDKVEAEVQIDRLITGRLQSLQTYVTQQLIRAAEIRASANLAATKMSECVLGQSKRVDFCGKGCHLMSFPQSAPHGVVFLHVTYVPAQEKNFTTAPAICHDGKAHFPREGVFVSNGTHWFVTQRNFYEPQIITTDNTFVSGNCDVVIGIVNNTVYDPLQPELDSFKEELDKYFKNHTSPDVDLGDISGINASVVNIQKEIDRLNEVAKNLNESLIDLQELGKYEQYIKWPWYIWLGFIAGLIAIVMVTIMLCCMTSCCSCLKGCCSCGSCCKFDEDDSEPVLKGVKLHYT

SEQ ID NO: 929 - protein, 1273 aa, Artificial Sequence
  SARS-CoV-2/Iceland/280/2020__EPI_ISL_417608 spike protein (1-1273)(I909C_Y1047C)
MFVFLVLLPLVSSQCVNLTTRTQLPPAYTNSFTRGVYYPDKVFRSSVLHSTQDLFLPFFSNVTWFHAIHVSGTNGTKRFDNPVLPFNDGVYFASTEKSNIIRGWIFGTTLDSKTQSLLIVNNATNVVIKVCEFQFCNDPFLGVYYHKNNKSWMESEFRVYSSANNCTFEYVSQPFLMDLEGKQGNFKNLREFVFKNIDGYFKIYSKHTPINLVRDLPQGFSALEPLVDLPIGINITRFQTLLALHRSYLTPGDSSSGWTAGAAAYYVGYLQPRTFLLKYNENGTITDAVDCALDPLSETKCTLKSFTVEKGIYQTSNFRVQPTESIVRFPNITNLCPFGEVFNATRFASVYAWNRKRISNCVADYSVLYNSASFSTFKCYGVSPTKLNDLCFTNVYADSFVIRGDEVRQIAPGQTGKIADYNYKLPDDFTGCVIAWNSNNLDSKVGGNYNYLYRLFRKSNLKPFERDISTEIYQAGSTPCNGVEGFNCYFPLQSYGFQPTNGVGYQPYRVVVLSFELLHAPATVCGPKKSTNLVKNKCVNFNFNGLTGTGVLTESNKKFLPFQQFGRDIADTTDAVRDPQTLEILDITPCSFGGVSVITPGTNTSNQVAVLYQGVNCTEVPVAIHADQLTPTWRVYSTGSNVFQTRAGCLIGAEHVNNSYECDIPIGAGICASYHTQTNSPRRARSVASQSIIAYTMSLGAENSVAYSNNSIAIPTNFTISVTTEILPVSMTKTSVDCTMYICGDSTECSNLLLQYGSFCTQLNRALTGIAVEQDKNTQEVFAQVKQIYKTPPIKDFGGFNFSQILPDPSKPSKRSFIEDLLFNKVTLADAGFIKQYGDCLGDIAARDLICAQKFNGLTVLPPLLTDEMIAQYTSALLAGTITSGWTFGAGAALQIPFAMQMAYRFNGCGVTQNVLYENQKLIANQFNSAIGKIQDSLSSTASALGKLQDVVNQNAQALNTLVKQLSSNFGAISSVLNDILSRLDKVEAEVQIDRLITGRLQSLQTYVTQQLIRAAEIRASANLAATKMSECVLGQSKRVDFCGKGCHLMSFPQSAPHGVVFLHVTYVPAQEKNFTTAPAICHDGKAHFPREGVFVSNGTHWFVTQRNFYEPQIITTDNTFVSGNCDVVIGIVNNTVYDPLQPELDSFKEELDKYFKNHTSPDVDLGDISGINASVVNIQKEIDRLNEVAKNLNESLIDLQELGKYEQYIKWPWYIWLGFIAGLIAIVMVTIMLCCMTSCCSCLKGCCSCGSCCKFDEDDSEPVLKGVKLHYT

SEQ ID NO: 930 - protein, 1273 aa, Artificial Sequence
  SARS-CoV-2/Iceland/247/2020__EPI_ISL_417575 spike protein (1-1273)(I909C_Y1047C)
MFVFLVLLPLVSSQCVNLTTRTQLPPAYTNSFTRGVYYPDKVFRSSVLHSTQDLFLPFFSNVTWFHAIHVSGTNGTKRFDNPVLPFNDGVYFASTEKSNIIRGWIFGTTLDSKTQSLLIVNNATNVVIKVCEFQFCNDPFLGVYYHKNNKSWMESEFRVYSSANNCTFEYVSQPFLMDLEGKQGNFKNLREFVFKNIDGYFKIYSKHTPINLVRDLPQGFSALEPLVDLPIGINITRFQTLLALHRSYLTPGDSSSGWTAGAAAYYVGYLQPRTFLLKYNENGTITDAVDCALDPLSETKCTLKSFTVEKGIYQTSNFRVQPTESIVRFPNITNLCPFGEVFNATRFASVYAWNRKRISNCVADYSVLYNSASFSTFKCYGVSPTKLNDLCFTNVYADSFVIRGDEVRQIAPGQTGKIADYNYKLPDDFTGCVIAWNSNNLDSKVGGNYNYLYRLFRKSNLKPFERDISTEIYQAGSTPCNGVEGFNCYFPLQSYGFQPTNGVGYQPYRVVVLSFELLHAPATVCGPKKSTNLVKNKCVNFNFNGLTGTGVLTESNKKFLPFQQFGRDIADTTDAVRDPQTLEILDITPCSFGGVSVITPGTNTSNQVAVLYQGVNCTEVPVAIHADQLTPTWRVYSTGSNVFQTRAGCLIGAEHVNNSYECDIPIGAGICASYQTQTNSPRRARSVASQSIIAYTMSLGAENSVAYSNNSIAIPTNFTISVTTEILPVSMTKTSVDCTMYICGDSTECSNLLLQYGSFCTQLNRALTGIAVEQDKNTQEVFAQVKQIYKTPPIKDFGGFNFSQILPDPSKPSKRSFIEDLLFNKVTLADAGFIKQYGDCLGDIAARDLICAQKFNGLTVLPPLLTDEMIAQYTSALLAGTITSGWTFGAGAALQIPFAMQMAYRFNGCGVTQNVLYENQKLIANQFNSAIGKIQDSLSSTASALGKLQDVVNQNAQALNTLVKQLSSNFGAISSVLNDILSRLDKVEAEVQIDRLITGRLQSLQTYVTQQLIRAAEIRASANLAATKMSECVLGQSKRVDFCGKGCHLMSFPQSAPHGVVFLHVTYVPAQEKNFTTAPAICHDGKAHFPREGVFVSNGTHWFVTQRNFYEPQIITTDNTFVSGNCDVVIGIVNNTVYDPLQPELDSFKEELDKYFKNHTSPDVDLGDISGINASVVNIQKEIDRLNEVAKNLNESLIDLQELGKYEQYIKWPWYIWLGFIAGLIAIVIVTIMLCCMTSCCSCLKGCCSCGSCCKFDEDDSEPVLKGVKLHYT

SEQ ID NO: 931 - protein, 1273 aa, Artificial Sequence
  SARS-CoV-2/Iceland/238/2020__EPI_ISL_417566 spike protein (1-1273)(I909C_Y1047C)
MFVFLVLLPLVSSQCVNLTTRTQLPPAYTNSFTRGVYYPDKVFRSSVLHSTQDLFLPFFSNVTWFHAIHVSGTNGTKRFDNPVLPFNDGVYFASTEKSNIIRGWIFGTTLDSKTQSLLIVNNATNVVIKVCEFQFCNDPFLGVYYHKNNKSWMESEFRVYSSANNCTFEYVSQPFLMDLEGKQGNFKNLREFVFKNIDGYFKIYSKHTPINLVRDLPQGFSALEPLVDLPIGINITRFQTLLALHRSYLTPGDSSSGWTAGAAAYYVGYLQPRTFLLKYNENGTITDAVDCALDPLSETKCTLKSFTVEKGIYQTSNFRVQPTESIVRFPNITNLCPFGEVFNATRFASVYAWNRKRISNCVADYSVLYNSASFSTFKCYGVSPTKLNDLCFTNVYADSFVIRGDEVRQIAPGQTGKIADYNYKLPDDFTGCVIAWNSNNLDSKVGGNYNYLYRLFRKSNLKPFERDISTEIYQAGSTPCNGVEGFNCYFPLQSYGFQPTNGVGYQPYRVVVLSFELLHAPATVCGPKKSTNLVKNKCVNFNFNGLTGTGVLTESNKKFLPFQQFGRDIADTTDAVRDPQTLEILDITPCSFGGVSVITPGTNTSNQVAVLYQGVNCTEVPVAIHADQLTPTWRVYSTGSNVFQTRAGCLIGAEHVNNSYECDIPIGAGICASYQTQTNSPRRARSVASQSIIAYTMSLGAENSVAYSNNSIAIPTNFTISVTTEILPVSMTKTSVDCTMYICGDSTECSNLLLQYGSFCTQLNRALTGIAVEQDKNTQEVFAQVKQIYKTPPIKDFGGFNFSQILPDPSKPSKRSFIEDLLFNKVTLADVGFIKQYGDCLGDIAARDLICAQKFNGLTVLPPLLTDEMIAQYTSALLAGTITSGWTFGAGAALQIPFAMQMAYRFNGCGVTQNVLYENQKLIANQFNSAIGKIQDSLSSTASALGKLQDVVNQNAQALNTLVKQLSSNFGAISSVLNDILSRLDKVEAEVQIDRLITGRLQSLQTYVTQQLIRAAEIRASANLAATKMSECVLGQSKRVDFCGKGCHLMSFPQSAPHGVVFLHVTYVPAQEKNFTTAPAICHDGKAHFPREGVFVSNGTHWFVTQRNFYEPQIITTDNTFVSGNCDVVIGIVNNTVYDPLQPELDSFKEELDKYFKNHTSPDVDLGDISGINASVVNIQKEIDRLNEVAKNLNESLIDLQELGKYEQYIKWPWYIWLGFIAGLIAIVMVTIMLCCMTSCCSCLKGCCSCGSCCKFDEDDSEPVLKGVKLHYT

SEQ ID NO: 932 - protein, 1273 aa, Artificial Sequence
  SARS-CoV-2/Greece/16/2020__EPI_ISL_418265 spike protein (1-1273)(I909C_Y1047C)
MFVFLVLLPLVSSQCVNLTTRTQLPPAYTNSFTRGVYYPDKVFRSSVLHSTQDLFLPFFSNVTWFHAIHVSGTNGTKRFDNPVLPFNDGVYFASTEKSNIIRGWIFGTTLDSKTQSLLIVNNATNVVIKVCEFQFCNDPFLGVYYHKNNKSWMESEFRVYSSANNCTFEYVSQPFLMDLEGKQGNFKNLREFVFKNVDGYFKIYSKHTPINLVRDLPQGFSALEPLVDLPIGINITRFQTLLALHRSYLTPGDSSSGWTAGAAAYYVGYLQPRTFLLKYNENGTITDAVDCALDPLSETKCTLKSFTVEKGIYQTSNFRVQPTESIVRFPNITNLCPFGEVFNATRFASVYAWNRKRISNCVADYSVLYNSASFSTFKCYGVSPTKLNDLCFTNVYADSFVIRGDEVRQIAPGQTGKIADYNYKLPDDFTGCVIAWNSNNLDSKVGGNYNYLYRLFRKSNLKPFERDISTEIYQAGSTPCNGVEGFNCYFPLQSYGFQPTNGVGYQPYRVVVLSFELLHAPATVCGPKKSTNLVKNKCVNFNFNGLTGTGVLTESNKKFLPFQQFGRDIADTTDAVRDPQTLEILDITPCSFGGVSVITPGTNTSNQVAVLYQDVNCTEVPVAIHADQLTPTWRVYSTGSNVFQTRAGCLIGAEHVNNSYECDIPIGAGICASYQTQTNSPRRARSVASQSIIAYTMSLGAENSVAYSNNSIAIPTNFTISVTTEILPVSMTKTSVDCTMYICGDSTECSNLLLQYGSFCTQLNRALTGIAVEQDKNTQEVFAQVKQIYKTPPIKDFGGFNFSQILPDPSKPSKRSFIEDLLFNKVTLADAGFIKQYGDCLGDIAARDLICAQKFNGLTVLPPLLTDEMIAQYTSALLAGTITSGWTFGAGAALQIPFAMQMAYRFNGCGVTQNVLYENQKLIANQFNSAIGKIQDSLSSTASALGKLQDVVNQNAQALNTLVKQLSSNFGAISSVLNDILSRLDKVEAEVQIDRLITGRLQSLQTYVTQQLIRAAEIRASANLAATKMSECVLGQSKRVDFCGKGCHLMSFPQSAPHGVVFLHVTYVPAQEKNFTTAPAICHDGKAHFPREGVFVSNGTHWFVTQRNFYEPQIITTDNTFVSGNCDVVIGIVNNTVYDPLQPELDSFKEELDKYFKNHTSPDVDLGDISGINASVVNIQKEIDRLNEVAKNLNESLIDLQELGKYEQYIKWPWYIWLGFIAGLIAIVMVTIMLCCMTSCCSCLKGCCSCGSCCKFDEDDSEPVLKGVKLHYT

SEQ ID NO: 933 - protein, 1273 aa, Artificial Sequence
  SARS-CoV-2/Iceland/319/2020__EPI_ISL_417648 spike protein (1-1273)(I909C_Y1047C)
MFVFLVLLPLVSSQCVNLTTRTQLPPAYTNSFTRGVYYPDKVFRSSVLHSTQDLFLPFFSNVTWFHAIHVSGTNGTKRFDNPVLPFNDGVYFASTEKSNIIRGWIFGTTLDSKTQSLLIVNNATNVVIKVCEFQFCNDPFLGVYYHKNNKSWMESEFRVYSSANNCTFEYVSQPFLIDLEGKQGNFKNLREFVFKNIDGYFKIYSKHTPINLVRDLPQGFSALEPLVDLPIGINITRFQTLLALHRSYLTPGDSSSGWTAGAAAYYVGYLQPRTFLLKYNENGTITDAVDCALDPLSETKCTLKSFTVEKGIYQTSNFRVQPTESIVRFPNITNLCPFGEVFNATRFASVYAWNRKRISNCVADYSVLYNSASFSTFKCYGVSPTKLNDLCFTNVYADSFVIRGDEVRQIAPGQTGKIADYNYKLPDDFTGCVIAWNSNNLDSKVGGNYNYLYRLFRKSNLKPFERDISTEIYQAGSTPCNGVEGFNCYFPLQSYGFQPTNGVGYQPYRVVVLSFELLHAPATVCGPKKSTNLVKNKCVNFNFNGLTGTGVLTESNKKFLPFQQFGRDIADTTDAVRDPQTLEILDITPCSFGGVSVITPGTNTSNQVAVLYQGVNCTEVPVAIHADQLTPTWRVYSTGSNVFQTRAGCLIGAEHVNNSYECDIPIGAGICASYQTQTNSPRRARSVASQSIIAYTMSLGAENSVAYSNNSIAIPTNFTISVTTEILPVSMTKTSVDCTMYICGDSTECSNLLLQYGSFCTQLNRALTGIAVEQDKNTQEVFAQVKQIYKTPPIKDFGGFNFSQILPDPSKPSKRSFIEDLLFNKVTLADAGFIKQYGDCLGDIAARDLICAQKFNGLTVLPPLLTDEMIAQYTSALLAGTITSGWTFGAGAALQIPFAMQMAYRFNGCGVTQNVLYENQKLIANQFNSAIGKIQDSLSSTASALGKLQDVVNQNAQALNTLVKQLSSNFGAISSVLNDILSRLDKVEAEVQIDRLITGRLQSLQTYVTQQLIRAAEIRASANLAATKMSECVLGQSKRVDFCGKGCHLMSFPQSAPHGVVFLHVTYVPAQEKNFTTAPAICHDGKAHFPREGVFVSNGTHWFVTQRNFYEPQIITTDNTFVSGNCDVVIGIVNNTVYDPLQPELDSFKEELDKYFKNHTSPDVDLGDISGINASVVNIQKEIDRLNEVAKNLNESLIDLQELGKYEQYIKWPWYIWLGFIAGLIAIVMVTIMLCCMTSCCSCLKGCCSCGSCCKFDEDDSEPVLKGVKLHYT

SEQ ID NO: 934 - protein, 1273 aa, Artificial Sequence
  SARS-CoV-2/Congo/94/2020__EPI_ISL_417947 spike protein (1-1273)(I909C_Y1047C)
MFVFLVLLPLVSSQCVNLTTRTQLPPAYTNSFTRGVYYPDKVFRSSVLHSTQDLFLPFFSNVTWFHAIHVSGTNGTKRFDNPVLPFNDGVYFASTEKSNIIRGWIFGTTLDSKTQSLLIVNNATNVVIKVCEFQFCNDPFLGVYYHKNNKSWMESEFRVYSSANNCTFEYVSQPFLMDLEGKQGNFKNLREFVFKNIDGYFKIYSKHTPINLVRDLPQGFSALEPLVDLPIGINITRFQTLLALHRSYLTPGDSSSGWTAGAAAYYVGYLQPRTFLLKYNENGTITDAVDCALDPLSETKCTLKSFTVEKGIYQTSNFRVQPTESIVRFPNITNLCPFGEVFNATRFASVYAWNRKRISNCVADYSVLYNSASFSTFKCYGVSPTKLNDLCFTNVYADSFVIRGDEVRQIAPGQTGKIADYNYKLPDDFTGCVIAWNSNNLDSKVGGNYNYLYRLFRKSNLKPFERDISTEIYQAGSTPCNGVEGFNCYFPLQSYGFQPTNGVGYQPYRVVVLSFELLHAPATVCGPKKSTNLVKNKCVNFNFNGLTGTGVLTESNKKFLPFQQFGRDIADTTDAVRDPQTLEILDITPCSFGGVSVITPGTNTSNQVAVLYQGVNCTEVPVAIHADQLTPTWRVYSTGSNVFQTRAGCLIGAEHVNNSYECDIPIGAGICASYQTQTNSPRRARSVASQSIIAYTMSLGAENSVAYSNNSIAIPTNFTISVTTEILPVSMTKTSVDCTMYICGDSTECSNLLLQYGSFCTQLNRALTGIAVEQDKNTQEVFAQVKQIYKTPPIKDFGGFNFSQILPDPSKPSKRSFIEDILFNKVTLADAGFIKQYGDCLGDIAARDLICAQKFNGLTVLPPLLTDEMIAQYTSALLAGTITSGWTFGAGAALQIPFAMQMAYRFNGCGVTQNVLYENQKLIANQFNSAIGKIQDSLSSTASALGKLQDVVNQNAQALNTLVKQLSSNFGAISSVLNDILSRLDKVEAEVQIDRLITGRLQSLQTYVTQQLIRAAEIRASANLAATKMSECVLGQSKRVDFCGKGCHLMSFPQSAPHGVVFLHVTYVPAQEKNFTTAPAICHDGKAHFPREGVFVSNGTHWFVTQRNFYEPQIITTDNTFVSGNCDVVIGIVNNTVYDPLQPELDSFKEELDKYFKNHTSPDVDLGDISGINASVVNIQKEIDRLNEVAKNLNESLIDLQELGKYEQYIKWPWYIWLGFIAGLIAIVMVTIMLCCMTSCCSCLKGCCSCGSCCKFDEDDSEPVLKGVKLHYT

SEQ ID NO: 935 - protein, 1273 aa, Artificial Sequence
  SARS-CoV-2/Congo/158/2020__EPI_ISL_417950 spike protein (1-1273)(I909C_Y1047C)
MFVFLVLLPLVSSQCVNLTTRTQLPPAYTNSFTRGVYYPDKVFRSSVLHSTQDLFLPFFSNVTWFHAIHVSGTNGTKRFDNPVLPFNDGVYFASTEKSNIIRGWIFGTTLDSKTQSLLIVNNATNVVIKVCEFQFCNDPFLGVYYHKNNKSWMESEFRVYSSANNCTFEYVSQPFLMDLEGKQGNFKNLREFVFKNIDGYFKIYSKHTPINLVRDLPQGFSALEPLVDLPIGINITRFQTLLALHRSYLTPGDSSSGWTAGAAAYYVGYLQPRTFLLKYNENGTITDAVDCALDPLSETKCTLKSFTVEKGIYQTSNFRVQPTESIVRFPNITNLCPFGEVFNATRFASVYAWNRKRISNCVADYSVLYNSASFSTFKCYGVSPTKLNDLCFTNVYADSFVIRGDEVRQIAPGQTGKIADYNYKLPDDFTGCVIAWNSNNLDSKVGGNYNYLYRLFRKSNLKPFERDISTEIYQAGSTPCNGVEGFNCYFPLQSYGFQPTNGVGYQPYRVVVLSFELLHAPATVCGPKKSTNLVKNKCVNFNFNGLTGTGVLTESNKKFLPFQQFGRDIADTTDAVRDPQTLEILDITPCSFGGVSVITPGTNTSNQVAVLYQDVNCTEVPVAIHADQLTPTWRVYSTGSNVFQTRAGCLIGAEHVNNSYECDIPIGAGICASYQTQTNSPRRARSVASQSIIAYTMSLGAENSVAYSNNSIAIPTNFTISVTTEILPVSMTKTSVDCTMYICGDSTECSNLLLQYGSFCTQLNRALTGIAVEQDKNTQEVFAQVKQIYKTPPIKDFGGFNFSQILPDPSKPSKRSFIEDLLFNKVTLADAGFIKQYGDCLGDIAARDLICAQKFNGLTVLPPLLTDEMIAQYTSALLAGTITSGWTFGAGAALQIPFAMQMAYRFNGCGVTQNVLYENQKLIANQFNSAIGKIQDSLSSTASALGKLQDVVNQNAQALNTLVKQLSSNFGAISSVLNDILSRLDKVEAEVQIDRLITGRLQSLQTYVTQQLIRAAEIRASANLAATKMSECVLGQSKRVDFCGKGCHLMSFPQSAPHGVVFLHVTYVPAQEKNFTTAPAICHDGKAHFPREGVFVSNGTHWFVTQRNFYEPQIITTDNTFLSGNCDVVIGIVNNTVYDPLQPELDSFKEELDKYFKNHTSPDVDLGDISGINASVVNIQKEIDRLNEVAKNLNESLIDLQELGKYEQYIKWPWYIWLGFIAGLIAIVMVTIMLCCMTSCCSCLKGCCSCGSCCKFDEDDSEPVLKGVKLHYT

SEQ ID NO: 936 - protein, 1273 aa, Artificial Sequence
  SARS-CoV-2/USA/UT-00034/2020__EPI_ISL_417977 spike protein (1-1273)(I909C_Y1047C)
MFVFLVLLPLVSSQCVNLTTRTQLPPAYTNSFTRGVYYPDKVFRSSVLHSTQDLFLPFFSNVTWFHAIHVSGTNGTKRFDNPVLPFNDGVYFASTEKSNIIRGWIFGTTLDSKTQSLLIVNNATNVVIKVCEFQFCNDPFLGVYYYKNNKSWMESEFRVYSSANNCTFEYVSQPFLMDLEGKQGNFKNLREFVFKNIDGYFKIYSKHTPINLVRDLPQGFSALEPLVDLPIGINITRFQTLLALHRSYLTPGDSSSGWTAGAAAYYVGYLQPRTFLLKYNENGTITDAVDCALDPLSETKCTLKSFTVEKGIYQTSNFRVQPTESIVRFPNITNLCPFGEVFNATRFASVYAWNRKRISNCVADYSVLYNSASFSTFKCYGVSPTKLNDLCFTNVYADSFVIRGDEVRQIAPGQTGKIADYNYKLPDDFTGCVIAWNSNNLDSKVGGNYNYLYRLFRKSNLKPFERDISTEIYQAGSTPCNGVEGFNCYFPLQSYGFQPTNGVGYQPYRVVVLSFELLHAPATVCGPKKSTNLVKNKCVNFNFNGLTGTGVLTESNKKFLPFQQFGRDIADTTDAVRDPQTLEILDITPCSFGGVSVITPGTNTSNQVAVLYQGVNCTEVPVAIHADQLTPTWRVYSTGSNVFQTRAGCLIGAEHVNNSYECDIPIGAGICASYQTQTNSPRRARSVASQSIIAYTMSLGAENSVAYSNNSIAIPTNFTISVTTEILPVSMTKTSVDCTMYICGDSTECSNLLLQYGSFCTQLNRALTGIAVEQDKNTQEVFAQVKQIYKTPPIKDFGGFNFSQILPDPSKPSKRSFIEDLLFNKVTLADAGFIKQYGDCLGDIAARDLICAQKFNGLTVLPPLLTDEMIAQYTSALLAGTITSGWTFGAGAALQIPFAMQMAYRFNGCGVTQNVLYENQKLIANQFNSAIGKIQDSLSSTASALGKLQDVVNQNAQALNTLVKQLSSNFGAISSVLNDILSRLDKVEAEVQIDRLITGRLQSLQTYVTQQLIRAAEIRASANLAATKMSECVLGQSKRVDFCGKGCHLMSFPQSAPHGVVFLHVTYVPAQEKNFTTAPAICHDGKAHFPREGVFVSNGTHWFVTQRNFYEPQIITTDNTFVSGNCDVVIGIVNNTVYDPLQPELDSFKEELDKYFKNHTSPDVDLGDISGINASVVNIQKEIDRLNEVAKNLNESLIDLQELGKYEQYIKWPWYIWLGFIAGLIAIVMVTIMLCCMTSCCSCLKGCCSCGSCCKFDEDDSEPVLKGVKLHYT

SEQ ID NO: 937 - protein, 1273 aa, Artificial Sequence
  SARS-CoV-2/USA/UT-00033/2020__EPI_ISL_417976 spike protein (1-1273)(I909C_Y1047C)
MFVFLVLLPLVSSQCVNLTTRTQLPPAYTNSFTRGVYYPDKVFRSSVLHSTQDLFLPFFSNVTWFHAIHVSGTNGTKRFDNPVLPFNDGVYFASTEKSNIIRGWIFGTTLDSKTQSLLIVNNATNVVIKVCEFQFCNDPFLGVYYHKNNKSWMESEFRVYSSANNCTFEYVSQPFLMDLEGKQGNFKNLREFVFKNIDGYFKIYSKHTPINLVRDLPQGFSALEPLVDLPIGINITRFQTLLALHRSYLTPGDSSSGLTAGAAAYYVGYLQPRTFLLKYNENGTITDAVDCALDPLSETKCTLKSFTVEKGIYQTSNFRVQPTESIVRFPNITNLCPFGEVFNATRFASVYAWNRKRISNCVADYSVLYNSASFSTFKCYGVSPTKLNDLCFTNVYADSFVIRGDEVRQIAPGQTGKIADYNYKLPDDFTGCVIAWNSNNLDSKVGGNYNYLYRLFRKSNLKPFERDISTEIYQAGSTPCNGVEGFNCYFPLQSYGFQPTNGVGYQPYRVVVLSFELLHAPATVCGPKKSTNLVKNKCVNFNFNGLTGTGVLTESNKKFLPFQQFGRDIADTTDAVRDPQTLEILDITPCSFGGVSVITPGTNTSNQVAVLYQGVNCTEVPVAIHADQLTPTWRVYSTGSNVFQTRAGCLIGAEHVNNSYECDIPIGAGICASYQTQTNSPRRARSVASQSIIAYTMSLGAENSVAYSNNSIAIPTNFTISVTTEILPVSMTKTSVDCTMYICGDSTECSNLLLQYGSFCTQLNRALTGIAVEQDKNTQEVFAQVKQIYKTPPIKDFGGFNFSQILPDPSKPSKRSFIEDLLFNKVTLADAGFIKQYGDCLGDIAARDLICAQKFNGLTVLPPLLTDEMIAQYTSALLAGTITSGWTFGAGAALQIPFAMQMAYRFNGCGVTQNVLYENQKLIANQFNSAIGKIQDSLSSTASALGKLQDVVNQNAQALNTLVKQLSSNFGAISSVLNDILSRLDKVEAEVQIDRLITGRLQSLQTYVTQQLIRAAEIRASANLAATKMSECVLGQSKRVDFCGKGCHLMSFPQSAPHGVVFLHVTYVPAQEKNFTTAPAICHDGKAHFPREGVFVSNGTHWFVTQRNFYEPQIITTDNTFVSGNCDVVIGIVNNTVYDPLQPELDSFKEELDKYFKNHTSPDVDLGDISGINASVVNIQKEIDRLNEVAKNLNESLIDLQELGKYEQYIKWPWYIWLGFIAGLIAIVMVTIMLCCMTSCCSCLKGCCSCGSCCKFDEDDSEPVLKGVKLHYT

SEQ ID NO: 938 - protein, 1273 aa, Artificial Sequence
  SARS-CoV-2/USA/WI-13/2020__EPI_ISL_417516 spike protein (1-1273)(I909C_Y1047C)
MFVFLVLLPLVSSQCVNLTTRTQLPPAYTNSFTRGVYYPDKVFRSSVLHSTQDLFLPFFSNVTWFHAIHVSGTNGTKRFDNPVLPFNDGVYFASTEKSNIIRGWIFGTTLDSKTQSLLIVNNATNVVIKVCEFQFCNDPFLGVYYHKNNKSWMESEFRVYSSANNCTFEYVSQPFLMDLEGKQGNFKNLREFVFKNIDGYFKIYSKHTPINLVRDLPQGFSALEPLVDLPIGINITRFQTLLALHRSYLTPGDSSSGWTAGAAAYYVGYLQPRTFLLKYNENGTITDAVDCALDPLSETKCTLKSFTVEKGIYQTSNFRVLPTESIVRFPNITNLCPFGEVFNATRFASVYAWNRKRISNCVADYSVLYNSASFSTFKCYGVSPTKLNDLCFTNVYADSFVIRGDEVRQIAPGQTGKIADYNYKLPDDFTGCVIAWNSNNLDSKVGGNYNYLYRLFRKSNLKPFERDISTEIYQAGSTPCNGVEGFNCYFPLQSYGFQPTNGVGYQPYRVVVLSFELLHAPATVCGPKKSTNLVKNKCVNFNFNGLTGTGVLTESNKKFLPFQQFGRDIADTTDAVRDPQTLEILDITPCSFGGVSVITPGTNTSNQVAVLYQGVNCTEVPVAIHADQLTPTWRVYSTGSNVFQTRAGCLIGAEHVNNSYECDIPIGAGICASYQTQTNSPRRARSVASQSIIAYTMSLGAENSVAYSNNSIAIPTNFTISVTTEILPVSMTKTSVDCTMYICGDSTECSNLLLQYGSFCTQLNRALTGIAVEQDKNTQEVFAQVKQIYKTPPIKDFGGFNFSQILPDPSKPSKRSFIEDLLFNKVTLADAGFIKQYGDCLGDIAARDLICAQKFNGLTVLPPLLTDEMIAQYTSALLAGTITSGWTFGAGAALQIPFAMQMAYRFNGCGVTQNVLYENQKLIANQFNSAIGKIQDSLSSTASALGKLQDVVNQNAQALNTLVKQLSSNFGAISSVLNDILSRLDKVEAEVQIDRLITGRLQSLQTYVTQQLIRAAEIRASANLAATKMSECVLGQSKRVDFCGKGCHLMSFPQSAPHGVVFLHVTYVPAQEKNFTTAPAICHDGKAHFPREGVFVSNGTHWFVTQRNFYEPQIITTDNTFVSGNCDVVIGIVNNTVYDPLQPELDSFKEELDKYFKNHTSPDVDLGDISGINASVVNIQKEIDRLNEVAKNLNESLIDLQELGKYEQYIKWPWYIWLGFIAGLIAIVMVTIMLCCMTSCCSCLKGCCSCGSCCKFDEDDSEPVLKGVKLHYT

SEQ ID NO: 939 - protein, 1272 aa, Artificial Sequence
  SARS-CoV-2/India/1-27/2020__EPI_ISL_413522 spike protein (1-1272)(I908C_Y1046C)
MFVFLVLLPLVSSQCVNLTTRTQLPPAYTNSFTRGVYYPDKVFRSSVLHSTQDLFLPFFSNVTWFHAIHVSGTNGTKRFDNPVLPFNDGVYFASTEKSNIIRGWIFGTTLDSKTQSLLIVNNATNVVIKVCEFQFCNDPFLGVYHKNNKSWMESEFRVYSSANNCTFEYVSQPFLMDLEGKQGNFKNLREFVFKNIDGYFKIYSKHTPINLVRDLPQGFSALEPLVDLPIGINITRFQTLLALHRSYLTPGDSSSGWTAGAAAYYVGYLQPRTFLLKYNENGTITDAVDCALDPLSETKCTLKSFTVEKGIYQTSNFRVQPTESIVRFPNITNLCPFGEVFNATRFASVYAWNRKRISNCVADYSVLYNSASFSTFKCYGVSPTKLNDLCFTNVYADSFVIRGDEVIQIAPGQTGKIADYNYKLPDDFTGCVIAWNSNNLDSKVGGNYNYLYRLFRKSNLKPFERDISTEIYQAGSTPCNGVEGFNCYFPLQSYGFQPTNGVGYQPYRVVVLSFELLHAPATVCGPKKSTNLVKNKCVNFNFNGLTGTGVLTESNKKFLPFQQFGRDIADTTDAVRDPQTLEILDITPCSFGGVSVITPGTNTSNQVAVLYQDVNCTEVPVAIHADQLTPTWRVYSTGSNVFQTRAGCLIGAEHVNNSYECDIPIGAGICASYQTQTNSPRRARSVASQSIIAYTMSLGAENSVAYSNNSIAIPTNFTISVTTEILPVSMTKTSVDCTMYICGDSTECSNLLLQYGSFCTQLNRALTGIAVEQDKNTQEVFAQVKQIYKTPPIKDFGGFNFSQILPDPSKPSKRSFIEDLLFNKVTLADAGFIKQYGDCLGDIAARDLICAQKFNGLTVLPPLLTDEMIAQYTSALLAGTITSGWTFGAGAALQIPFAMQMAYRFNGCGVTQNVLYENQKLIANQFNSAIGKIQDSLSSTASALGKLQDVVNQNAQALNTLVKQLSSNFGAISSVLNDILSRLDKVEAEVQIDRLITGRLQSLQTYVTQQLIRAAEIRASANLAATKMSECVLGQSKRVDFCGKGCHLMSFPQSAPHGVVFLHVTYVPAQEKNFTTAPAICHDGKAHFPREGVFVSNGTHWFVTQRNFYEPQIITTDNTFVSGNCDVVIGIVNNTVYDPLQPELDSFKEELDKYFKNHTSPDVDLGDISGINASVVNIQKEIDRLNEVAKNLNESLIDLQELGKYEQYIKWPWYIWLGFIAGLIAIVMVTIMLCCMTSCCSCLKGCCSCGSCCKFDEDDSEPVLKGVKLHYT

SEQ ID NO: 940 - protein, 1267 aa, Artificial Sequence
  SARS-CoV-2/pangolin/Guangxi/P4L/2017__EPI_ISL_410538 spike protein (1-1267)(I903C_Y1041C)
MFVFLFVLPLVSSQCVNLTTRTGIPPGYTNSSTRGVYYPDKVFRSSILHLTQDLFLPFFSNVTWFNTINYQGGFKKFDNPVLPFNDGVYFASTEKSNIIRGWIFGTTLDARTQSLLIVNNATNVVIKVCEFQFCTDPFLGVYYHNNNKTWVENEFRVYSSANNCTFEYISQPFLMDLEGKQGNFKNLREFVFKNVDGYFKIYSKHTPIDLVRDLPRGFAALEPLVDLPIGINITRFQTLLALHRSYLTPGNLESGWTTGAAAYYVGYLQQRTFLLSYNQNGTITDAVDCSLDPLSETKCTLKSLTVEKGIYQTSNFRVQPTISIVRFPNITNLCPFGEVFNASKFASVYAWNRKRISNCVADYSVLYNSTSFSTFKCYGVSPTKLNDLCFTNVYADSFVVKGDEVRQIAPGQTGVIADYNYKLPDDFTGCVIAWNSVKQDALTGGNYGYLYRLFRKSKLKPFERDISTEIYQAGSTPCNGQVGLNCYYPLERYGFHPTTGVNYQPFRVVVLSFELLNGPATVCGPKLSTTLVKDKCVNFNFNGLTGTGVLTTSKKQFLPFQQFGRDISDTTDAVRDPQTLEILDITPCSFGGVSVITPGTNTSNQVAVLYQDVNCTEVPMAIHAEQLTPAWRVYSAGANVFQTRAGCLVGAEHVNNSYECDIPVGAGICASYHSMSSLRSVNQRSIIAYTMSLGAENSVAYSNNSIAIPTNFTISVTTEILPVSMTKTSVDCTMYICGDSIECSNLLLQYGSFCTQLNRALTGIAVEQDKNTQEVFAQVKQIYKTPPIKDFGGFNFSQILPDPSKPSKRSFIEDLLFNKVTLADAGFIKQYGDCLGDIAARDLICAQKFNGLTVLPPLLTDEMIAQYTSALLAGTITSGWTFGAGAALQIPFAMQMAYRFNGCGVTQNVLYENQKLIANQFNSAIGKIQDSLSSTASALGKLQDVVNQNAQALNTLVKQLSSNFGAISSVLNDILSRLDKVEAEVQIDRLITGRLQSLQTYVTQQLIRAAEIRASANLAATKMSECVLGQSKRVDFCGKGCHLMSFPQSAPHGVVFLHVTYVPAQEKNFTTAPAICHEGKAHFPREGVFVSNGTHWFITQRNFYEPQIITTDNTFVSGSCDVVIGIVNNTVYDPLQPELDSFKEELDKYFKNHTSPDVDLGDISGINASVVNIQKEIDRLNEVAKNLNESPIDLQELGKYEQYIKWPWYIWLGFIAGLIAIIMVTIMLCCMTSCCSCLKGCCSCGSCCKFDEDDSEPVLKGVKLHYT

SEQ ID NO: 941 - protein, 1267 aa, Artificial Sequence
  SARS-CoV-2/pangolin/Guangxi/P5L/2017__EPI_ISL_410540 spike protein (1-1267)(I903C_Y1041C)
MFVFLFVLPLVSSQCVNLTTRTGIPPGYTNSSTRGVYYPDKVFRSSILHLTQDLFLPFFSNVTWFNTINYQGGFKKFDNPVLPFNDGVYFASTEKSNIIRGWIFGTTLDARTQSLLIVNNATNVVIKVCEFQFCTDPFLGVYYHNNNKTWVENEFRVYSSANNCTFEYISQPFLMDLEGKQGNFKNLREFVFKNVDGYFKIYSKHTPIDLVRDLPRGFAALEPLVDLPIGINITRFQTLLALHRSYLTPGKLESGWTTGAAAYYVGYLQQRTFLLSYNQNGTITDAVDCSLDPLSETKCTLKSLTVEKGIYQTSNFRVQPTISIVRFPNITNLCPFGEVFNASKFASVYAWNRKRISNCVADYSVLYNSTSFSTFKCYGVSPTKLNDLCFTNVYADSFVVKGDEVRQIAPGQTGVIADYNYKLPDDFTGCVIAWNSVKQDALTGGNYGYLYRLFRKSKLKPFERDISTEIYQAGSTPCNGQVGLNCYYPLERYGFHPTTGVNYQPFRVVVLSFELLNGPATVCGPKLSTTLVKDKCVNFNFNGLTGTGVLTTSKKQFLPFQQFGRDISDTTDAVRDPQTLEILDITPCSFGGVSVITPGTNTSNQVAVLYQDVNCTEVPMAIHAEQLTPAWRVYSAGANVFQTRAGCLVGAEHVNNSYECDIPVGAGICASYHSMSSFRSVNQRSIIAYTMSLGAENSVAYSNNSIAIPTNFTISVTTEILPVSMTKTSVDCTMYICGDSIECSNLLLQYGSFCTQLNRALTGIAVEQDKNTQEVFAQVKQIYKTPPIKDFGGFNFSQILPDPSKPSKRSFIEDLLFNKVTLADAGFIKQYGDCLGDIAARDLICAQKFNGLTVLPPLLTDEMIAQYTSALLAGTITSGWTFGAGAALQIPFAMQMAYRFNGCGVTQNVLYENQKLIANQFNSAIGKIQDSLSSTASALGKLQDVVNQNAQALNTLVKQLSSNFGAISSVLNDILSRLDKVEAEVQIDRLITGRLQSLQTYVTQQLIRAAEIRASANLAATKMSECVLGQSKRVDFCGKGCHLMSFPQSAPHGVVFLHVTYVPAQEKNFTTAPAICHEGKAHFPREGVFVSNGTHWFITQRNFYEPQIITTDNTFVSGSCDVVIGIVNNTVYDPLQPELDSFKEELDKYFKNHTSPDVDLGDISGINASVVNIQKEIDRLNEVAKNLNESLIDLQELGKYEQYIKWPWYIWLGFIAGLIAIIMVTIMLCCMTSCCSCLKGCCSCGSCCKFDEDDSEPVLKGVKLHYT

SEQ ID NO: 942 - protein, 1267 aa, Artificial Sequence
  SARS-CoV-2/pangolin/Guangxi/P5E/2017__EPI_ISL_410541 spike protein (1-1267)(I903C_Y1041C)
MFVFLFVLPLVSSQCVNLTTRTGIPPGYTNSSTRGVYYPDKVFRSSILHLTQDLFLPFFSNVTWFNTITYQGGSKKFDNPVLPFNDGVYFASTEKSNIIRGWIFGTTLDARTQSLLIVNNATNVVIKVCEFQFCTDPFLGVYYHNNNKTWVENEFRVYSSANNCTFEYISQPFLMDLEGKQGNFKNLREFVFKNVDGYFKIYSKHTPIDLVRDLPRGFAALEPLVDLPIGINITRFQTLLALHRSYLTPGKLESGWTTGAAAYYVGYLQQRTFLLSYNQNGTITDAVDCSLDPLSETKCTLKSLTVEKGIYQTSNFRVQPTISIVRFPNITNLCPFGEVFNASKFASVYAWNRKRISNCVADYSVLYNSTSFSTFKCYGVSPTKLNDLCFTNVYADSFVVKGDEVRQIAPGQTGVIADYNYKLPDDFTGCVIAWNSVKQDALTGDNYGYLYRLFRKSKLKPFERDISTEIYQAGSTPCNGQVGLNCYYPLERYGFHPTTGVNYQPFRVVVLSFELLNGPATVCGPKLSTTLVKDKCVNFNFNGLTGTGVLTTSKKQFLPFQQFGRDISDTTDAVRDPQTLEILDITPCSFGGVSVITPGTNTSNQVAVLYQDVNCTEVPMAIHAEQLTPAWRVYSAGANVFQTRAGCLVGAEHVNNSYECDIPVGAGICASYHSMSSFRSVNQRSIIAYTMSLGAENSVAYSNNSIAIPTNFTISVTTEILPVSMTKTSVDCTMYICGDSIECSNLLLQYGSFCTQLNRALTGIAVEQDKNTQEVFAQVKQIYKTPPIKDFGGFNFSQILPDPSKPSKRSFIEDLLFNKVTLADAGFIKQYGDCLGDIAARDLICAQKFNGLTVLPPLLTDEMIAQYTSALLAGTITSGWTFGAGAALQIPFAMQMAYRFNGCGVTQNVLYENQKLIANQFNSAIGKIQDSLSSTASALGKLQDVVNQNAQALNTLVKQLSSNFGAISSVLNDILSRLDKVEAEVQIDRLITGRLQSLQTYVTQQLIRAAEIRASANLAATKMSECVLGQSKRVDFCGKGCHLMSFPQSAPHGVVFLHVTYVPAQEKNFTTAPAICHEGKAHFPREGVFVSNGTHWFITQRNFYEPQIITTDNTFVSGSCDVVIGIVNNTVYDPLQPELDSFKEELDKYFKNHTSPDVDLGDISGINASVVNIQKEIDRLNEVAKNLNESLIDLQELGKYEQYIKWPWYIWLGFIAGLIAIIMVTIMLCCMTSCCSCLKGCCSCGSCCKFDEDDSEPVLKGVKLHYT

SEQ ID NO: 943 - protein, 1265 aa, Artificial Sequence
  SARS-CoV-2/pangolin/Guangxi/P1E/2017__EPI_ISL_410539 spike protein (1-1265)(I901C_Y1039C)
MFVFLFVLPLVSSQCVNLTTRTGIQPGYTNSSTRGVYYPDKVFRSSILHLTQDLFLPFFSNVTWFNTINYQGGFKKFDNPVLPFNDGVYFASTEKSNIIRGWIFGTTLDARTQSLLIVNNATNVVIKVCEFQFCTDPFLGVYYHNNNKTWVENEFRVYSSANNCTFEYISQPFLMDLEGKQGNFKNLREFVFKNVDGYFKIYSKHTPIDLVRDLPRGFAALEPLVDLPIGINITRFQTLLALHRSYLTPGKLESGWTTGAAAYYVGYLQQRTFLLSYNQNGTITDAVDCSLDPLSETKCTLKSLTVEKGIYQTSNFRVQPTISIVRFPNITNLCPFGEVFNASKFASVYAWNRKRISNCVADYSVLYNSTSFSTFKCYGVSPTKLNDLCFTNVYADSFVVKGDEVRQIAPGQTGVIADYNYKLPDDFTGCVIAWNSVKQDALTGGNYLYRLFRKSKLKPFERDISTEIYQAGSTPCNGQVGLNCYYPLERYGFHPTTGVNYQPFRVVVLSFELLNGPATVCGPKLSTTLVKDKCVNFNFNGLTGTGVLTTSKKQFLPFQQFGRDISDTTDAVRDPQTLEILDITPCSFGGVSVITPGTNTSNQVAVLYQDVNCTEVPMAIHAEQLTPAWRVYSAGANVFQTRAGCLVGAEHVNNSYECDIPVGAGICASYHSMSSLRSVNQRSIIAYTMSLGAENSVAYSNNSIAIPTNFTISVTTEILPVSMTKTSVDCTMYICGDSIECSNLLLQYGSFCTQLNRALTGIAVEQDKNTQEVFAQVKQIYKTPPIKDFGGFNFSQILPDPSKPSKRSFIEDLLFNKVTLADAGFIKQYGDCLGDIAARDLICAQKFNGLTVLPPLLTDEMIAQYTSALLAGTITSGWTFGAGAALQIPFAMQMAYRFNGCGVTQNVLYENQKLIANQFNSAIGKIQDSLSSTASALGKLQDVVNQNAQALNTLVKQLSSNFGAISSVLNDILSRLDKVEAEVQIDRLITGRLQSLQTYVTQQLIRAAEIRASANLAATKMSECVLGQSKRVDFCGKGCHLMSFPQSAPHGVVFLHVTYVPAQEKNFTTAPAICHEGKAHFPREGVFVSNGTHWFITQRNFYEPQIITTDNTFVSGSCDVVIGIVNNTVYDPLQPELDSFKEELDKYFKNHTSPDVDLGDISGINASVVNIQKEIDRLNEVAKNLNESLIDLQELGKYEQYIKWPWYIWLGFIAGLIAIIMVTIMLCCMTSCCSCLKGCCSCGSCCKFDEDDSEPVLKGVKLHYT

SEQ ID NO: 944 - protein, 1273 aa, Artificial Sequence; identical to SEQ ID NO: 24
  SARS-CoV-2/Wuhan/WIV05/2019__EPI_ISL_402128 spike protein (1-1273)(Q965C_S1003C)

SEQ ID NO: 945 - protein, 1269 aa, Artificial Sequence
  SARS-CoV-2/bat/Yunnan/RaTG13/2013__EPI_ISL_402131 spike protein (1-1269)(Q961C_S999C)
MFVFLVLLPLVSSQCVNLTTRTQLPPAYTNSSTRGVYYPDKVFRSSVLHLTQDLFLPFFSNVTWFHAIHVSGTNGIKRFDNPVLPFNDGVYFASTEKSNIIRGWIFGTTLDSKTQSLLIVNNATNVVIKVCEFQFCNDPFLGVYYHKNNKSWMESEFRVYSSANNCTFEYVSQPFLMDLEGKQGNFKNLREFVFKNIDGYFKIYSKHTPINLVRDLPPGFSALEPLVDLPIGINITRFQTLLALHRSYLTPGDSSSGWTAGAAAYYVGYLQPRTFLLKYNENGTITDAVDCALDPLSETKCTLKSFTVEKGIYQTSNFRVQPTDSIVRFPNITNLCPFGEVFNATTFASVYAWNRKRISNCVADYSVLYNSTSFSTFKCYGVSPTKLNDLCFTNVYADSFVITGDEVRQIAPGQTGKIADYNYKLPDDFTGCVIAWNSKHIDAKEGGNFNYLYRLFRKANLKPFERDISTEIYQAGSKPCNGQTGLNCYYPLYRYGFYPTDGVGHQPYRVVVLSFELLNAPATVCGPKKSTNLVKNKCVNFNFNGLTGTGVLTESNKKFLPFQQFGRDIADTTDAVRDPQTLEILDITPCSFGGVSVITPGTNASNQVAVLYQDVNCTEVPVAIHADQLTPTWRVYSTGSNVFQTRAGCLIGAEHVNNSYECDIPIGAGICASYQTQTNSRSVASQSIIAYTMSLGAENSVAYSNNSIAIPTNFTISVTTEILPVSMTKTSVDCTMYICGDSTECSNLLLQYGSFCTQLNRALTGIAVEQDKNTQEVFAQVKQIYKTPPIKDFGGFNFSQILPDPSKPSKRSFIEDLLFNKVTLADAGFIKQYGDCLGDIAARDLICAQKFNGLTVLPPLLTDEMIAQYTSALLAGTITSGWTFGAGAALQIPFAMQMAYRFNGIGVTQNVLYENQKLIANQFNSAIGKIQDSLSSTASALGKLQDVVNQNAQALNTLVKCLSSNFGAISSVLNDILSRLDKVEAEVQIDRLITGRLQCLQTYVTQQLIRAAEIRASANLAATKMSECVLGQSKRVDFCGKGYHLMSFPQSAPHGVVFLHVTYVPAQEKNFTTAPAICHDGKAHFPREGVFVSNGTHWFVTQRNFYEPQIITTDNTFVSGSCDVVIGIVNNTVYDPLQPELDSFKEELDKYFKNHTSPDVDLGDISGINASVVNIQKEIDRLNEVAKNLNESLIDLQELGKYEQYIKWPWYIWLGFIAGLIAIIMVTIMLCCMTSCCSCLKGCCSCGSCCKFDEDDSEPVLKGVKLHYT

SEQ ID NO: 946 - protein, 1273 aa, Artificial Sequence
  SARS-CoV-2/Wuhan/HBCDC-HB-01/2019__EPI_ISL_402132 spike protein (1-1273)(Q965C_S1003C)
MFVFLVLLPLVSSQCVNLTTRTQLPPAYTNSITRGVYYPDKVFRSSVLHSTQDLFLPFFSNVTWFHAIHVSGTNGTKRFDNPVLPFNDGVYFASTEKSNIIRGWIFGTTLDSKTQSLLIVNNATNVVIKVCEFQFCNDPFLGVYYHKNNKSWMESEFRVYSSANNCTFEYVSQPFLMDLEGKQGNFKNLREFVFKNIDGYFKIYSKHTPINLVRDLPQGFSALEPLVDLPIGINITRFQTLLALHRSYLTPGDSSSGWTAGAAAYYVGYLQPRTFLLKYNENGTITDAVDCALDPLSETKCTLKSFTVEKGIYQTSNFRVQPTESIVRFPNITNLCPFGEVFNATRFASVYAWNRKRISNCVADYSVLYNSASFSTFKCYGVSPTKLNDLCFTNVYADSFVIRGDEVRQIAPGQTGKIADYNYKLPDDFTGCVIAWNSNNLDSKVGGNYNYLYRLFRKSNLKPFERDISTEIYQAGSTPCNGVEGFNCYFPLQSYGFQPTNGVGYQPYRVVVLSFELLHAPATVCGPKKSTNLVKNKCVNFNFNGLTGTGVLTESNKKFLPFQQFGRDIADTTDAVRDPQTLEILDITPCSFGGVSVITPGTNTSNQVAVLYQDVNCTEVPVAIHADQLTPTWRVYSTGSNVFQTRAGCLIGAEHVNNSYECDIPIGAGICASYQTQTNSPRRARSVASQSIIAYTMSLGAENSVAYSNNSIAIPTNFTISVTTEILPVSMTKTSVDCTMYICGDSTECSNLLLQYGSFCTQLNRALTGIAVEQDKNTQEVFAQVKQIYKTPPIKDFGGFNFSQILPDPSKPSKRSFIEDLLFNKVTLADAGFIKQYGDCLGDIAARDLICAQKFNGLTVLPPLLTDEMIAQYTSALLAGTITSGWTFGAGAALQIPFAMQMAYRFNGIGVTQNVLYENQKLIANQFNSAIGKIQDSLSSTASALGKLQDVVNQNAQALNTLVKCLSSNFGAISSVLNDILSRLDKVEAEVQIDRLITGRLQCLQTYVTQQLIRAAEIRASANLAATKMSECVLGQSKRVDFCGKGYHLMSFPQSAPHGVVFLHVTYVPAQEKNFTTAPAICHDGKAHFPREGVFVSNGTHWFVTQRNFYEPQIITTDNTFVSGNCDVVIGIVNNTVYDPLQPELDSFKEELDKYFKNHTSPDVDLGDISGINASVVNIQKEIDRLNEVAKNLNESLIDLQELGKYEQYIKWPWYIWLGFIAGLIAIVMVTIMLCCMTSCCSCLKGCCSCGSCCKFDEDDSEPVLKGVKLHYT

SEQ ID NO: 947 - protein, 1273 aa, Artificial Sequence
  SARS-CoV-2/Guangdong/20SF028/2020__EPI_ISL_403936 spike protein (1-1273)(Q965C_S1003C)
MFVFLVLLPLVSSQCVNLTTRTQLPPAYTNSFTRGVYYPDKVFRSSVLYSTQDLFLPFFSNVTWFHAIHVSGTNGTKRFDNPVLPFNDGVYFASTEKSNIIRGWIFGTTLDSKTQSLLIVNNATNVVIKVCEFQFCNDPFLGVYYHKNNKSWMESEFRVYSSANNCTFEYVSQPFLMDLEGKQGNFKNLREFVFKNIDGYFKIYSKHTPINLVRDLPQGFSALEPLVDLPIGINITRFQTLLALHRSYLTPGDSSSGWTAGAAAYYVGYLQPRTFLLKYNENGTITDAVDCALDPLSETKCTLKSFTVEKGIYQTSNFRVQPTESIVRFPNITNLCPFGEVFNATRFASVYAWNRKRISNCVADYSVLYNSASFSTFKCYGVSPTKLNDLCFTNVYADSFVIRGDEVRQIAPGQTGKIADYNYKLPDDFTGCVIAWNSNNLDSKVGGNYNYLYRLFRKSNLKPFERDISTEIYQAGSTPCNGVEGFNCYFPLQSYGFQPTNGVGYQPYRVVVLSFELLHAPATVCGPKKSTNLVKNKCVNFNFNGLTGTGVLTESNKKFLPFQQFGRDIADTTDAVRDPQTLEILDITPCSFGGVSVITPGTNTSNQVAVLYQDVNCTEVPVAIHADQLTPTWRVYSTGSNVFQTRAGCLIGAEHVNNSYECDIPIGAGICASYQTQTNSPRRARSVASQSIIAYTMSLGAENSVAYSNNSIAIPTNFTISVTTEILPVSMTKTSVDCTMYICGDSTECSNLLLQYGSFCTQLNRALTGIAVEQDKNTQEVFAQVKQIYKTPPIKDFGGFNFSQILPDPSKPSKRSFIEDLLFNKVTLADAGFIKQYGDCLGDIAARDLICAQKFNGLTVLPPLLTDEMIAQYTSALLAGTITSGWTFGAGAALQIPFAMQMAYRFNGIGVTQNVLYENQKLIANQFNSAIGKIQDSLSSTASALGKLQDVVNQNAQALNTLVKCLSSNFGAISSVLNDILSRLDKVEAEVQIDRLITGRLQCLQTYVTQQLIRAAEIRASANLAATKMSECVLGQSKRVDFCGKGYHLMSFPQSAPHGVVFLHVTYVPAQEKNFTTAPAICHDGKAHFPREGVFVSNGTHWFVTQRNFYEPQIITTDNTFVSGNCDVVIGIVNNTVYDPLQPELDSFKEELDKYFKNHTSPDVDLGDISGINASVVNIQKEIDRLNEVAKNLNESLIDLQELGKYEQYIKWPWYIWLGFIAGLIAIVMVTIMLCCMTSCCSCLKGCCSCGSCCKFDEDDSEPVLKGVKLHYT

SEQ ID NO: 948 - protein, 1273 aa, Artificial Sequence
  SARS-CoV-2/Shenzhen/SZTH-001/2020__EPI_ISL_406592 spike protein (1-1273)(Q965C_S1003C)
MFVFLVLLPLVSSQCVNLTTRTQLPPAYTNSFTRGVYYPDKVFRSSVLHSTQDLFLPFFSNVTWFHAIHVSGTNGTKRFDNPVLPFNDGVYFASTEKSNIIRGWIFGTTLDSKTQSLLIVNNATNVVIKVCEFQFCNDPFLGVYYHKNNKSWMESEFRVYSSANNCTFEYVSQPFLMDLEGKQGNFKNLREFVFKNIDGYFKIYSKHTPINLVRDLPQGFSALEPLVDLPIGINITRFQTLLALHRSYLTPGDSSSGWTAGAAAYYVGYLQPRTFLLKYNENGTITDAVDCALDPLSETKCTLKSFTVEKGIYQTSNFRVQPTESIVRFPNITNLCPFGEVFNATRFASVYAWNRKRISNCVADYSVLYNSASFSTFKCYGVSPTKLNDLCFTNVYADSFVIRGDEVRQIAPGQTGKIADYNYKLPDDFTGCVIAWNSNNLDSKVGGNYNYLYRLFRKSNLKPFERDISTEIYQAGSTPCNGVEGFNCYFPLQSYGFQPTNGVGYQPYRVVVLSFELLHAPATVCGPKKSTNLVKNKCVNFNFNGLTGTGVLTESNKKFLPFQQFGRDIADTTDAVRDPQTLEILDITPCSFGGVSVITPGTNTSNQVAVLYQDVNCTEVPVAIHADQLTPTWRVYSTGSNVFQTRAGCLIGAEHVNNSYECDIPIGAGICASYQTQTNSPRRARSVASQSIIAYTMSLGAENSVAYSNNSIAIPTNFTISVTTEILPVSMTKTSVDCTMYICGDSTECSNLLLQYGSFCTQLNRALTGIAVEQDKNTQEVFAQVKQIYKTPPIKDFGGFNFSQILPDPSKPSKRSFIEDLLFNKVTLADAGFIKQYGDCLGDIAARDLICAQKFNGLTVLPPLLTDEMIAQYTSALLAGTITSGWTFGAGAALQIPFAMQMAYRFNGIGVTQNVLYENQKLIANQFNSAIGKIQDSLSSTASALGKLQDVVNQNAQALNTLVKCLSSNFGAISSVLNDILSRLDKVEAEVQIDRLITGRLQCLQTYVTQQLIRAAEIRASANLAATKMSECVLGQSKRVDFCGKGYHLMSFPQSAPHGVVFLHVTYVPAQEKNFTTAPAICHDGKAHFPREGVFVSNGTHWFVTQRNFYEPQIITTDNTFVSGNCDVLIGIVNNTVYDPLQPELDSFKEELDKYFKNHTSPDVDLGDISGINASVVNIQKEIDRLNEVAKNLNESLIDLQELGKYEQYIKWPWYIWLGFIAGLIAIVMVTIMLCCMTSCCSCLKGCCSCGSCCKFDEDDSGPVLKGVKLHYT

SEQ ID NO: 949 - protein, 1273 aa, Artificial Sequence
  SARS-CoV-2/Shenzhen/SZTH-004/2020__EPI_ISL_406595 spike protein (1-1273)(Q965C_S1003C)
MFVFLVLLPLVSSQCVNLTTRTQLPPAYTNSFTRGVYYPDKVFRSSVLHSTQDLFLPFFSNVTWFHAIHVSGTNGTKRFDNPVLPFNDGVYFASTEKSNIIRGWIFGTTLDSKTQSLLIVNNATNVVIKVCEFQFCNDPFLGVYYHKNNKSWMESEFRVYSSANNCTFEYVSQPFLMDLEGKQGNFKNLREFVFKNIDGYFKIYSKHTPINLVRDLPQGFSALEPLVDLPIGINITRFQTLLALHRSYLTPGDSSSGWTAGAAAYYVGYLQPRTFLLKYNENGTITDAVDCALDPLSETKCTLKSFTVEKGIYQTSNFRVQPTESIVRFPNITNLCPFGEVFNATRFASVYAWDRKRISNCVAYYSVLYNSASFSTFKCYGVSPTKLNDLCFTNVYADSFVIRGDEVRQIAPGQTGKIADYNYKLPDDFTGCVIAWNSNNLDSKVGGNYNYLYRLFRKSNLKPFERDISTEIYQAGSTPCNGVEGFNCYFPLQSYGFQPTNGVGYQPYRVVVLSFELLHAPATVCGPKKSTNLVKNKCVNFNFNGLTGTGVLTESNKKFLPFQQFGRDIADTTDAVRDPQTLEILDITPCSFGGVSVITPGTNTSNQVAVLYQDVNCTEVPVAIHADQLTPTWRVYSTGSNVFQTRAGCLIGAEHVNNSYECDIPIGAGICASYQTQTNSPRRARSVASQSIIAYTMSLGAENSVAYSNNSIAIPTNFTISVTTEILPVSMTKTSVDCTMYICGDSTECSNLLLQYGSFCTQLNRALTGIAVEQDKNTQEVFAQVKQIYKTPPIKDFGGFNFSQILPDPSKPSKRSFIEDLLFNKVTLADAGFIKQYGDCLGDIAARDLICAQKFNGLTVLPPLLTDEMIAQYTSALLAGTITSGWTFGAGAALQIPFAMQMAYRFNGIGVTQNVLYENQKLIANQFNSAIGKIQDSLSSTASALGKLQDVVNQNAQALNTLVKCLSSNFGAISSVLNDILSRLDKVEAEVQIDRLITGRLQCLQTYVTQQLIRAAEIRASANLAATKMSECVLGQSKRVDFCGKGYHLMSFPQSAPHGVVFLHVTYVPAQEKNFTTAPAICHDGKAHFPREGVFVSNGTHWFVTQRNFYEPQIITTDNTFVSGNCDVVIGIVNNTVYDPLQPELDSFKEELDKYFKNHTSPDVDLGDISGINASVVNIQKEIDRLNEVAKNLNESLIDLQELGKYEQYIKWPWYIWLGFIAGLIAIVMVTIMLCCMTSCCSCLKGCCSCGSCCKFDEDDSEPVLKGVKLHYT

SEQ ID NO: 950 - protein, 1273 aa, Artificial Sequence
  SARS-CoV-2/France/IDF0372/2020__EPI_ISL_406596 spike protein (1-1273)(Q965C_S1003C)
MFVFLVLLPLVSSQCVNLTTRTQLPPAYTNSFTRGVYYPDKVFRSSVLHSTQDLFLPFFSNVTWFHAIHVSGTNGTKRFDNPVLPFNDGVYFASTEKSNIIRGWIFGTTLDSKTQSLLIVNNATNVVIKVCEFQFCNDPFLGVYYHKNNKSWMESEFRVYSSANNCTFEYVSQPFLMDLEGKQGNFKNLREFVFKNIDGYFKIYSKHTPINLVRDLPQGFSALEPLVDLPIGINITRFQTLLALHRSYLTPGDSSSGWTAGAAAYYVGYLQPRTFLLKYNENGTITDAVDCALDPLSETKCTLKSFTVEKGIYQTSNFRVQPTESIVRFPNITNLCPFGEVFNATRFASVYAWNRKRISNCVADYSFLYNSASFSTFKCYGVSPTKLNDLCFTNVYADSFVIRGDEVRQIAPGQTGKIADYNYKLPDDFTGCVIAWNSNNLDSKVGGNYNYLYRLFRKSNLKPFERDISTEIYQAGSTPCNGVEGFNCYFPLQSYGFQPTNGVGYQPYRVVVLSFELLHAPATVCGPKKSTNLVKNKCVNFNFNGLTGTGVLTESNKKFLPFQQFGRDIADTTDAVRDPQTLEILDITPCSFGGVSVITPGTNTSNQVAVLYQDVNCTEVPVAIHADQLTPTWRVYSTGSNVFQTRAGCLIGAEHVNNSYECDIPIGAGICASYQTQTNSPRRARSVASQSIIAYTMSLGAENSVAYSNNSIAIPTNFTISVTTEILPVSMTKTSVDCTMYICGDSTECSNLLLQYGSFCTQLNRALTGIAVEQDKNTQEVFAQVKQIYKTPPIKDFGGFNFSQILPDPSKPSKRSFIEDLLFNKVTLADAGFIKQYGDCLGDIAARDLICAQKFNGLTVLPPLLTDEMIAQYTSALLAGTITSGWTFGAGAALQIPFAMQMAYRFNGIGVTQNVLYENQKLIANQFNSAIGKIQDSLSSTASALGKLQDVVNQNAQALNTLVKCLSSNFGAISSVLNDILSRLDKVEAEVQIDRLITGRLQCLQTYVTQQLIRAAEIRASANLAATKMSECVLGQSKRVDFCGKGYHLMSFPQSAPHGVVFLHVTYVPAQEKNFTTAPAICHDGKAHFPREGVFVSNGTHWFVTQRNFYEPQIITTDNTFVSGNCDVVIGIVNNTVYDPLQPELDSFKEELDKYFKNHTSPDVDLGDISGINASVVNIQKEIDRLNEVAKNLNESLIDLQELGKYEQYIKWPWYIWLGFIAGLIAIVMVTIMLCCMTSCCSCLKGCCSCGSCCKFDEDDSEPVLKGVKLHYT

SEQ ID NO: 951 - protein, 1273 aa, Artificial Sequence
  SARS-CoV-2/Australia/VIC01/2020__EPI_ISL_406844 spike protein (1-1273)(Q965C_S1003C)
MFVFLVLLPLVSSQCVNLTTRTQLPPAYTNSFTRGVYYPDKVFRSSVLHSTQDLFLPFFSNVTWFHAIHVSGTNGTKRFDNPVLPFNDGVYFASTEKSNIIRGWIFGTTLDSKTQSLLIVNNATNVVIKVCEFQFCNDPFLGVYYHKNNKSWMESEFRVYSSANNCTFEYVSQPFLMDLEGKQGNFKNLREFVFKNIDGYFKIYSKHTPINLVRDLPQGFSALEPLVDLPIGINITRFQTLLALHRRYLTPGDSSSGWTAGAAAYYVGYLQPRTFLLKYNENGTITDAVDCALDPLSETKCTLKSFTVEKGIYQTSNFRVQPTESIVRFPNITNLCPFGEVFNATRFASVYAWNRKRISNCVADYSVLYNSASFSTFKCYGVSPTKLNDLCFTNVYADSFVIRGDEVRQIAPGQTGKIADYNYKLPDDFTGCVIAWNSNNLDSKVGGNYNYLYRLFRKSNLKPFERDISTEIYQAGSTPCNGVEGFNCYFPLQSYGFQPTNGVGYQPYRVVVLSFELLHAPATVCGPKKSTNLVKNKCVNFNFNGLTGTGVLTESNKKFLPFQQFGRDIADTTDAVRDPQTLEILDITPCSFGGVSVITPGTNTSNQVAVLYQDVNCTEVPVAIHADQLTPTWRVYSTGSNVFQTRAGCLIGAEHVNNSYECDIPIGAGICASYQTQTNSPRRARSVASQSIIAYTMSLGAENSVAYSNNSIAIPTNFTISVTTEILPVSMTKTSVDCTMYICGDSTECSNLLLQYGSFCTQLNRALTGIAVEQDKNTQEVFAQVKQIYKTPPIKDFGGFNFSQILPDPSKPSKRSFIEDLLFNKVTLADAGFIKQYGDCLGDIAARDLICAQKFNGLTVLPPLLTDEMIAQYTSALLAGTITSGWTFGAGAALQIPFAMQMAYRFNGIGVTQNVLYENQKLIANQFNSAIGKIQDSLSSTASALGKLQDVVNQNAQALNTLVKCLSSNFGAISSVLNDILSRLDKVEAEVQIDRLITGRLQCLQTYVTQQLIRAAEIRASANLAATKMSECVLGQSKRVDFCGKGYHLMSFPQSAPHGVVFLHVTYVPAQEKNFTTAPAICHDGKAHFPREGVFVSNGTHWFVTQRNFYEPQIITTDNTFVSGNCDVVIGIVNNTVYDPLQPELDSFKEELDKYFKNHTSPDVDLGDISGINASVVNIQKEIDRLNEVAKNLNESLIDLQELGKYEQYIKWPWYIWLGFIAGLIAIVMVTIMLCCMTSCCSCLKGCCSCGSCCKFDEDDSEPVLKGVKLHYT

SEQ ID NO: 952 - protein, 1273 aa, Artificial Sequence
  SARS-CoV-2/Germany/BavPat1/2020__EPI_ISL_406862 spike protein (1-1273)(Q965C_S1003C)
MFVFLVLLPLVSSQCVNLTTRTQLPPAYTNSFTRGVYYPDKVFRSSVLHSTQDLFLPFFSNVTWFHAIHVSGTNGTKRFDNPVLPFNDGVYFASTEKSNIIRGWIFGTTLDSKTQSLLIVNNATNVVIKVCEFQFCNDPFLGVYYHKNNKSWMESEFRVYSSANNCTFEYVSQPFLMDLEGKQGNFKNLREFVFKNIDGYFKIYSKHTPINLVRDLPQGFSALEPLVDLPIGINITRFQTLLALHRSYLTPGDSSSGWTAGAAAYYVGYLQPRTFLLKYNENGTITDAVDCALDPLSETKCTLKSFTVEKGIYQTSNFRVQPTESIVRFPNITNLCPFGEVFNATRFASVYAWNRKRISNCVADYSVLYNSASFSTFKCYGVSPTKLNDLCFTNVYADSFVIRGDEVRQIAPGQTGKIADYNYKLPDDFTGCVIAWNSNNLDSKVGGNYNYLYRLFRKSNLKPFERDISTEIYQAGSTPCNGVEGFNCYFPLQSYGFQPTNGVGYQPYRVVVLSFELLHAPATVCGPKKSTNLVKNKCVNFNFNGLTGTGVLTESNKKFLPFQQFGRDIADTTDAVRDPQTLEILDITPCSFGGVSVITPGTNTSNQVAVLYQGVNCTEVPVAIHADQLTPTWRVYSTGSNVFQTRAGCLIGAEHVNNSYECDIPIGAGICASYQTQTNSPRRARSVASQSIIAYTMSLGAENSVAYSNNSIAIPTNFTISVTTEILPVSMTKTSVDCTMYICGDSTECSNLLLQYGSFCTQLNRALTGIAVEQDKNTQEVFAQVKQIYKTPPIKDFGGFNFSQILPDPSKPSKRSFIEDLLFNKVTLADAGFIKQYGDCLGDIAARDLICAQKFNGLTVLPPLLTDEMIAQYTSALLAGTITSGWTFGAGAALQIPFAMQMAYRFNGIGVTQNVLYENQKLIANQFNSAIGKIQDSLSSTASALGKLQDVVNQNAQALNTLVKCLSSNFGAISSVLNDILSRLDKVEAEVQIDRLITGRLQCLQTYVTQQLIRAAEIRASANLAATKMSECVLGQSKRVDFCGKGYHLMSFPQSAPHGVVFLHVTYVPAQEKNFTTAPAICHDGKAHFPREGVFVSNGTHWFVTQRNFYEPQIITTDNTFVSGNCDVVIGIVNNTVYDPLQPELDSFKEELDKYFKNHTSPDVDLGDISGINASVVNIQKEIDRLNEVAKNLNESLIDLQELGKYEQYIKWPWYIWLGFIAGLIAIVMVTIMLCCMTSCCSCLKGCCSCGSCCKFDEDDSEPVLKGVKLHYT

SEQ ID NO: 953 - protein, 1273 aa, Artificial Sequence
  SARS-CoV-2/Wuhan/HBCDC-HB-02/2020__EPI_ISL_412978 spike protein (1-1273)(Q965C_S1003C)
MFVFLVLLPLVSSQCVNLTTRTQLPPAYTNSFTRGVYYPDKVFRSSVLHSTQDLFLPFFSNVTWFHAIHVSGTNGTKRFDNPVLPFNDGVYFASTEKSNIIRGWIFGTTLDSKTQSLLIVNNATNVVIKVCEFQFCNDPFLGVYYHKNNKSWMESEFRVYSSANNCTFEYVSQPFLMDLEGKQGNFKNLREFVFKNIDGYFKIYSKHTPINLVRDLPQGFSALEPLVDLPIGINITRFQTLLALHRSYLTPGDSSSGWTAGAAAYYVGYLQPRTFLLKYNENGTITDAVDCALDPLSETKCTLKSFTVEKGIYQTSNFRVQPTESIVRFPNITNLCPFGEVFNATRFASVYAWNRKRISNCVADYSVLYNSASFSTFKCYGVSPTKLNDLCFTNVYADSFVIRGDEVRQIAPGQTGKIADYNYKLPDDFTGCVIAWNSNNLDSKVGGNYNYLYRLFRKSNLKPFERDISTEIYQAGSTPCNGVEGFNCYFPLQSYGFQPTNGVGYQPYRVVVLSFELLHAPATVCGPKKSTNLVKNKCVNFNFNGLTGTGVLTESNKKFLPFQQFGRDIADTTDAVRDPQTLEILDITPCSFGGVSVITPGTNTSNQVAVLYQDVNCTEVPVAIHADQLTPTWRVYSTGSNVFQTRAGCLIGAEHVNNSYECDIPIGAGICASYQTQTNSPRRARSVASQSIIAYTMSLGAENSVAYSNNSIAIPTNFTISVTTEILPVSMTKTSVDCTMYICGDSTECSNFLLQYGSFCTQLNRALTGIAVEQDKNTQEVFAQVKQIYKTPPIKDFGGFNFSQILPDPSKPSKRSFIEDLLFNKVTLADAGFIKQYGDCLGDIAARDLICAQKFNGLTVLPPLLTDEMIAQYTSALLAGTITSGWTFGAGAALQIPFAMQMAYRFNGIGVTQNVLYENQKLIANQFNSAIGKIQDSLSSTASALGKLQDVVNQNAQALNTLVKCLSSNFGAISSVLNDILSRLDKVEAEVQIDRLITGRLQCLQTYVTQQLIRAAEIRASANLAATKMSECVLGQSKRVDFCGKGYHLMSFPQSAPHGVVFLHVTYVPAQEKNFTTAPAICHDGKAHFPREGVFVSNGTHWFVTQRNFYEPQIITTDNTFVSGNCDVVIGIVNNTVYDPLQPELDSFKEELDKYFKNHTSPDVDLGDISGINASVVNIQKEIDRLNEVAKNLNESLIDLQELGKYEQYIKWPWYIWLGFIAGLIAIVMVTIMLCCMTSCCSCLKGCCSCGSCCKFDEDDSEPVLKGVKLHYT

SEQ ID NO: 954 - protein, 1273 aa, Artificial Sequence
  SARS-CoV-2/Australia/QLD02/2020__EPI_ISL_407896 spike protein (1-1273)(Q965C_S1003C)
MFVFLVLLPLVSSQCVNLTTRTQLPPAYTNSFTRGVYYPDKVFRSSVLHSTQDLFLPFFSNVTWFHAIHVSGTNGTKRFDNPVLPFNDGVYFASTEKSNIIRGWIFGTTLDSKTQSLLIVNNATNVVIKVCEFQFCNDPFLGVYYHKNNKSWMESEFRVYSSANNCTFEYVSQPFLMDLEGKQGNFKNLREFVFKNIDGYFKIYSKHTPINLVRDLPQGFSALEPLVDLPIGINITRFQTLLALHRSYLTPGDSSSGWTAGAAAYYVGYLQPRTFLLKYNENGTITDAVDCALDPLSETKCTLKSFTVEKGIYQTSNFRVQPTESIVRFPNITNLCPFGEVFNATRFASVYAWNRKRISNCVADYSVLYNSASFSTFKCYGVSPTKLNDLCFTNVYADSFVIRGDEVRQIAPGQTGKIADYNYKLPDDFTGCVIAWNSNNLDSKVGGNYNYLYRLFRKSNLKPFERDISTEIYQAGSTPCNGVEGFNCYFPLQSYGFQPTNGVGYQPYRVVVLSFELLHAPATVCGPKKSTNLVKNKCVNFNFNGLTGTGVLTESNKKFLPFQQFGRDIADTTDAVRDPQTLEILDITPCSFGGVSVITPGTNTSNQVAVLYQDVNCTEVPVAIHADQLTPTWRVYSTGSNVFQTRAGCLIGAEHVNNSYECDIPIGAGICASYQTQTNSPRRARSVASQSIIAYTMSLGAENSVAYSNNSIAIPTNFTISVTTEILPVSMTKTSVDCTMYICGDSTECSNLLLQYGSFCTQLNRALTGIAVEQDKNTQEVFAQVKQIYKTPPIKDFGGFNFSQILPDPSKPSKRSFIEDLLFNKVTLADAGFIKQYGDCLGDIAARDLICAQKFNGLTVLPPLLTDEMIAQYTSALLAGTITSGWTFGAGAALQIPFAMQMAYRFNGIGVTQNVLYENQKLIANQFNSAIGKIQDSLSSTASALGKLQDVVNQNAQALNTLVKCLSSNFGAISSVLNDILSRLDKVEAEVQIDRLITGRLQCLQTYVTQQLIRAAEIRASANLAATKMSECVLGQSKRVDFCGKGYHLMSFPQSAPHGVVFLHVTYVPAQEKNFTTAPAICHDGKAHFPREGVFVSNGTHWFVTQRNFYEPQIITTDNTFVSGNCDVVIGIVNNTVYDPLQLELDSFKEELDKYFKNHTSPDVDLGDISGINASVVNIQKEIDRLNEVAKNLNESLIDLQELGKYEQYIKWPWYIWLGFIAGLIAIVMVTIMLCCMTSCCSCLKGCCSCGSCCKFDEDDSEPVLKGVKLHYT

SEQ ID NO: 955 - protein, 1273 aa, Artificial Sequence
  SARS-CoV-2/India/1-31/2020__EPI_ISL_413523 spike protein (1-1273)(Q965C_S1003C)
MFVFLVLLPLVSSQCVNLTTRTQLPPAYTNSFTRGVYYPDKVFRSSVLHSTQDLFLPFFSNVTWFHAIHVSGTNGTKRFDNPVLPFNDGVYFASTEKSNIIRGWIFGTTLDSKTQSLLIVNNATNVVIKVCEFQFCNDPFLGVYYHKNNKSWMESEFRVYSSANNCTFEYVSQPFLMDLEGKQGNFKNLREFVFKNIDGYFKIYSKHTPINLVRDLPQGFSALEPLVDLPIGINITRFQTLLALHRSYLTPGDSSSGWTAGAAAYYVGYLQPRTFLLKYNENGTITDAVDCALDPLSETKCTLKSFTVEKGIYQTSNFRVQPTESIVRFPNITNLCPFGEVFNATRFASVYAWNRKRISNCVADYSVLYNSASFSTFKCYGVSPTKLNDLCFTNVYADSFVIRGDEVRQIAPGQTGKIADYNYKLPDDFTGCVIAWNSNNLDSKVGGNYNYLYRLFRKSNLKPFERDISTEIYQAGSTPCNGVEGFNCYFPLQSYGFQPTNGVGYQPYRVVVLSFELLHAPATVCGPKKSTNLVKNKCVNFNFNGLTGTGVLTESNKKFLPFQQFGRDIADTTDAVRDPQTLEILDITPCSFGGVSVITPGTNTSNQVAVLYQDVNCTEVPVAIHADQLTPTWRVYSTGSNVFQTRAGCLIGAEHVNNSYECDIPIGAGICASYQTQTNSPRRARSVASQSIIAYTMSLGAENSVAYSNNSIAIPTNFTISVTTEILPVSMTKTSVDCTMYICGDSTECSNLLLQYGSFCTQLNRALTGIAVEQDKNTQEVFAQVKQIYKTPPIKDFGGFNFSQILPDPSKPSKRSFIEDLLFNKVTLADAGFIKQYGDCLGDIAARDLICAQKFNGLTVLPPLLTDEMIAQYTSALLAGTITSGWTFGAGAALQIPFAMQMAYRFNGIGVTQNVLYENQKLIANQFNSVIGKIQDSLSSTASALGKLQDVVNQNAQALNTLVKCLSSNFGAISSVLNDILSRLDKVEAEVQIDRLITGRLQCLQTYVTQQLIRAAEIRASANLAATKMSECVLGQSKRVDFCGKGYHLMSFPQSAPHGVVFLHVTYVPAQEKNFTTAPAICHDGKAHFPREGVFVSNGTHWFVTQRNFYEPQIITTDNTFVSGNCDVVIGIVNNTVYDPLQPELDSFKEELDKYFKNHTSPDVDLGDISGINASVVNIQKEIDRLNEVAKNLNESLIDLQELGKYEQYIKWPWYIWLGFIAGLIAIVMVTIMLCCMTSCCSCLKGCCSCGSCCKFDEDDSEPVLKGVKLHYT

SEQ ID NO: 956 - protein, 1273 aa, Artificial Sequence
  SARS-CoV-2/Guangdong/GD2020087-P0008/2020__EPI_ISL_413863 spike protein (1-1273)(Q965C_S1003C)
MFVFLVLLPLVSSQCVNLTTRTQLPPAYTNSFTRGVYYPDKVFRSSVLHSTQDLFLPFFSNVTWFHAIHVSGTNGTKRFDNPVLPFNDGVYFASTEKSNIIRGWIFGTTLDSKTQSLLIVNNATNVVIKVCEFQFCNDPFLGVYYHKNNKSWMESEFRVYSSANNCTFEYVSQPFLMDLEGKQGNFKNLREFVFKNIDGYFKIYSKHTPINLVRDLPQGFSALEPLVDLPIGINITRFQTLLALHRSYLTPGDSSSGWTAGAAAYYVGYLQPRTFLLKYNENGTITDAVDCALDPLSETKCTLKSFTVEKGIYQTSNFRVQPTESIVRFPNITNLCPFGEVFNATRFASVYAWNRKRISNCVADYSVLYNSASFSTFKCYGVSPTKLNDLCFTNVYADSFVIRGDEVREIAPGQTGKIADYNYKLPDDFTGCVIAWNSNNLDSKVGGNYNYLYRLFRKSNLKPFERDISTEIYQAGSTPCNGVEGFNCYFPLQSYGFQPTNGVGYQPYRVVVLSFELLHAPATVCGPKKSTNLVKNKCVNFNFNGLTGTGVLTESNKKFLPFQQFGRDIADTTDAVRDPQTLEILDITPCSFGGVSVITPGTNTSNQVAVLYQDVNCTEVPVAIHADQLTPTWRVYSTGSNVFQTRAGCLIGAEHVNNSYECDIPIGAGICASYQTQTNSPRRARSVASQSIIAYTMSLGAENSVAYSNNSIAIPTNFTISVTTEILPVSMTKTSVDCTMYICGDSTECSNLLLQYGSFCTQLNRALTGIAVEQDKNTQEVFAQVKQIYKTPPIKDFGGFNFSQILPDPSKPSKRSFIEDLLFNKVTLADAGFIKQYGDCLGDIAARDLICAQKFNGLTVLPPLLTDEMIAQYTSALLAGTITSGWTFGAGAALQIPFAMQMAYRFNGIGVTQNVLYENQKLIANQFNSAIGKIQDSLSSTASALGKLQDVVNQNAQALNTLVKCLSSNFGAISSVLNDILSRLDKVEAEVQIDRLITGRLQCLQTYVTQQLIRAAEIRASANLAATKMSECVLGQSKRVDFCGKGYHLMSFPQSAPHGVVFLHVTYVPAQEKNFTTAPAICHDGKAHFPREGVFVSNGTHWFVTQRNFYEPQIITTDNTFVSGNCDVVIGIVNNTVYDPLQPELDSFKEELDKYFKNHTSPDVDLGDISGINASVVNIQKEIDRLNEVAKNLNESLIDLQELGKYEQYIKWPWYIWLGFIAGLIAIVMVTIMLCCMTSCCSCLKGCCSCGSCCKFDEDDSEPVLKGVKLHYT

SEQ ID NO: 957 - protein, 1273 aa, Artificial Sequence
  SARS-CoV-2/Sweden/01/2020__EPI_ISL_411951 spike protein (1-1273)(Q965C_S1003C)
MFVFLVLLPLVSSQCVNLTTRTQLPPAYTNSFTRGVYYPDKVFRSSVLHSTQDLFLPFFSNVTWFHAIHVSGTNGTKRFDNPVLPFNDGVYFASTEKSNIIRGWIFGTTLDSKTQSLLIVNNATNVVIKVCEFQFCNDPFLGVYYHKNNKSWMESEFRVYSSANNCTFEYVSQPFLMDLEGKQGNFKNLREFVFKNIDGYFKIYSKHTPINLVRDLPQGFSALEPLVDLPIGINITRFQTLLALHRSYLTPGDSSSGWTAGAAAYYVGYLQPRTFLLKYNENGTITDAVDCALDPLSETKCTLKSFTVEKGIYQTSNFRVQPTESIVRFPNITNLCPFGEVFNATRFASVYAWNRKRISNCVADYSVLYNSASFSTFKCYGVSPTKLNDLCFTNVYADSFVIRGDEVRQIAPGQTGKIADYNYKLPDDFTGCVIAWNSNNLDSKVGGNYNYLYRLFRKSNLKPFERDISTEIYQAGSTPCNGVEGFNCYFPLQSYGFQPTNGVGYQPYRVVVLSFELLHAPATVCGPKKSTNLVKNKCVNFNFNGLTGTGVLTESNKKFLPFQQFGRDIADTTDAVRDPQTLEILDITPCSFGGVSVITPGTNTSNQVAVLYQDVNCTEVPVAIHADQLTPTWRVYSTGSNVFQTRAGCLIGAEHVNNSYECDIPIGAGICASYQTQTNSPRRARSVASQSIIAYTMSLGAENSVAYSNNSIAIPTNFTISVTTEILPVSMTKTSVDCTMYICGDSTECSNLLLQYGSFCTQLNRALTGIAVEQDKNTQEVFAQVKQIYKTPPIKDCGGFNFSQILPDPSKPSKRSFIEDLLFNKVTLADAGFIKQYGDCLGDIAARDLICAQKFNGLTVLPPLLTDEMIAQYTSALLAGTITSGWTFGAGAALQIPFAMQMAYRFNGIGVTQNVLYENQKLIANQFNSAIGKIQDSLSSTASALGKLQDVVNQNAQALNTLVKCLSSNFGAISSVLNDILSRLDKVEAEVQIDRLITGRLQCLQTYVTQQLIRAAEIRASANLAATKMSECVLGQSKRVDFCGKGYHLMSFPQSAPHGVVFLHVTYVPAQEKNFTTAPAICHDGKAHFPREGVFVSNGTHWFVTQRNFYEPQIITTDNTFVSGNCDVVIGIVNNTVYDPLQPELDSFKEELDKYFKNHTSPDVDLGDISGINASVVNIQKEIDRLNEVAKNLNESLIDLQELGKYEQYIKWPWYIWLGFIAGLIAIVMVTIMLCCMTSCCSCLKGCCSCGSCCKFDEDDSEPVLKGVKLHYT

SEQ ID NO: 958 - protein, 1273 aa, Artificial Sequence
  SARS-CoV-2/Tianmen/HBCDC-HB-07/2020__EPI_ISL_412983 spike protein (1-1273)(Q965C_S1003C)
MFVFLVLLPLVSSQCVNLTTRTQLPPAYTNSFTRGVYYPDKVFRSSVLHSTQDLFLPFFSNVTWFHAIHVSGTNGTKRFDNPVLPFNDGVYFASTEKSNIIRGWIFGTTLDSKTQSLLIVNNATNVVIKVCEFQFCNDPFLGVYYHKNNKSWMESEFRVYSSANNCTFEYVSQPFLMDLEGKQGNFKNLREFVFKNIDGYFKIYSKHTPINLVRDLPQGFSALEPLVDLPIGINITRFQTLLALHRSYLTPGDSSSGWTAGAAAYYVGYLQPRTFLLKYNENGTITDAVDCALDPLSETKCTLKSFTVEKGIYQTSNFRVQPTESIVRFPNITNLCPFGEVFNATRFASVYAWNRKRISNCVADYSVLYNSASFSTFKCYGVSPTKLNDLCFTNVYADSFVIRGDEVRQIAPGQTGKIADYNYKLPDDFTGCVIAWNSNNLDSKVGGNYNYLYRLFRKSNLKPFERDISTEIYQAGSTPCNGVEGFNCYFPLQSYGFQPTNGVGYQPYRVVVLSFELLHAPATVCGPKKSTNLVKNKCVNFNFNGLTGTGVLTESNKKFLPFQQFGRDIADTTDAVRDPQTLEILDITPCSFGGVSVITPGTNTSNQVAVLYQDLNCTEVPVAIHADQLTPTWRVYSTGSNVFQTRAGCLIGAEHVNNSYECDIPIGAGICASYQTQTNSPRRARSVASQSIIAYTMSLGAENSVAYSNNSIAIPTNFTISVTTEILPVSMTKTSVDCTMYICGDSTECSNLLLQYGSFCTQLNRALTGIAVEQDKNTQEVFAQVKQIYKTPPIKDFGGFNFSQILPDPSKPSKRSFIEDLLFNKVTLADAGFIKQYGDCLGDIAARDLICAQKFNGLTVLPPLLTDEMIAQYTSALLAGTITSGWTFGAGAALQIPFAMQMAYRFNGIGVTQNVLYENQKLIANQFNSAIGKIQDSLSSTASALGKLQDVVNQNAQALNTLVKCLSSNFGAISSVLNDILSRLDKVEAEVQIDRLITGRLQCLQTYVTQQLIRAAEIRASANLAATKMSECVLGQSKRVDFCGKGYHLMSFPQSAPHGVVFLHVTYVPAQEKNFTTAPAICHDGKAHFPREGVFVSNGTHWFVTQRNFYEPQIITTDNTFVSGNCDVVIGIVNNTVYDPLQPELDSFKEELDKYFKNHTSPDVDLGDISGINASVVNIQKEIDRLNEVAKNLNESLIDLQELGKYEQYIKWPWYIWLGFIAGLIAIVMVTIMLCCMTSCCSCLKGCCSCGSCCKFDEDDSEPVLKGVKLHYT

SEQ ID NO: 959 - protein, 1273 aa, Artificial Sequence
  SARS-CoV-2/Hong Kong/case42_VM20002493/2020__EPI_ISL_414527 spike protein (1-1273)(Q965C_S1003C)
MFVFLVLLPLVSSQCVNLTTRTQLPPAYTNSFTRGVYYPDKVFRSSVLHSTQDLFLPFFSNVTWFHAIHVSGTNGTKRFDNPVLPFNDGVYFASTEKSNIIRGWIFGTTLDSKTQSLLIVNNATNVVIKVCEFQFCNDPFLGVYYHKNNKSWMESEFRVYSSANNCTFEYVSQPFLMDLEGKQGNFKNLREFVFKNIDGYFKIYSKHTPINLVRDLPQGFSALEPLVDLPIGINITRFQTLLALHRSYLTPGDSSSGWTAGAAAYYVGYLQPRTFLLKYNENGTITDAVDCALDPLSETKCTLKSFTVEKGIYQTSNFRVQPTESIVRFPNITNLCPFGEVFNATRFASVYAWNRKRISNCVADYSVLYNSASFSTFKCYGVSPTKLNDLCFTNVYADSFVIRGDEVRQIAPGQTGKIADYNYKLPDDFTGCVIAWNSNNLDSKVGGNYNYLYRLFRKSNLKPFERDISTEIYQAGSTPCNGVEGFNCYFPLQSYGFQPTNGVGYQPYRVVVLSFELLHAPATVCGPKKSTNLVKNKCVNFNFNGLTGTGVLTESNKKFLPFQQFGRDIADTTDAVRDPQTLEILDITPCSFGGVSVITPGTNTSNQVAVLYQDVNCTEVPVAIHADQLTPTWRVYSTGSNVFQTRAGCLIGAEHVNNSYECDIPIGAGICASYQTQTNSPRRARSVASQSIIAYTMSLGAENSVAYSNNSIAIPTNFAISVTTEILPVSMTKTSVDCTMYICGDSTECSNLLLQYGSFCTQLNRALTGIAVEQDKNTQEVFAQVKQIYKTPPIKDFGGFNFSQILPDPSKPSKRSFIEDLLFNKVTLADAGFIKQYGDCLGDIAARDLICAQKFNGLTVLPPLLTDEMIAQYTSALLAGTITSGWTFGAGAALQIPFAMQMAYRFNGIGVTQNVLYENQKLIANQFNSAIGKIQDSLSSTASALGKLQDVVNQNAQALNTLVKCLSSNFGAISSVLNDILSRLDKVEAEVQIDRLITGRLQCLQTYVTQQLIRAAEIRASANLAATKMSECVLGQSKRVDFCGKGYHLMSFPQSAPHGVVFLHVTYVPAQEKNFTTAPAICHDGKAHFPREGVFVSNGTHWFVTQRNFYEPQIITTDNTFVSGNCDVVIGIVNNTVYDPLQPELDSFKEELDKYFKNHTSPDVDLGDISGINASVVNIQKEIDRLNEVAKNLNESLIDLQELGKYEQYIKWPWYIWLGFIAGLIAIVMVTIMLCCMTSCCSCLKGCCSCGSCCKFDEDDSEPVLKGVKLHYT

SEQ ID NO: 960 - protein, 1273 aa, Artificial Sequence
  SARS-CoV-2/USA/CruiseA-23/2020__EPI_ISL_414482 spike protein (1-1273)(Q965C_S1003C)
MFVFLVLLPLVSSQCVNLTTRTQLPPAYTNSFTRGVYYPDKVFRSSVLHSTQDLFLPFFSNVTWFHAIHVSGTNGTKRFDNPVLPFNDGVYFASTEKSNIIRGWIFGTTLDSKTQSLLIVNNATNVVIKVCEFQFCNDPFLGVYYHKNNKSWMESEFRVYSSANNCTFEYVSQPFLMDLEVKQGNFKNLREFVFKNIDGYFKIYSKHTPINLVRDLPQGFSALEPLVDLPIGINITRFQTLLALHRSYLTPGDSSSGWTAGAAAYYVGYLQPRTFLLKYNENGTITDAVDCALDPLSETKCTLKSFTVEKGIYQTSNFRVQPTESIVRFPNITNLCPFGEVFNATRFASVYAWNRKRISNCVADYSVLYNSASFSTFKCYGVSPTKLNDLCFTNVYADSFVIRGDEVRQIAPGQTGKIADYNYKLPDDFTGCVIAWNSNNLDSKVGGNYNYLYRLFRKSNLKPFERDISTEIYQAGSTPCNGVEGFNCYFPLQSYGFQPTNGVGYQPYRVVVLSFELLHAPATVCGPKKSTNLVKNKCVNFNFNGLTGTGVLTESNKKFLPFQQFGRDIADTTDAVRDPQTLEILDITPCSFGGVSVITPGTNTSNQVAVLYQDVNCTEVPVAIHADQLTPTWRVYSTGSNVFQTRAGCLIGAEHVNNSYECDIPIGAGICASYQTQTNSPRRARSVASQSIIAYTMSLGAENSVAYSNNSIAIPTNFTISVTTEILPVSMTKTSVDCTMYICGDSTECSNLLLQYGSFCTQLNRALTGIAVEQDKNTQEVFAQVKQIYKTPPIKDFGGFNFSQILPDPSKPSKRSFIEDLLFNKVTLADAGFIKQYGDCLGDIAARDLICAQKFNGLTVLPPLLTDEMIAQYTSALLAGTITSGWTFGAGAALQIPFAMQMAYRFNGIGVTQNVLYENQKLIANQFNSAIGKIQDSLSSTASALGKLQDVVNQNAQALNTLVKCLSSNFGAISSVLNDILSRLDKVEAEVQIDRLITGRLQCLQTYVTQQLIRAAEIRASANLAATKMSECVLGQSKRVDFCGKGYHLMSFPQSAPHGVVFLHVTYVPAQEKNFTTAPAICHDGKAHFPREGVFVSNGTHWFVTQRNFYEPQIITTDNTFVSGNCDVVIGIVNNTVYDPLQPELDSFKEELDKYFKNHTSPDVDLGDISGINASVVNIQKEIDRLNEVAKNLNESLIDLQELGKYEQYIKWPWYIWLGFIAGLIAIVMVTIMLCCMTSCCSCLKGCCSCGSCCKFDEDDSEPVLKGVKLHYT

SEQ ID NO: 961 - protein, 1273 aa, Artificial Sequence
  SARS-CoV-2/Hong Kong/case85_VM20002868/2020__EPI_ISL_414519 spike protein (1-1273)(Q965C_S1003C)
MFVFLVLVPLVSSQCVNLTTRTQLPPAYTNSFTRGVYYPDKVFRSSVLHSTQDLFLPFFSNVTWFHAIHVSGTNGTKRFDNPVLPFNDGVYFASTEKSNIIRGWIFGTTLDSKTQSLLIVNNATNVVIKVCEFQFCNDPFLGVYYHKNNKSWMESEFRVYSSANNCTFEYVSQPFLMDLEGKQGNFKNLREFVFKNIDGYFKIYSKHTPINLVRDLPQGFSALEPLVDLPIGINITRFQTLLALHRSYLTPGDSSSGWTAGAAAYYVGYLQPRTFLLKYNENGTITDAVDCALDPLSETKCTLKSFTVEKGIYQTSNFRVQPTESIVRFPNITNLCPFGEVFNATRFASVYAWNRKRISNCVADYSVLYNSASFSTFKCYGVSPTKLNDLCFTNVYADSFVIRGDEVRQIAPGQTGKIADYNYKLPDDFTGCVIAWNSNNLDSKVGGNYNYLYRLFRKSNLKPFERDISTEIYQAGSTPCNGVEGFNCYFPLQSYGFQPTNGVGYQPYRVVVLSFELLHAPATVCGPKKSTNLVKNKCVNFNFNGLTGTGVLTESNKKFLPFQQFGRDIADTTDAVRDPQTLEILDITPCSFGGVSVITPGTNTSNQVAVLYQDVNCTEVPVAIHADQLTPTWRVYSTGSNVFQTRAGCLIGAEHVNNSYECDIPIGAGICASYQTQTNSPRRARSVASQSIIAYTMSLGAENSVAYSNNSIAIPTNFTISVTTEILPVSMTKTSVDCTMYICGDSTECSNLLLQYGSFCTQLNRALTGIAVEQDKNTQEVFAQVKQIYKTPPIKDFGGFNFSQILPDPSKPSKRSFIEDLLFNKVTLADAGFIKQYGDCLGDIAARDLICAQKFNGLTVLPPLLTDEMIAQYTSALLAGTITSGWTFGAGAALQIPFAMQMAYRFNGIGVTQNVLYENQKLIANQFNSAIGKIQDSLSSTASALGKLQDVVNQNAQALNTLVKCLSSNFGAISSVLNDILSRLDKVEAEVQIDRLITGRLQCLQTYVTQQLIRAAEIRASANLAATKMSECVLGQSKRVDFCGKGYHLMSFPQSAPHGVVFLHVTYVPAQEKNFTTAPAICHDGKAHFPREGVFVSNGTHWFVTQRNFYEPQIITTDNTFVSGNCDVVIGIVNNTVYDPLQPELDSFKEELDKYFKNHTSPDVDLGDISGINASVVNIQKEIDRLNEVAKNLNESLIDLQELGKYEQYIKWPWYIWLGFIAGLIAIVMVTIMLCCMTSCCSCLKGCCSCGSCCKFDEDDSEPVLKGVKLHYT

SEQ ID NO: 962 - protein, 1273 aa, Artificial Sequence
  SARS-CoV-2/England/200990660/2020__EPI_ISL_414523 spike protein (1-1273)(Q965C_S1003C)
MFVFLVLLPLVSSQCVNLTTRTQLPPAYTNSFTRGVYYPDKVFRSSVLHSTQDLFLPFFSNVTWFHAIHVSGTNGTKRFDNPVLPFNDGVYFASTEKSNIIRGWIFGTTLDSKTQSLLIVNNATNVVIKVCEFQFCNDPFLGVYYHKNNKSWMESEFRVYSSANNCTFEYVSQPFLMDLEGKQGNFKNLREFVFKNIDGYFKIYSKHTPINLVRDLPQGFSALEPLVDLPIGINITRFQTLLALHRSYLTPGDSSSGWTAGAAAYYVGYLQPRTFLLKYNENGTITDAVDCALDPLSETKCTLKSFTVEKGIYQTSNFRVQPTESIVRFPNITNLCPFGEVFNATRFASVYAWNRKRISNCVADYSVLYNSASFSTFKCYGVSPTKLNDLCFTNVYADSFVIRGDEVRQIAPGQTGKIADYNYKLPDDFTGCVIAWNSNNLDSKVGGNYNYLYRLFRKSNLKPFERDISTEIYQAGSTPCNGVEGFNCYFPLQSYGFQPTNGVGYQPYRVVVLSFELLHAPATVCGPKKSTNLVKNKCVNFNFNGLTGTGVLTESNKKFLPFQQFGRDIADTTDAVRDPQTLEILDITPCSFGGVSVITPGTNTSNQVAVLYQGVNCTEVPVAIHADQLTPTWRVYSTGSNVFQTRAGCLIGAEHVNNSYECDIPIGAGICASYQTQTNSPRRARSVASQSIIAYTMSLGAENSVAYSNNSIAIPTNFTISVTTEILPVSMTKTSVDCTMYICGDSTECSNLLLQYGSFCTQLNRALTGIAVEQDKNTQEVFAQVKQIYKTPPIKDFGGFNFSQILPDPSKPSKRSFIEDLLFNKVTLADAGFIKQYGDCLGDIAARDLICAQKFNGLTVLPPLLTDEMIAQYTSALLAGTITSGWTFGAGAALQIPFAMQMAYRFNGIGVTQNVLYENQKLIANQFNSAIGKIQDSLSSTASALGKLQDVVNQNAQALNTLVKCLSSNFGAISSVLNDILSRLDKVEAEVQIDRLITGRLQCLQTYVTQQLIRAAEIRASANLAATKMSECVLGQSKRVDFCGKGYHLMSFPQSAPHGVVFLHVTYVPAQEKNFTTAPAICHDGKAHFPREGVFVSNGTHWFVTQRNFYEPQIITTDNTFVSGNCDVVIGIVNNTVYDPLQPELDSFKEELDKYFKNHTSPDVDLGDISGINASVVNIQKEIDRLNEVAKNLNESLIDLQELGKYEQYIKWPWYIWLGFIAGLIAIVMVTIMLCCMTSCCSCLKGCCSCGSCCKFDEDDSELVLKGVKLHYT

SEQ ID NO: 963 - protein, 1273 aa, Artificial Sequence
  SARS-CoV-2/Australia/NSW09/2020__EPI_ISL_413595 spike protein (1-1273)(Q965C_S1003C)
MFVFLVLLPLVSSQCVNLTTRTQLPPAYTNSFTRGVYYPDKVFRSSVLHSTQDLFLPFFSNVTWFHAIHVSGTNGTKRFDNPVLPFNDGVYFASTEKSNIIRGWIFGTTLDSKTQSLLIVNNATNVVIKVCEFQFCNDPFLGVYYHKNNKSWMESEFRVYSSANNCTFEYVSQPFLMDLEGKQGNFKNLREFVFKNIDGYFKIYSKHTPINLVRDLPQGFSALEPLVDLPIGINITRFQTLLALHRSYLTPGDSSSGWTAGAAAYYVGYLQPRTFLLKYNENGTITDAVDCALDPLSETKCTLKSFTVEKGIYQTSNFRVQPTESIVRFPNITNLCPFGEVFNATRFASVYAWNRKRISNCVADYSVLYNSASFSTFKCYGVSPTKLNDLCFTNVYADSFVIRGDEVRQIAPGQTGKIADYNYKLPDDFTGCVIAWNSNNLDSKVGGNYNYLYRLFRKSNLKPFERDISTEIYQAGSTPCNGVEGFNCYFPLQSYGFQPTNGVGYQPYRVVVLSFELLHAPATVCGPKKSTNLVKNKCVNFNFNGLTGTGVLTESNKKFLPFQQFGRDIADTTDAVRDPQTLEILDITPCSFGGVSVITPGTNTSNQVAVLYQDVNCTEVPVAIHADQLTPTWRVYSTGSNVFQTRAGCLIGAEHVNNSYECDIPIGAGICASYQTQTNSPRRARSVASQSIIAYTMSLGAENSVAYSNNSIAIPTNFTISVTTEILPVSMTKTSVDCTMYICGDSTECSNLLLQYGSFCTQLNRALTGIAVEQDKNTQEVFAQVKQIYKTPPIKDFGGFNFSQILPDPSKPSKRSFIEDLLFNKVTLADAGFIKQYGDCLGDIAARDLICAQKFNGLTVLPPLLTDEMIAQYTSALLAGTITSGWTFGAGAALQIPFAMQMAYRFNGIGVTQNVLYENQKLIANQFNSAIGKIQDSLSFTASALGKLQDVVNQNAQALNTLVKCLSSNFGAISSVLNDILSRLDKVEAEVQIDRLITGRLQCLQTYVTQQLIRAAEIRASANLAATKMSECVLGQSKRVDFCGKGYHLMSFPQSAPHGVVFLHVTYVPAQEKNFTTAPAICHDGKAHFPREGVFVSNGTHWFVTQRNFYEPQIITTDNTFVSGNCDVVIGIVNNTVYDPLQPELDSFKEELDKYFKNHTSPDVDLGDISGINASVVNIQKEIDRLNEVAKNLNESLIDLQELGKYEQYIKWPWYIWLGFIAGLIAIVMVTIMLCCMTSCCSCLKGCCSCGSCCKFDEDDSEPVLKGVKLHYT

SEQ ID NO: 964 - protein, 1273 aa, Artificial Sequence
  SARS-CoV-2/Australia/NSW10/2020__EPI_ISL_413596 spike protein (1-1273)(Q965C_S1003C)
MFVFLVLLPLVSSQCVNLTTRTQLPPAYTNSFTRGVYYPDKVFRSSVLHSTQDLFLPFFSNVTWFHAIHVSGTNGTKRFDNPVLPFNDGVYFASTEKSNIIRGWIFGTTLDSKTQSLLIVNNATNVVIKVCEFQFCNDPFLGVYYHKNNKSWMESEFRVYSSANNCTFEYVSQPFLMDLEGKQGNFKNLREFVFKNIDGYFKIYSKHTPINLVRDLPQGFSALEPLVDLPIGINITRFQTLLALHRSYLTPGDSSSGWTAGAAAYYVGYLQPRTFLLKYNENGTITDAVDCALDPLSETKCTLKSFTVEKGIYQTSNFRVQPTESIVRFPNITNLCPFGEVFNATRFASVYAWNRKRISNCVADYSVLYNSASFSTFKCYGVSPTKLNDLCFTNVYADSFVIRGDEVRQIAPGQTGKIADYNYKLPDDFTGCVIAWNSNNLDSKVGGNYNYLYRLFRKSNLKPFERDISTEIYQAGSTPCNGVEGFNCYFPLQSYGFQPTNGVGYQPYRVVVLSFELLHAPATVCGPKKSTNLVKNKCVNFNFNGLTGTGVLTESNKKFLPFQQFGRDIADTTDAVRDPQTLEILDITPCSFGGVSVITPGTNTSNQVAVLYQDVNCTEVPVAIHADQLTPTWRVYSTGSNVFQTRAGCLIGAEHVNNSYECDIPIGAGICASYQTQTNSPRRARSVASQSIIAYTMSLGAENSVAYSNNSIAIPTNFTISVTTEILPVSMTKTSVDCTMYICGDSTECSNLLLQYGSFCTQLNRALTGIAVEQDKNTQEVFAQVKQIYKTPPIKDFGGFNFSQILPDPSKPSKRSFIEDLLFNKVTLADAGFIKQYGDCLGDIAARDLICAQKFNGLTVLPPLLTDEMIAQYTSALLAGTITSGWTFGAGAALQIPFAMQMAYRFNGIGVTQNVLYENQKLIANQFNSAIGKIQDSLSSTASALGKLQDVVNQNAQALNTLVKCLSSNFGAISSVLNDILSRLDKVEAEVQIDRLITGRLQCLQTYVTQQLIRAAEIRASANLAATKMSECVLGQSKRVDFCGKGYHLMSFPQSAPHGVVFLHVTYVPAQEKNFTTAPAICHDGKAHFPREGVFVSNGTHWFVTQRNFYEPQIITTDNTFVSGNCDVVIGIVNNTVYDPLQPELDSFKEELDKYFKNHTSPDVDLGDISGINASVVNIQKEIDRLNEVAKNLNESLIDLQELGKYEQYIKWPWYIWLGFIAGLIAIVMVTIMLCCMTSCCSCLKGCCSCGSCFKFDEDDSEPVLKGVKLHYT

SEQ ID NO: 965 - protein, 1273 aa, Artificial Sequence
  SARS-CoV-2/Switzerland/1000477797/2020__EPI_ISL_413023 spike protein (1-1273)(Q965C_S1003C)
MFVFLVLLPLVSSQCVNLTTRTQLPPAYTNSFTRGVYYPDKVFRSSVLHSTQDLFLPFFSNVTWFHAIHVSGTNGTKRFDNPVLPFNDGVYFASTEKSNIIRGWIFGTTLDSKTQSLLIVNNATNVVIKVCEFQFCNDPFLGVYYHKNNKSWMESEFRVYSSANNCTFEYVSQPFLMDLEGKQGNFKNLREFVFKNIDGYFNIYSKHTPINLVRDLPQGFSALEPLVDLPIGINITRFQTLLALHRSYLTPGDSSSGWTAGAAAYYVGYLQPRTFLLKYNENGTITDAVDCALDPLSETKCTLKSFTVEKGIYQTSNFRVQPTESIVRFPNITNLCPFGEVFNATRFASVYAWNRKRISNCVADYSVLYNSASFSTFKCYGVSPTKLNDLCFTNVYADSFVIRGDEVRQIAPGQTGKIADYNYKLPDDFTGCVIAWNSNNLDSKVGGNYNYLYRLFRKSNLKPFERDISTEIYQAGSTPCNGVEGFNCYFPLQSYGFQPTNGVGYQPYRVVVLSFELLHAPATVCGPKKSTNLVKNKCVNFNFNGLTGTGVLTESNKKFLPFQQFGRDIADTTDAVRDPQTLEILDITPCSFGGVSVITPGTNTSNQVAVLYQGVNCTEVPVAIHADQLTPTWRVYSTGSNVFQTRAGCLIGAEHVNNSYECDIPIGAGICASYQTQTNSPRRARSVASQSIIAYTMSLGAENSVAYSNNSIAIPTNFTISVTTEILPVSMTKTSVDCTMYICGDSTECSNLLLQYGSFCTQLNRALTGIAVEQDKNTQEVFAQVKQIYKTPPIKDFGGFNFSQILPDPSKPSKRSFIEDLLFNKVTLADAGFIKQYGDCLGDIAARDLICAQKFNGLTVLPPLLTDEMIAQYTSALLAGTITSGWTFGAGAALQIPFAMQMAYRFNGIGVTQNVLYENQKLIANQFNSAIGKIQDSLSSTASALGKLQDVVNQNAQALNTLVKCLSSNFGAISSVLNDILSRLDKVEAEVQIDRLITGRLQCLQTYVTQQLIRAAEIRASANLAATKMSECVLGQSKRVDFCGKGYHLMSFPQSAPHGVVFLHVTYVPAQEKNFTTAPAICHDGKAHFPREGVFVSNGTHWFVTQRNFYEPQIITTDNTFVSGNCDVVIGIVNNTVYDPLQPELDSFKEELDKYFKNHTSPDVDLGDISGINASVVNIQKEIDRLNEVAKNLNESLIDLQELGKYEQYIKWPWYIWLGFIAGLIAIVMVTIMLCCMTSCCSCLKGCCSCGSCCKFDEDDSEPVLKGVKLHYT

SEQ ID NO: 966 - protein, 1273 aa, Artificial Sequence
  SARS-CoV-2/Belgium/BA-02291/2020__EPI_ISL_415159 spike protein (1-1273)(Q965C_S1003C)
MFVFLVLLPLVSSQCVNLTTRTQLPPAYTNSFTRGVYYPDKVFRSSVLHSTQDLFLPFFSNVTWFHAIHVSGTNGTKRFDNPVLPFNDGVYFASTEKSNIIRGWIFGTTLDSKTQSLLIVNNATNVVIKVCEFQFCNDPFLGVYYHKNNKSWMESEFRVYSSANNCTFEYVSQPFLMDLEGKQGNFKNLREFVFKNIDGYFKIYSKHTPINLVRDLPQGFSALEPLVDLPIGINITRFQTLLALHRSYLTPGDSSSGWTAGAAAYYVGYLQPRTFLLKYNENGTITDAVDCALDPLSETKCTLKSFTVEKGIYQTSNFRVQPTESIVRFPNITNLCPFGEVFNATRFASVYAWNRKRISNCVADYSVLYNSASFSTFKCYGVSPTKLNDLCFTNVYADSFVIRGDEVRQIAPGQTGKIADYNYKLPDDFTGCVIAWNSNNLDSKVGGNYNYLYRLFRRSNLKPFERDISTEIYQAGSTPCNGVEGFNCYFPLQSYGFQPTNGVGYQPYRVVVLSFELLPAPATVCGPKKSTNLVKNKCVNFNFNGLTGTGVLTESNKKFLPFQQFGRDIADTTDAVRDPQTLEILDITPCSFGGVSVITPGTNTSNQVAVLYQGVNCTEVPVAIHADQLTPTWRVYSTGSNVFQTRAGCLIGAEHVNNSYECDIPIGAGICASYQTQTNSPRRARSVASQSIIAYTMSLGAENSVAYSNNSIAIPTNFTISVTTEILPVSMTKTSVDCTMYICGDSTECSNLLLQYGSFCTQLNRALTGIAVEQDKNTQEVFAQVKQIYKTPPIKDFGGFNFSQILPDPSKPSKRSFIEDLLFNKVTLADAGFIKQYGDCLGDIAARDLICAQKFNGLTVLPPLLTDEMIAQYTSALLAGTITSGWTFGAGAALQIPFAMQMAYRFNGIGVTQNVLYENQKLIANQFNSAIGKIQDSLSSAAPALGKLQDVVNQNAQALNTLVKCLSSNFGAISSVLNDILSRLDKVEAEVQIDRLITGRLQCLQTYVTQQLIRAAEIRASANLAATKMSECVLGQSKRVDFCGKGYHLMSFPQSAPHGVVFLHVTYVPAQEKNFTTAPAICHDGKAHFPREGVFVSNGTHWFVTQRNFYEPQIITTDNTFVSGNCDVVIGIVNNTVYDPLQPELDSFKEELDKYFKNHTSPDVDLGDISGINASVVNIQKEIDRLNEVAKNLNESLIDLQELGKYEQYIKWPWYIWLGFIAGLIAIVMVTIMLCCMTSCCSCLKGCCSCGSCCKFDEDDSEPVLKGVKLHYT

SEQ ID NO: 967 - protein, 1273 aa, Artificial Sequence
  SARS-CoV-2/USA/WA8-UW5/2020__EPI_ISL_413486 spike protein (1-1273)(Q965C_S1003C)
MFVFLVLLPLVSSQCVNLTTRTQLPPAYTNSFTRGVYYPDKVFRSSVLHSTQDLFLPFFSNVTWFHAIHVSGTNGTKRFDNPVLPFNDGVYFASTEKSNIIRGWIFGTTLDSKTQSLLIVNNATNVVIKVCEFQFCNDPFLGVYYHKNNKSWMESEFRVYSSANNCTFEYVSQPFLMDLEGKQGNFKNLREFVFKNIDGYFKIYSKHTPINLVRDLPQGFSALEPLVDLPIGINITRFQTLLALHRSYLTPGDSSSGWTAGAAAYYVGYLQPRTFLLKYNENGTITDAVDCALDPLSETKCTLKSFTVEKGIYQTSNFRVQPTESIVRFPNITNLCPFGEVFNATRFASVYAWNRKRISNCVADYSVLYNSASFSTFKCYGVSPTKLNDLCFTNVYADSFVIRGDEVRQIAPGQTGKIADYNYKLPDDFTGCVIAWNSNNLDSKVGGNYNYLYRLFRKSNLKPFERDISTEIYQAGSTPCNGVEGFNCYFPLQSYGFQPTNGVGYQPYRVVVLSFELLHAPATVCGPKKSTNLVKNKCVNFNFNGLTGTGVLTESNKKFLPFQQFGRDIADTTDAVRDPQTLEILDITPCSFGGVSVITPGTNTSNQVAVLYQDVNCTEVPVAIHADQLTPTWRVYSTGSNVFQTRAGCLIGAEYVNNSYECDIPIGAGICASYQTQTNSPRRARSVASQSIIAYTMSLGAENSVAYSNNSIAIPTNFTISVTTEILPVSMTKTSVDCTMYICGDSTECSNLLLQYGSFCTQLNRALTGIAVEQDKNTQEVFAQVKQIYKTPPIKDFGGFNFSQILPDPSKPSKRSFIEDLLFNKVTLADAGFIKQYGDCLGDIAARDLICAQKFNGLTVLPPLLTDEMIAQYTSALLAGTITSGWTFGAGAALQIPFAMQMAYRFNGIGVTQNVLYENQKLIANQFNSAIGKIQDSLSSTASALGKLQDVVNQNAQALNTLVKCLSSNFGAISSVLNDILSRLDKVEAEVQIDRLITGRLQCLQTYVTQQLIRAAEIRASANLAATKMSECVLGQSKRVDFCGKGYHLMSFPQSAPHGVVFLHVTYVPAQEKNFTTAPAICHDGKAHFPREGVFVSNGTHWFVTQRNFYEPQIITTDNTFVSGNCDVVIGIVNNTVYDPLQPELDSFKEELDKYFKNHTSPDVDLGDISGINASVVNIQKEIDRLNEVAKNLNESLIDLQELGKYEQYIKWPWYIWLGFIAGLIAIVMVTIMLCCMTSCCSCLKGCCSCGSCCKFDEDDSEPVLKGVKLHYT

SEQ ID NO: 968 - protein, 1273 aa, Artificial Sequence
  SARS-CoV-2/England/20102000506/2020__EPI_ISL_415147 spike protein (1-1273)(Q965C_S1003C)
MFVFLVLLPLVSSQCVNLTTRTQLPPAYTNSFTRGVYYPDKVFRSSVLHSTQDLFLPFFSNVTWFHAIHVSGTNGTKRFDNPVLPFNDGVYFASTEKSNIIRGWIFGTTLDSKTQSLLIVNNATNVVIKVCEFQFCNDPFLGVYYHKNNKSWMESEFRVYSSANNCTFEYVSQPFLMDLEGKQGNFKNLREFVFKNIDGYFKIYSKHTPINLVRDLPQGFSALEPLVDLPIGINITRFQTLLALHRSYLTPGDSSSGWTAGAAAYYVGYLQPRTFLLKYNENGTITDAVDCALDPLSETKCTLKSFTVEKGIYQTSNFRVQPTESIVRFPNITNLCPFGEVFNATRFASVYAWNRKRISNCVADYSVLYNSASFSTFKCYGVSPTKLNDLCFTNVYADSFVIRGDEVRQIAPGQTGKIADYNYKLPDDFTGCVIAWNSNNLDSKVGGNYNYLYRLFRKSNLKPFERDISTEIYQAGSTPCNGVEGFNCYFPLQSYGFQPTNGVGYQPYRVVVLSFELLHAPATVCGPKKSTNLVKNKCVNFNFNGLTGTGVLTESNKKFLPFQQFGRDIADTTDAVRDPQTLEILDITPCSFGGVSVITPGTNTSNQVAVLYQGVNCTEVPVAIHADQLTPTWRVYSTGSNVFQTRAGCLIGAEHVNNSYECDIPIGAGICASYQTQTNSPRRARSVASQSIIAYTMSLGAENSVAYSNNSIAIPTNFTISVTTEILPVSMTKTSVDCTMYICGDSTECSNLLLQYGSFCTQLNRALTGIAVEQDKNTQEVFAQVKQIYKTPPIKDFGGFNFSQILPDPSKPSKRSFIEDLLFNKVTLADAGFIKQYGYCLGDIAARDLICAQKFNGLTVLPPLLTDEMIAQYTSALLAGTITSGWTFGAGAALQIPFAMQMAYRFNGIGVTQNVLYENQKLIANQFNSAIGKIQDSLSSTASALGKLQDVVNQNAQALNTLVKCLSSNFGAISSVLNDILSRLDKVEAEVQIDRLITGRLQCLQTYVTQQLIRAAEIRASANLAATKMSECVLGQSKRVDFCGKGYHLMSFPQSAPHGVVFLHVTYVPAQEKNFTTAPAICHDGKAHFPREGVFVSNGTHWFVTQRNFYEPQIITTDNTFVSGNCDVVIGIVNNTVYDPLQPELDSFKEELDKYFKNHTSPDVDLGDISGINASVVNIQKEIDRLNEVAKNLNESLIDLQELGKYEQYIKWPWYIWLGFIAGLIAIVMVTIMLCCMTSCCSCLKGCCSCGSCCKFDEDDSEPVLKGVKLHYT

SEQ ID NO: 969 - protein, 1273 aa, Artificial Sequence
  SARS-CoV-2/Belgium/VAG-03013/2020__EPI_ISL_415155 spike protein (1-1273)(Q965C_S1003C)
MFVFLVLLPLVSSQCVNLTTRTQLPPAYTNSFTRGVYYPDKVFRSSVLHSTQDLFLPFFSNVTWFHAIHVSGTNGTKRFDNPVLPFNDGVYFASTEKSNIIRGWIFGTTLDSKTQSLLIVNNATNVVIKVCEFQFCNDPFLGVYYHKNNKSWMESEFRVYSSANNCTFEYVSQPFLMDLEGKQGNFKNLREFVFKNIDGYFKIYSKHTPINLVRDLPQGFSALEPLVDLPIGINITRFQTLLALHRSYLTPGDSSSGWTAGAAAYYVGYLQPRTFLLKYNENGTITDAVDCALDPLSETKCTLKSFTVEKGIYQTSNFRVQPTESIVRFPNITNLCPFGEVFNATRFASVYAWNRKRISNCVADYSVLYNSASFSTFKCYGVSPTKLNDLCFTNVYADSFVIRGDEVRQIAPGQTGKIADYNYKLPDDFTGCVIAWNSNNLDSKVGGNYNYLYRLFRKSNLKPFERDISTEIYQAGSTPCNGVEGFNCYFPLQSYGFQPTNGVGYQPYRVVVLSFELLHAPATVCGPKKSTNLVKNKCVNFNFNGLTGTGVLTESNKKFLPFQQFGRDIADTTDAVRDPQTLEILDITPCSFGGVSVITPGTNTSNQVAVLYQGVNCTEVPVAIHADQLTPTWRVYSTGSNVFQTRAGCLIGAEHVNNSYECDIPIGAGICASYQTQTNSPRRARSVASQSIIAYTMSLGAENSVAYSNNSIAIPTNFTISVTTEILPVSMTKTSVDCTMYICGDSTECSNLLLQYGSFCTQLNRALTGIAVEQDKNTQEVFAQVKQIYKTPPIKDFGGFNFSQILPDPSKPSKRSFIEDLLFNKVTLADAGFIKQYGDCLGDIAARDLICAQKFNGLTVLPPLLTDEMIAQYTSALLAGTITSGWTFGAGAALQIPFAMQMAYRFNGIGVTQNVLYENQKLIANQFNSAIGKIQDSLSSTATALGKLQDVVNQNAQALNTLVKCLSSNFGAISSVLNDILSRLDKVEAEVQIDRLITGRLQCLQTYVTQQLIRAAEIRASANLAATKMSECVLGQSKRVDFCGKGYHLMSFPQSAPHGVVFLHVTYVPAQEKNFTTAPAICHDGKAHFPREGVFVSNGTHWFVTQRNFYEPQIITTDNTFVSGNCDVVIGIVNNTVYDPLQPELDSFKEELDKYFKNHTSPDVDLGDISGINASVVNIQKEIDRLNEVAKNLNESLIDLQELGKYEQYIKWPWYIWLGFIAGLIAIVMVTIMLCCMTSCCSCLKGCCSCGSCCKFDEDDSEPVLKGVKLHYT

SEQ ID NO: 970 - protein, 1273 aa, Artificial Sequence
  SARS-CoV-2/Belgium/BC-03016/2020__EPI_ISL_415157 spike protein (1-1273)(Q965C_S1003C)
MFVFLVLLPLVSSQCVNLTTRTQLPPAYTNSFTRGVYYPDKVFRSSVLHSTQDLFLPFFSNVTWFHAIHVSGTNGTKRFDNPVLPFNDGVYFASTEKSNIIRGWIFGTTLDSKTQSLLIVNNATNVVIKVCEFQFCNDPFLGVYYHKNNKSWMESEFRVYSSANNCTFEYVSQPFLMDLEGKQGNFKNLREFVFKNIDGYFKIYSKHTPINLVRDLPQGFSALEPLVDLPIGINITRFQTLLALHRSYLTPGDSSSGWTAGAAAYYVGYLQPRTFLLKYNENGTITDAVDCALDPLSETKCTLKSFTVEKGIYQTSNFRVQPTESIVRFPNITNLCPFGEVFNATRFASVYAWNRKRISNCVADYSVLYNSASFSTFKCYGVSPTKLNDLCFTNVYADSFVIRGDEVRQIAPGQTGKIADYNYKLPDDFTGCVIAWNSNNLDSKVGGNYNYLYRLFRKSNLKPFERDISTEIYQAGSTPCNGVEGFNCYFPLQSYGFQPTNGVGYQPYRVVVLSFELLHAPATVCGPKKSTNLVKNKCVNFNFNGLTGTGVLTESNKKFLPFQQFGRDIADTTDAVRDPQTLEILDITPCSFGGVSVITPGTNTSNQVAVLYQGVNCTEVPVAIHADQLTPTWRVYSTGSNVFQTRAGCLIGAEHVNNSYECDIPIGAGICASYQTQTNSPRRARSVASQSIIAYTMSLGAENSVAYSNNSIAIPTNFTISVTTEILPVSMTKTSVDCTMYICGDSTECSNLLLQYGSFCTQLNRALTGIAVEQDKNTQEVFAQVKQIYKTPPIKDFGGFNFSQILPDPSKPSKRSFIEDLLFNKVTLADAGFIKQYGDCLGDIAARDLICAQKFNGLTVLPPLLTDEMIAQYTSALLAGTITSGWTFGAGAALQIPFAMQMAYRFNGIGVTQNVLYENQKLIANQFNSAIGKIQDSLSSTAPALGKLQDVVNQNAQALNTLVKCLSSNFGAISSVLNDILSRLDKVEAEVQIDRLITGRLQCLQTYVTQQLIRAAEIRASANLAATKMSECVLGQSKRVDFCGKGYHLMSFPQSAPHGVVFLHVTYVPAQEKNFTTAPAICHDGKAHFPREGVFVSNGTHWFVTQRNFYEPQIITTDNTFVSGNCDVVIGIVNNTVYDPLQPELDSFKEELDKYFKNHTSPDVDLGDISGINASVVNIQKEIDRLNEVAKNLNESLIDLQELGKYEQYIKWPWYIWLGFIAGLIAIVMVTIMLCCMTSCCSCLKGCCSCGSCCKFDEDDSEPVLKGVKLHYT

SEQ ID NO: 971 - protein, 1273 aa, Artificial Sequence
  SARS-CoV-2/Germany/BavPat3/2020__EPI_ISL_414521 spike protein (1-1273)(Q965C_S1003C)
MFVFLVLLPLVSSQCVNLTTRTQLPPAYTNSFTRGVYYPDKVFRSSVLHSTQDLFLPFFSNVTWFHAIHVSGTNGTKRFDNPVLPFNDGVYFASTEKSNIIRGWIFGTTLDSKTQSLLIVNNATNVVIKVCEFQFCNDPFLGVYYHKNNKSWMESEFRVYSSANNCTFEYVSQPFLMDLEGKQGNFKNLREFVFKNIDGYFKIYSKHTPINLVRDLPQGFSALEPLVDLPIGINITRFQTLLALHRSYLTPGDSSSGWTAGAAAYYVGYLQPRTFLLKYNENGTITDAVDCALDPLSETKCTLKSFTVEKGIYQTSNFRVQPTESIVRFPNITNLCPFGEVFNATRFASVYAWNRKRISNCVADYSVLYNSASFSTFKCYGVSPTKLNDLCFTNVYADSFVIRGDEVRQIAPGQTGKIADYNYKLPDDFTGCVIAWNSNNLDSKVGGNYNYLYRLFRKSNLKPFERDISTEIYQAGSTPCNGVEGFNCYFPLQSYGFQPTNGVGYQPYRVVVLSFELLHAPATVCGPKKSTNLVKNKCVNFNFNGLTGTGVLTESNKKFLPFQQFGRDIADTTDAVRDPQTLEILDITPCSFGGVSVITPGTNTSNQVAVLYQDVNCTEVPVAIHADQLTPTWRVYSTGSNVFQTRAGCLIGAEHVNNSYECDIPIGAGICASYQTQTNSPRRARSVASQSIIAYTMSLGAENSVAYSNNSIAIPTNFTISVTTEILPVSMTKTSVDCTMYICGDSTECSNLLLQYGSFCTQLNRALTGIAVEQDKNTQQVFAQVKQIYKTPPIKDFGGFNFSQILPDPSKPSKRSFIEDLLFNKVTLADAGFIKQYGDCLGDIAARDLICAQKFNGLTVLPPLLTDEMIAQYTSALLAGTITSGWTFGAGAALQIPFAMQMAYRFNGIGVTQNVLYENQKLIANQFNSAIGKIQDSLSSTASALGKLQDVVNQNAQALNTLVKCLSSNFGAISSVLNDILSRLDKVEAEVQIDRLITGRLQCLQTYVTQQLIRAAEIRASANLAATKMSECVLGQSKRVDFCGKGYHLMSFPQSAPHGVVFLHVTYVPAQEKNFTTAPAICHDGKAHFPREGVFVSNGTHWFVTQRNFYEPQIITTDNTFVSGNCDVVIGIVNNTVYDPLQPELDSFKEELDKYFKNHTSPDVDLGDISGINASVVNIQKEIDRLNEVAKNLNESLIDLQELGKYEQYIKWPWYIWLGFIAGLIAIVMVTIMLCCMTSCCSCLKGCCSCGSCCKFDEDDSEPVLKGVKLHYT

SEQ ID NO: 972 - protein, 1273 aa, Artificial Sequence
  SARS-CoV-2/France/HF1805/2020__EPI_ISL_414628 spike protein (1-1273)(Q965C_S1003C)
MFVFLVLLPLVSSQCVNLTTRTQLPPAYTNSFTRGVYYPDKVFRSSVLHSTQDLFLPFFSNVTWFHAIHVSGTNGTKRFDNPVLPFNDGVYFASTEKSNIIRGWIFGTTLDSKTQSLLIVNNATNVVIKVCEFQFCNDPFLGVYYHKNNKSWMESEFRVYSSANNCTFEYVSQPFLMDLEGKQGNFKNLREFVFKNIDGYFKIYSKHTPINLVRDLPQGFSALEPLVDLPIGINITRFQTLLALHRSYLTPGDSSSGWTAGAAAYYVGYLQPRTFLLKYNENGTITDAVDCALDPLSETKCTLKSFTVEKGIYQTSNFRVQPTESIVRFPNITNLCPFGEVFNATRFASVYAWNRKRISNCVADYSVLYNSASFSTFKCYGVSPTKLNDLCFTNVYADSFVIRGDEVRQIAPGQTGKIADYNYKLPDDFTGCVIAWNSNNLDSKVGGNYNYLYRLFRKSNLKPFERDISTEIYQAGSTPCNGVEGFNCYFPLQSYGFQPTNGVGYQPYRVVVLSFELLHAPATVCGPKKSTNLVKNKCVNFNFNGLTGTGVLTESNKKFLPFQQFGRDIADTTDAVRDPQTLEILDITPCSFGGVSVITPGTNTSNQVAVLYQGVNCTEVPVAIHADQLTPTWRVYSTGSNVFQTRAGCLIGAEHVNNSYECDIPIGAGICASYQTQTNSPRRARSVASQSIIAYTMSLGAENSVAYSNNSIAIPTNFTISVTTEILPVSMTKTSVDCTMYICGDSTECSNLLLQYGSFCTQLNRALTGIAVEQDKNTQEVFAQVKQIYKTPPIKDFGGFNFSQILPDPSKPSKRSFIEDLLFNKVTLADAGFIKQYGDCLGDIAARDLICAQKFNGLTVLPPLLTDEMIAQYTSALLAGTITSGWTFGAGAALQIPFAMQMAYRFNGIGVTQNVLYENQKLIANQFNSAIGKIQDSLSSTASALGKLQDVVNQNAQALNTLVKCLSSNFGAISSVLNDILSRLDKVEAEVQIDRLITGRLQCLQTYVTQQLIRAAEIRASANLAATKMSECVLGQSKRVDFCGKGYHLMSFPQSAPHGVVFLHVTYVPAQEKNFTTAPAICHDGKAHFPREGVFVSNGTHWFVTQRNFYEPQIITTDNTFVSGNCDVVIGVVNNTVYDPLQPELDSFKEELDKYFKNHTSPDVDLGDISGINASVVNIQKEIDRLNEVAKNLNESLIDLQELGKYEQYIKWPWYIWLGFIAGLIAIVMVTIMLCCMTSCCSCLKGCCSCGSCCKFDEDDSEPVLKGVKLHYT

SEQ ID NO: 973 - protein, 1273 aa, Artificial Sequence
  SARS-CoV-2/Netherlands/ZuidHolland_9/2020__EPI_ISL_414445 spike protein (1-1273)(Q965C_S1003C)
MFVFLVLLPLVSSQCVNLTTRTQLPPAYTNSFTRGVYYPDKVFRSSVLHSTQDLFLPFFSNVTWFHAIHVSGTNGTKRFDNPVLPFNDGVYFASTEKSNIIRGWIFGTTLDSKTQSLLIVNNATNVVIKVCEFQFCNDPFLGVYYHKNNKSWMESEFRVYSSANNCTFEYVSQPFLMDLEGKQGNFKNLREFVFKNIDGYFKIYSKHTPINLVRDLPQGFSALEPLVDLPIGINITRFQTLLALHRSYLTPGDSSSGWTAGAAAYYVGYLQPRTFLLKYNENGTITDAVDCALDPLSETKCTLKSFTVEKGIYQTSNFRVQPTESIVRFPNITNLCPFGEVFNATRFASVYAWNRKRISNCVADYSVLYNSASFSTFKCYGVSPTKLNDLCFTNVYADSFVIRGDEVRQIAPGQTGKIADYNYKLPDDFTGCVIAWNSNNLDSKVGGNYNYLYRLFRKSNLKPFERDISTEIYQAGSTPCNGVEGFNCYFPLQSYGFQPTNGVGYQPYRVVVLSFELLHAPATVCGPKKSTNLVKNKCVNFNFNGLTGTGVLTESNKKFLPFQQFGRDIADTTDAVRDPQTLEILDITPCSFGGVSVITPGTNTSNQVAVLYQGVNCTEVPVAIHADQLTPTWRVYSTGSNVFQTRAGCLIGAEHVNNSYECDIPIGAGICASYQTQTNSPRRARSVASQSIIAYTMSLGAENSVAYSNNSIAIPTNFTISVTTEILPVSMTKTSVDCTMYICGDSTECSNLLLQYGSFCTQLNRALTGIAVEQDKNTQEVFAQVKQIYKTPPIKDFGGFNFSQILPDPSKPSKRSFIEDLLFNKVTLADAGFIKQYGDCLGDIAARDLICVQKFNGLTVLPPLLTDEMIAQYTSALLAGTITSGWTFGAGAALQIPFAMQMAYRFNGIGVTQNVLYENQKLIANQFNSAIGKIQDSLSSTASALGKLQDVVNQNAQALNTLVKCLSSNFGAISSVLNDILSRLDKVEAEVQIDRLITGRLQCLQTYVTQQLIRAAEIRASANLAATKMSECVLGQSKRVDFCGKGYHLMSFPQSAPHGVVFLHVTYVPAQEKNFTTAPAICHDGKAHFPREGVFVSNGTHWFVTQRNFYEPQIITTDNTFVSGNCDVVIGIVNNTVYDPLQPELDSFKEELDKYFKNHTSPDVDLGDISGINASVVNIQKEIDRLNEVAKNLNESLIDLQELGKYEQYIKWPWYIWLGFIAGLIAIVMVTIMLCCMTSCCSCLKGCCSCGSCCKFDEDDSEPVLKGVKLHYT

SEQ ID NO: 974 - protein, 1273 aa, Artificial Sequence
  SARS-CoV-2/Finland/FIN03032020A/2020__EPI_ISL_413602 spike protein (1-1273)(Q965C_S1003C)
MFVFLVLLPLVSSQCVNLTTRTQLPPAYTNSFTRGVYYPDKVFRSSVLHSTQDLFLPFFSNVTWFHAIHVSGTNGTKRFDNPVLPFNDGVYFASTEKSNIIRGWIFGTTLDSKTQSLLIVNNATNVVIKVCEFQFCNDPFLGVYYHKNNKSWMESEFRVYSSANNCTFEYVSQPFLMDLEGKQGNFKNLREFVFKNIDGYFKIYSKHTPINLVRDLPQGFSALEPLVDLPIGINITRFQTLLALHRSYLTPGDSSSGWTAGAAAYYVGYLQPRTFLLKYNENGTITDAVDCALDPLSETKCTLKSFTVEKGIYQTSNFRVQPTESIVRFPNITNLCPFGEVFNATRFASVYAWNRKRISNCVADYSVLYNSASFSTFKCYGVSPTKLNDLCFTNVYADSFVIRGDEVRQIAPGQTGKIADYNYKLPDDFTGCVISWNSNNLDSKVGGNYNYLYRLFRKSNLKPFERDISTEIYQAGSTPCNGVEGFNCYFPLQSYGFQPTNGVGYQPYRVVVLSFELLHAPATVCGPKKSTNLVKNKCVNFNFNGLTGTGVLTESNKKFLPFQQFGRDIADTTDAVRDPQTLEILDITPCSFGGVSVITPGTNTSNQVAVLYQGVNCTEVPVAIHADQLTPTWRVYSTGSNVFQTRAGCLIGAEHVNNSYECDIPIGAGICASYQTQTNSPRRARSVASQSIIAYTMSLGAENSVAYSNNSIAIPTNFTISVTTEILPVSMTKTSVDCTMYICGDSTECSNLLLQYGSFCTQLNRALTGIAVEQDKNTQEVFAQVKQIYKTPPIKDFGGFNFSQILPDPSKPSKRSFIEDLLFNKVTLADAGFIKQYGDCLGDIAARDLICAQKFNGLTVLPPLLTDEMIAQYTSALLAGTITSGWTFGAGAALQIPFAMQMAYRFNGIGVTQNVLYENQKLIANQFNSAIGKIQDSLSSTASALGKLQDVVNQNAQALNTLVKCLSSNFGAISSVLNDILSRLDKVEAEVQIDRLITGRLQCLQTYVTQQLIRAAEIRASANLAATKMSECVLGQSKRVDFCGKGYHLMSFPQSAPHGVVFLHVTYVPAQEKNFTTAPAICHDGKAHFPREGVFVSNGTHWFVTQRNFYEPQIITTDNTFVSGNCDVVIGIVNNTVYDPLQPELDSFKEELDKYFKNHTSPDVDLGDISGINASVVNIQKEIDRLNEVAKNLNESLIDLQELGKYEQYIKWPWYIWLGFIAGLIAIVMVTIMLCCMTSCCSCLKGCCSCGSCCKFDEDDSEPVLKGVKLHYT

SEQ ID NO: 975 - protein, 1273 aa, Artificial Sequence
  SARS-CoV-2/France/GE1977/2020__EPI_ISL_414632 spike protein (1-1273)(Q965C_S1003C)
MFVFLVLLPLVSSQCVNLTTRTQLPPAYTNSFTRGVYYPDKVFRSSVLHSTQDLFLPFFSNVTWFHAIHVSGTNGTKRFDNPVLPFNDGVYFASTEKSNIIRGWIFGTTLDSKTQSLLIVNNATNVVIKVCEFQFCNDPFLGVYYHKNNKSWMESEFRVYSSANNCTFEYVSQPFLMDLEGKQGNFKNLREFVFKNIDGYFKIYSKHTPINLVRDLPQGFSALEPLVDLPIGINITRFQTLLALHRSYLTPGDSSSGWTAGAAAYYVGYLQPRTFLLKYNENGTITDAVDCALDPLSETKCTLKSFTVEKGIYQTSNFRVQPTESIVRFPNITNLCPFGEVFNATRFASVYAWNRKRISNCVADYSVLYNSASFSTFKCYGVSPTKLNDLCFTNVYADSFVIRGDEVRQIAPGQTGKIADYNYKLPDDFTGCVIAWNSNNLDSKVGGNYNYLYRLFRKSNLKPFERDISTEIYQAGSTPCNGVEGFNCYFPLQSYGFQPTNGVGYQPYRVVVLSFELLHAPATVCGPKKSTNLVKNKCVNFNFNGLTGTGVLTESNKKFLPFQQFGRDIADTTDAVRDPQTLEILDITPCSFGGVSVITPGTNTSNQVAVLYQGVNCTEVPVAIHADQLTPTWRVYSTGSNVFQTRAGCLIGAEHVNNSYECDIPIGAGICASYQTQTNSPRRARSVASQSIIAYTMSLGAENSVAYSNNSIAIPTNFTISVTTEILPVSMTKTSVDCTMYICGDSTECSNLLLQYGSFCTQLNRALTGIAVEQDKNTQEVFAQVKQIYKTPPIKDFGGFNFSQILPDPSKPSKRSFIEDLLFNKVTLADAGFIKQYGDCLGDIAARDLICAQKFNGLTVLPPLLTDEMIAQYTSALLAGTITSGWTFGAGAALQIPFAMQMAYRFNGIGVTQNVLYENQKLIANQFNSAIGKIQDSLFSTASALGKLQDVVNQNAQALNTLVKCLSSNFGAISSVLNDILSRLDKVEAEVQIDRLITGRLQCLQTYVTQQLIRAAEIRASANLAATKMSECVLGQSKRVDFCGKGYHLMSFPQSAPHGVVFLHVTYVPAQEKNFTTAPAICHDGKAHFPREGVFVSNGTHWFVTQRNFYEPQIITTDNTFVSGNCDVVIGIVNNTVYDPLQPELDSFKEELDKYFKNHTSPDVDLGDISGINASVVNIQKEIDRLNEVAKNLNESLIDLQELGKYEQYIKWPWYIWLGFIAGLIAIVMVTIMLCCMTSCCSCLKGCCSCGSCCKFDEDDSEPVLKGVKLHYT

SEQ ID NO: 976 - protein, 1273 aa, Artificial Sequence
  SARS-CoV-2/Finland/FIN-313/2020__EPI_ISL_414641 spike protein (1-1273)(Q965C_S1003C)
MFVFLVLLPLVSSQCVNLTTRTQLPPAYTNSFTRGVYYPDKVFRSSVLHSTQDLFLPFFSNVTWFHAIHVSGTNGTKRFDNPVLPFNDGVYFASTEKSNIIRGWIFGTTLDSKTQSLLIVNNATNVVIKVCEFQFCNDPFLGVYYHKNNKSWMESEFRVYSSANNCTFEYVSQPFLMDLEGKQGNFKNLREFVFKNIDGYFKIYSKHTPINLVRDLPQGFSALEPLVDLPIGINITRFKTLLALHRSYLTPGDSSSGWTAGAAAYYVGYLQPRTFLLKYNENGTITDAVDCALDPLSETKCTLKSFTVEKGIYQTSNFRVQPTESIVRFPNITNLCPFGEVFNATRFASVYAWNRKRISNCVADYSVLYNSASFSTFKCYGVSPTKLNDLCFTNVYADSFVIRGDEVRQIAPGQTGKIADYNYKLPDDFTGCVIAWNSNNLDSKVGGNYNYLYRLFRKSNLKPFERDISTEIYQAGSTPCNGVEGFNCYFPLQSYGFQPTNGVGYQPYRVVVLSFELLHAPATVCGPKKSTNLVKNKCVNFNFNGLTGTGVLTESNKKFLPFQQFGRDIADTTDAVRDPQTLEILDITPCSFGGVSVITPGTNTSNQVAVLYQGVNCTEVPVAIHADQLTPTWRVYSTGSNVFQTRAGCLIGAEHVNNSYECDIPIGAGICASYQTQTNSPRRARSVASQSIIAYTMSLGAENSVAYSNNSIAIPTNFTISVTTEILPVSMTKTSVDCTMYICGDSTECSNLLLQYGSFCTQLNRALTGIAVEQDKNTQEVFAQVKQIYKTPPIKDFGGFNFSQILPDPSKPSKRSFIEDLLFNKVTLADAGFIKQYGDCLGDIAARDLICAQKFNGLTVLPPLLTDEMIAQYTSALLAGTITSGWTFGAGAALQIPFAMQMAYRFNGIGVTQNVLYENQKLIANQFNSAIGKIQDSLSSTASALGKLQDVVNQNAQALNTLVKCLSSNFGAISSVLNDILSRLDKVEAEVQIDRLITGRLQCLQTYVTQQLIRAAEIRASANLAATKMSECVLGQSKRVDFCGKGYHLMSFPQSAPHGVVFLHVTYVPAQEKNFTTAPAICHDGKAHFPREGVFVSNGTHWFVTQRNFYEPQIITTDNTFVSGNCDVVIGIVNNTVYDPLQPELDSFKEELDKYFKNHTSPDVDLGDISGINASVVNIQKEIDRLNEVAKNLNESLIDLQELGKYEQYIKWPWYIWLGFIAGLIAIVMVTIMLCCMTSCCSCLKGCCSCGSCCKFDEDDSEPVLKGVKLHYT

SEQ ID NO: 977 - protein, 1273 aa, Artificial Sequence
  SARS-CoV-2/Netherlands/ZuidHolland_2/2020__EPI_ISL_414556 spike protein (1-1273)(Q965C_S1003C)
MFVFLVLLPLVSSQCVNLTTRTQLPPAYTNSFTRGVYYPDKVFRSSVLHSTQDLFLPFFSNVTWFHAIHVSGTNGTKRFDNPVLPFNDGVYFASTEKSNIIRGWIFGTTLDSKTQSLLIVNNATNVVIKVCEFQFCNDPFLGVYYHKNNKSWMESEFRVYSSANNCTFEYVSQPFLMDLEGKQGNFKNLREFVFKNIDGYFKIYSKHTPINLVRDLPQGFSALEPLVDLPIGINITRFQTLLALHRSYLTPGDSSSGWTAGAAAYYVGYLQPRTFLLKYNENGTITDAVDCALDPLSETKCTLKSFTVEKGIYQTSNFRVQPTESIVRFPNITNLCPFGEVFNATRFASVYAWNRKRISNCVADYSVLYNSASFSTFKCYGVSPTKLNDLCFTNVYADSFVIRGDEVRQIAPGQTGKIADYNYKLPDDFTGCVIAWNSNNLDSKVGGNYNYLYRLFRKSNLKPFERDISTEIYQAGSTPCNGVEGFNCYFPLQSYGFQPTNGVGYQPYRVVVLSFELLHAPATVCGPKKSTNLVKNKCVNFNFNGLTGTGVLTESNKKFLPFQQFGRDIADTTDAVRDPQTLEILDITPCSFGGVSVITPGTNTSNQVAVLYQGVNCTEVPVAIHADQLTPTWRVYSTGSNVFQTRAGCLIGAEHVNNSYECDIPIGAGICASYQTQTNSPRRARSVASQSIIAYTMSLGAENSVAYSNNSIAIPTNFTISVTTEILPVSMTKTSVDCTMYICGDSTECSNLLLQYGSFCTQLNRALTGIALEQDKNTQEVFAQVKQIYKTPPIKDFGGFNFSQILPDPSKPSKRSFIEDLLFNKVTLADAGFIKQYGDCLGDIAARDLICAQKFNGLTVLPPLLTDEMIAQYTSALLAGTITSGWTFGAGAALQIPFAMQMAYRFNGIGVTQNVLYENQKLIANQFNSAIGKIQDSLSSTASALGKLQDVVNQNAQALNTLVKCLSSNFGAISSVLNDILSRLDKVEAEVQIDRLITGRLQCLQTYVTQQLIRAAEIRASANLAATKMSECVLGQSKRVDFCGKGYHLMSFPQSAPHGVVFLHVTYVPAQEKNFTTAPAICHDGKAHFPREGVFVSNGTHWFVTQRNFYEPQIITTDNTFVSGNCDVVIGIVNNTVYDPLQPELDSFKEELDKYFKNHTSPDVDLGDISGINASVVNIQKEIDRLNEVAKNLNESLIDLQELGKYEQYIKWPWYIWLGFIAGLIAIVMVTIMLCCMTSCCSCLKGCCSCGSCCKFDEDDSEPVLKGVKLHYT

SEQ ID NO: 978 - protein, 1273 aa, Artificial Sequence
  SARS-CoV-2/USA/WA-UW31/2020__EPI_ISL_414618 spike protein (1-1273)(Q965C_S1003C)
MFVFLVLLPLVSSQCVNLTTRTQLPPAYTNSFTRGVYYPDKVFRSSVLHSTQDLFLPFFSNVTWFHAIHVSGTNGTKRFDNPVLPFNDGVYFASTEKSNIIRGWIFGTTLDSKTQSLLIVNNATNVVIKVCEFQFCNDPFLGVYYHKNNKSWMESEFRVYSSANNCTFEYVSQPFLMDLEGKQGNFKNLREFVFKNIDGYFKIYSKHTPINLVRDLPQGFSALEPLVDLPIGINITRFQTLLALHRSYLTPGDSSSGWTAGAAAYYVGYLQPRTFLLKYNENGTITDAVDCALDPLSETKCTLKSFTVEKGIYQTSNFRVQPTESIVRFPNITNLCPFGEVFNATRFASVYAWNRKRISNCVADYSVLYNSASFSTFKCYGVSPTKLNDLCFTNVYADSFVIRGDEVRQIAPGQTGKIADYNYKLPDDFTGCVIAWNSNNLDSKVGGNYNYLYRLFRKSNLKPFERDISTEIYQAGSTPCNGAEGFNCYFPLQSYGFQPTNGVGYQPYRVVVLSFELLHAPATVCGPKKSTNLVKNKCVNFNFNGLTGTGVLTESNKKFLPFQQFGRDIADTTDAVRDPQTLEILDITPCSFGGVSVITPGTNTSNQVAVLYQDVNCTEVPVAIHADQLTPTWRVYSTGSNVFQTRAGCLIGAEHVNNSYECDIPIGAGICASYQTQTNSPRRARSVASQSIIAYTMSLGAENSVAYSNNSIAIPTNFTISVTTEILPVSMTKTSVDCTMYICGDSTECSNLLLQYGSFCTQLNRALTGIAVEQDKNTQEVFAQVKQIYKTPPIKDFGGFNFSQILPDPSKPSKRSFIEDLLFNKVTLADAGFIKQYGDCLGDIAARDLICAQKFNGLTVLPPLLTDEMIAQYTSALLAGTITSGWTFGAGAALQIPFAMQMAYRFNGIGVTQNVLYENQKLIANQFNSAIGKIQDSLSSTASALGKLQDVVNQNAQALNTLVKCLSSNFGAISSVLNDILSRLDKVEAEVQIDRLITGRLQCLQTYVTQQLIRAAEIRASANLAATKMSECVLGQSKRVDFCGKGYHLMSFPQSAPHGVVFLHVTYVPAQEKNFTTAPAICHDGKAHFPREGVFVSNGTHWFVTQRNFYEPQIITTDNTFVSGNCDVVIGIVNNTVYDPLQPELDSFKEELDKYFKNHTSPDVDLGDISGINASVVNIQKEIDRLNEVAKNLNESLIDLQELGKYEQYIKWPWYIWLGFIAGLIAIVMVTIMLCCMTSCCSCLKGCCSCGSCCKFDEDDSEPVLKGVKLHYT

SEQ ID NO: 979 - protein, 1273 aa, Artificial Sequence
  SARS-CoV-2/South Korea/SNU01/2020__EPI_ISL_411929 spike protein (1-1273)(Q965C_S1003C)
MFVFLVLLPLVSSQCVNLTTRTQLPPAYTNSFTRGVYYPDKVFRSSVLHSTQDLFLPFFSNVTWFHAIHVSGTNGTKRFDNPVLPFNDGVYFASTEKSNIIRGWIFGTTLDSKTQSLLIVNNATNVVIKVCEFQFCNDPFLGVYYHKNNKSWMESEFRVYSSANNCTFEYVSQPFLMDLEGKQGNFKNLREFVFKNIDGYFKIYSKHTPINLVRDLPQGFWALEPLVDLPIGINITRFQTLLALHRSYLTPGDSSSGWTAGAAAYYVGYLQPRTFLLKYNENGTITDAVDCALDPLSETKCTLKSFTVEKGIYQTSNFRVQPTESIVRFPNITNLCPFGEVFNATRFASVYAWNRKRISNCVADYSVLYNSASFSTFKCYGVSPTKLNDLCFTNVYADSFVIRGDEVRQIAPGQTGKIADYNYKLPDDFTGCVIAWNSNNLDSKVGGNYNYLYRLFRKSNLKPFERDISTEIYQAGSTPCNGVEGFNCYFPLQSYGFQPTNGVGYQPYRVVVLSFELLHAPATVCGPKKSTNLVKNKCVNFNFNGLTGTGVLTESNKKFLPFQQFGRDIADTTDAVRDPQTLEILDITPCSFGGVSVITPGTNTSNQVAVLYQDVNCTEVPVAIHADQLTPTWRVYSTGSNVFQTRAGCLIGAEHVNNSYECDIPIGAGICASYQTQTNSPRRARSVASQSIIAYTMSLGAENSVAYSNNSIAIPTNFTISVTTEILPVSMTKTSVDCTMYICGDSTECSNLLLQYGSFCTQLNRALTGIAVEQDKNTQEVFAQVKQIYKTPPIKDFGGFNFSQILPDPSKPSKRSFIEDLLFNKVTLADAGFIKQYGDCLGDIAARDLICAQKFNGLTVLPPLLTDEMIAQYTSALLAGTITSGWTFGAGAALQIPFAMQMAYRFNGIGVTQNVLYENQKLIANQFNSAIGKIQDSLSSTASALGKLQDVVNQNAQALNTLVKCLSSNFGAISSVLNDILSRLDKVEAEVQIDRLITGRLQCLQTYVTQQLIRAAEIRASANLAATKMSECVLGQSKRVDFCGKGYHLMSFPQSAPHGVVFLHVTYVPAQEKNFTTAPAICHDGKAHFPREGVFVSNGTHWFVTQRNFYEPQIITTDNTFVSGNCDVVIGIVNNTVYDPLQPELDSFKEELDKYFKNHTSPDVDLGDISGINASVVNIQKEIDRLNEVAKNLNESLIDLQELGKYEQYIKWPWYIWLGFIAGLIAIVMVTIMLCCMTSCCSCLKGCCSCGSCCKFDEDDSEPVLKGVKLHYT

SEQ ID NO: 980 - protein, 1273 aa, Artificial Sequence
  SARS-CoV-2/China/WF0004/2020__EPI_ISL_413694 spike protein (1-1273)(Q965C_S1003C)
MFVFLVLLPLVSSQCVNLTTRTQLPPAYTNSFTRGVYYPDKVFRSSVLHSTQDLFLPFFSNVTWFHAIHVSGTNGTKRFDNPVLPFNDGVYFASTEKSNIIRGWIFGTTLDSKTQSLLIVNNATNVVIKVCEFQFCNDPFLGVYYHKNNKSWTESEFRVYSSANNCTFEYVSQPFLMDLEGKQGNFKNLREFVFKNIDGYFKIYSKHTPINLVRDLPQGFSALEPLVDLPIGINITRFQTLLALHRSYLTPGDSSSGWTAGAAAYYVGYLQPRTFLLKYNENGTITDAVDCALDPLSETKCTLKSFTVEKGIYQTSNFRVQPTESIVRFPNITNLCPFGEVFNATRFASVYAWNRKRISNCVADYSVLYNSASFSTFKCYGVSPTKLNDLCFTNVYADSFVIRGDEVRQIAPGQTGKIADYNYKLPDDFTGCVIAWNSNNLDSKVGGNYNYLYRLFRKSNLKPFERDISTEIYQAGSTPCNGVEGFNCYFPLQSYGFQPTNGVGYQPYRVVVLSFELLHAPATVCGPKKSTNLVKNKCVNFNFNGLTGTGVLTESNKKFLPFQQFGRDIADTTDAVRDPQTLEILDITPCSFGGVSVITPGTNTSNQVAVLYQDVNCTEVPVAIHADQLTPTWRVYSTGSNVFQTRAGCLIGAEHVNNSYECDIPIGAGICASYQTQTNSPRRARSVASQSIIAYTMSLGAENSVAYSNNSIAIPTNFTISVTTEILPVSMTKTSVDCTMYICGDSTECSNLLLQYGSFCTQLNRALTGIAVEQDKNTQEVFAQVKQIYKTPPIKDFGGFNFSQILPDPSKPSKRSFIEDLLFNKVTLADAGFIKQYGDCLGDIAARDLICAQKFNGLTVLPPLLTDEMIAQYTSALLAGTITSGWTFGAGAALQIPFAMQMAYRFNGIGVTQNVLYENQKLIANQFNSAIGKIQDSLSSTASALGKLQDVVNQNAQALNTLVKCLSSNFGAISSVLNDILSRLDKVEAEVQIDRLITGRLQCLQTYVTQQLIRAAEIRASANLAATKMSECVLGQSKRFDFCGKGYHLMSFPQSAPHGVVFLHVTYVPAQEKNFTTAPAICHDGKAHFPREGVFVSNGTHWFVTQRNFYEPQIITTDNTFVSGNCDVVIGIVNNTVYDPLQPELDSFKEELDKYFKNHTSPDVDLGDISGINASVVNIQKEIDRLNEVAKNLNESLIDLQELGKYEQYIKWPWYIWLGFIAGLIAIVMVTIMLCCMTSCCSCLKGCCSCGSCCKFDEDDSEPVLKGVKLHYT

SEQ ID NO: 981 - protein, 1273 aa, Artificial Sequence
  SARS-CoV-2/China/WF0028/2020__EPI_ISL_413791 spike protein (1-1273)(Q965C_S1003C)
MFVFLVLLPLVSSQCVNLTTRTQLPPAYTNSFTRGVYYPDKVFRSSVLHSTQDLFLPFFSNVTWFHAIHVSGTNGTKRFDNPVLPFNDGVYFASTEKSNIIRGWIFGTTLDSKTQSLLIVNNATNVVIKVCEFQFCNDPFLGVYYHKNNKSWMESEFRVYSSANNCTFEYVSQPFLMDLEGKQGNFKNLREFVFKNIDGYFKIYSKHTPINLVRDLPQGFSALEPLVDLPIGINITRFQTLLALHRSYLTPGDSSSGWTAGAAAYYVGYLQPRTFLLKYNENGTITDAVDCALDPLSETKCTLKSFTVEKGIYQTSNFRVQPTESIVRFPNITNLCPFGEVFNATRFASVYAWNRKRISNCVADYSVLYNSASFSTFKCYGVSPTKLNDLCFTNVYADSFVIRGDEVRQIAPGQTGKIADYNYKLPDDFTGCVIAWNSNNLDSKVGGNYNYLYRLFRKSNLKPFERDISTEIYQAGSTPCNGVEGFNCYFPLQSYGFQPTNGVGYQPYRVVVLSFELLHAPATVCGPKKSTNLVKNKCVNFNFNGLTGTGVLTESNKKFLPFQQFGRDIADTTDAVRDPQTLEILDITPCSFGGVSVITPGTNTSNQVAVLYQDVNCTEVPVAIHADQLTPTWRVYSTGSNVFQTRAGCLIGAEHVNNSYECDIPIGAGICASYQTQTNSPRRARSVASQSIIAYTMSLGAENSVAYSNNSIAIPTNFTISVTTEILPVSMTKTSVDCTMYICGDSTECSNLLLQYGSFCTQLNRALTGIAVEQDKNTQEVFAQVKQIYKTPPIKDFGGFNFSQILPDPSKPSKRSFIEDLLFNKVTLADAGFIKQYGDCLGDIAARDLICAQKFNGLTVLPPLLTDEMIAQYTSALLAGTITSGWTFGAGAALQIPFAMQMAYRFNGIGVTQNVLYENQKLIANQFNSAIGKIQDSLSSTASALGKLQDVVNQNAQALNTLVKCLSSNFGAISSVLNDILSRLDKVEAEVQIDRLITGRLQCLQTYVTQQLIRAAEIRASANLAATKMSECVLGQSKRVDFCGKGYHLMSFPQSAPHGVVFLHVTYVPAQEKNFTTAPAICHDGKAHFPREGVFVSNGTHWFVTQRNFYEPQIITTDNTFVSGNCDVVIGIVNNTVYDPLQPELESFKEELDKYFKNHTSPDVDLGDISGINASVVNIQKEIDRLNEVAKNLNESLIDLQELGKYEQYIKWPWYIWLGFIAGLIAIVMVTIMLCCMTSCCSCLKGCCSCGSCCKFDEDDSEPVLKGVKLHYT

SEQ ID NO: 982 - protein, 1273 aa, Artificial Sequence
  SARS-CoV-2/2019-nCoV/USA-CruiseA-18/2020__MT159716.1 spike protein (1-1273)(Q965C_S1003C)
MFVFLVLLPLVSSQCVNLTTRTQLPPAYTNSFTRGVYYPDKVFRSSVLHSTQDLFLPFFSNVTWFHAIHVSGTNGTKRFDNPVLPFNDGVYFASTEKSNIIRGWIFGTTLDSKTQSLLIVNNATNVVIKVCEFQFCNDPFLGVYYHKNNKSWMESELRVYSSANNCTFEYVSQPFLMDLEGKQGNFKNLREFVFKNIDGYFKIYSKHTPINLVRDLPQGFSALEPLVDLPIGINITRFQTLLALHRSYLTPGDSSSGWTAGAAAYYVGYLQPRTFLLKYNENGTITDAVDCALDPLSETKCTLKSFTVEKGIYQTSNFRVQPTESIVRFPNITNLCPFGEVFNATRFASVYAWNRKRISNCVADYSVLYNSASFSTFKCYGVSPTKLNDLCFTNVYADSFVIRGDEVRQIAPGQTGKIADYNYKLPDDFTGCVIAWNSNNLDSKVGGNYNYLYRLFRKSNLKPFERDISTEIYQAGSTPCNGVEGFNCYFPLQSYGFQPTNGVGYQPYRVVVLSFELLHAPATVCGPKKSTNLVKNKCVNFNFNGLTGTGVLTESNKKFLPFQQFGRDIADTTDAVRDPQTLEILDITPCSFGGVSVITPGTNTSNQVAVLYQDVNCTEVPVAIHADQLTPTWRVYSTGSNVFQTRAGCLIGAEHVNNSYECDIPIGAGICASYQTQTNSPRRARSVASQSIIAYTMSLGAENSVAYSNNSIAIPTNFTISVTTEILPVSMTKTSVDCTMYICGDSTECSNLLLQYGSFCTQLNRALTGIAVEQDKNTQEVFAQVKQIYKTPPIKDFGGFNFSQILPDPSKPSKRSFIEDLLFNKVTLADAGFIKQYGDCLGDIAARDLICAQKFNGLTVLPPLLTDEMIAQYTSALLAGTITSGWTFGAGAALQIPFAMQMAYRFNGIGVTQNVLYENQKLIANQFNSAIGKIQDSLSSTASALGKLQDVVNQNAQALNTLVKCLSSNFGAISSVLNDILSRLDKVEAEVQIDRLITGRLQCLQTYVTQQLIRAAEIRASANLAATKMSECVLGQSKRVDFCGKGYHLMSFPQSAPHGVVFLHVTYVPAQEKNFTTAPAICHDGKAHFPREGVFVSNGTHWFVTQRNFYEPQIITTDNTFVSGNCDVVIGIVNNTVYDPLQPELDSFKEELDKYFKNHTSPDVDLGDISGINASVVNIQKEIDRLNEVAKNLNESLIDLQELGKYEQYIKWPWYIWLGFIAGLIAIVMVTIMLCCMTSCCSCLKGCCSCGSCCKFDEDDSEPVLKGVKLHYT

SEQ ID NO: 983 - protein, 1273 aa, Artificial Sequence
  SARS-CoV-2/SARS-CoV-2/Yunnan-01/human/2020/CHN__MT049951.1 spike protein (1-1273)(Q965C_S1003C)
MFVFLVLLPLVSSQCVNLTTRTQLPPANTNSFTRGVYYPDKVFRSSVLHSTQDLFLPFFSNVTWFHAIHVSGTNGTKRFDNPVLPFNDGVYFASTEKSNIIRGWIFGTTLDSKTQSLLIVNNATNVVIKVCEFQFCNDPFLGVYYHKNNKSWMESEFRVYSSANNCTFEYVSQPFLMDLEGKQGNFKNLREFVFKNIDGYFKIYSKHTPINLVRDLPQGFSALEPLVDLPIGINITRFQTLLALHRSYLTPGDSSSGWTAGAAAYYVGYLQPRTFLLKYNENGTITDAVDCALDPLSETKCTLKSFTVEKGIYQTSNFRVQPTESIVRFPNITNLCPFGEVFNATRFASVYAWNRKRISNCVADYSVLYNSASFSTFKCYGVSPTKLNDLCFTNVYADSFVIRGDEVRQIAPGQTGKIADYNYKLPDDFTGCVIAWNSNNLDSKVGGNYNYLYRLFRKSNLKPFERDISTEIYQAGSTPCNGVEGFNCYFPLQSYGFQPTNGVGYQPYRVVVLSFELLHAPATVCGPKKSTNLVKNKCVNFNFNGLTGTGVLTESNKKFLPFQQFGRDIADTTDAVRDPQTLEILDITPCSFGGVSVITPGTNTSNQVAVLYQDVNCTEVPVAIHADQLTPTWRVYSTGSNVFQTRAGCLIGAEHVNNSYECDIPIGAGICASYQTQTNSPRRARSVASQSIIAYTMSLGAENSVAYSNNSIAIPTNFTISVTTEILPVSMTKTSVDCTMYICGDSTECSNLLLQYGSFCTQLNRALTGIAVEQDKNTQEVFAQVKQIYKTPPIKDFGGFNFSQILPDPSKPSKRSFIEDLLFNKVTLADAGFIKQYGDCLGDIAARDLICAQKFNGLTVLPPLLTDEMIAQYTSALLAGTITSGWTFGAGAALQIPFAMQMAYRFNGIGVTQNVLYENQKLIANQFNSAIGKIQDSLSSTASALGKLQDVVNQNAQALNTLVKCLSSNFGAISSVLNDILSRLDKVEAEVQIDRLITGRLQCLQTYVTQQLIRAAEIRASANLAATKMSECVLGQSKRVDFCGKGYHLMSFPQSAPHGVVFLHVTYVPAQEKNFTTAPAICHDGKAHFPREGVFVSNGTHWFVTQRNFYEPQIITTDNTFVSGNCDVVIGIVNNTVYDPLQPELDSFKEELDKYFKNHTSPDVDLGDISGINASVVNIQKEIDRLNEVAKNLNESLIDLQELGKYEQYIKWPWYIWLGFIAGLIAIVMVTIMLCCMTSCCSCLKGCCSCGSCCKFDEDDSEPVLKGVKLHYT

SEQ ID NO: 984 - protein, 1273 aa, Artificial Sequence
  SARS-CoV-2/USA/WA-UW292/2020__EPI_ISL_418077 spike protein (1-1273)(Q965C_S1003C)
MFVFLVLLPLVSSQCVNLTTRTQLPPAYTNSFTRGVYYPDKVFRSSVLHSTQDLFLPFFSNVTWFHAIHVSGTNGTKRFDNPVLPFNDGVYFASTEKSNIIRGWIFGTTLDSKTQSLLIVNNATNVVIKVCEFQFCNDPFLGVYYHKNNKSWMESEFRVYSSANNCTFEYVSQPFLMDLEGKQGNFKNLREFVFKNIDGYFKIYSKHTPINLVRDLPQGFSALEPLVDLPIGINITRFQTLLALHRSYLTPGDSSSGWTAGAAAYYVGYLQPRTFLLKYNENGTITDAVDCALDPLSETKCTLKSFTVEKGIYQTSNFRVQPTESIVRFPNITNLCPFGEVFNATRFASVYAWNRKRISNCVADYSVLYNSASFSTFKCYGVSPTKLNDLCFTNVYADSFVIRGDEVRQIAPGQTGKIADYNYKLPDDFTGCVIAWNSNNLDSKVGGNYNYLYRLFRKSNLKPFERDISTEIYQASSTPCNGVEGFNCYFPLQSYGFQPTNGVGYQPYRVVVLSFELLHAPATVCGPKKSTNLVKNKCVNFNFNGLTGTGVLTESNKKFLPFQQFGRDIADTTDAVRDPQTLEILDITPCSFGGVSVITPGTNTSNQVAVLYQDVNCTEVPVAIHADQLTPTWRVYSTGSNVFQTRAGCLIGAEHVNNSYECDIPIGAGICASYQTQTNSPRRARSVASQSIIAYTMSLGAENSVAYSNNSIAIPTNFTISVTTEILPVSMTKTSVDCTMYICGDSTECSNLLLQYGSFCTQLNRALTGIAVEQDKNTQEVFAQVKQIYKTPPIKDFGGFNFSQILPDPSKPSKRSFIEDLLFNKVTLADAGFIKQYGDCLGDIAARDLICAQKFNGLTVLPPLLTDEMIAQYTSALLAGTITSGWTFGAGAALQIPFAMQMAYRFNGIGVTQNVLYENQKLIANQFNSAIGKIQDSLSSTASALGKLQDVVNQNAQALNTLVKCLSSNFGAISSVLNDILSRLDKVEAEVQIDRLITGRLQCLQTYVTQQLIRAAEIRASANLAATKMSECVLGQSKRVDFCGKGYHLMSFPQSAPHGVVFLHVTYVPAQEKNFTTAPAICHDGKAHFPREGVFVSNGTHWFVTQRNFYEPQIITTDNTFVSGNCDVVIGIVNNTVYDPLQPELDSFKEELDKYFKNHTSPDVDLGDISGINASVVNIQKEIDRLNEVAKNLNESLIDLQELGKYEQYIKWPWYIWLGFIAGLIAIVMVTIMLCCMTSCCSCLKGCCSCGSCCKFDEDDSEPVLKGVKLHYT

SEQ ID NO: 985 - protein, 1273 aa, Artificial Sequence
  SARS-CoV-2/Iceland/192/2020__EPI_ISL_417819 spike protein (1-1273)(Q965C_S1003C)
MFVFFVLLPLVSSQCVNLTTRTQLPPAYTNSFTRGVYYPDKVFRSSVLHSTQDLFLPFFSNVTWFHAIHVSGTNGTKRFDNPVLPFNDGVYFASTEKSNIIRGWIFGTTLDSKTQSLLIVNNATNVVIKVCEFQFCNDPFLGVYYHKNNKSWMESEFRVYSSANNCTFEYVSQPFLMDLEGKQGNFKNLREFVFKNIDGYFKIYSKHTPINLVRDLPQGFSALEPLVDLPIGINITRFQTLLALHRSYLTPGDSSSGWTAGAAAYYVGYLQPRTFLLKYNENGTITDAVDCALDPLSETKCTLKSFTVEKGIYQTSNFRVQPTESIVRFPNITNLCPFGEVFNATRFASVYAWNRKRISNCVADYSVLYNSASFSTFKCYGVSPTKLNDLCFTNVYADSFVIRGDEVRQIAPGQTGKIADYNYKLPDDFTGCVIAWNSNNLDSKVGGNYNYLYRLFRKSNLKPFERDISTEIYQAGSTPCNGVEGFNCYFPLQSYGFQPTNGVGYQPYRVVVLSFELLHAPATVCGPKKSTNLVKNKCVNFNFNGLTGTGVLTESNKKFLPFQQFGRDIADTTDAVRDPQTLEILDITPCSFGGVSVITPGTNTSNQVAVLYQGVNCTEVPVAIHADQLTPTWRVYSTGSNVFQTRAGCLIGAEHVNNSYECDIPIGAGICASYQTQTNSPRRARSVASQSIIAYTMSLGAENSVAYSNNSIAIPTNFTISVTTEILPVSMTKTSVDCTMYICGDSTECSNLLLQYGSFCTQLNRALTGIAVEQDKNTQEVFAQVKQIYKTPPIKDFGGFNFSQILPDPSKPSKRSFIEDLLFNKVTLADAGFIKQYGDCLGDIAARDLICAQKFNGLTVLPPLLTDEMIAQYTSALLAGTITSGWTFGAGAALQIPFAMQMAYRFNGIGVTQNVLYENQKLIANQFNSAIGKIQDSLSSTASALGKLQDVVNQNAQALNTLVKCLSSNFGAISSVLNDILSRLDKVEAEVQIDRLITGRLQCLQTYVTQQLIRAAEIRASANLAATKMSECVLGQSKRVDFCGKGYHLMSFPQSAPHGVVFLHVTYVPAQEKNFTTAPAICHDGKAHFPREGVFVSNGTHWFVTQRNFYEPQIITTDNTFVSGNCDVVIGIVNNTVYDPLQPELDSFKEELDKYFKNHTSPDVDLGDISGINASVVNIQKEIDRLNEVAKNLNESLIDLQELGKYEQYIKWPWYIWLGFIAGLIAIVMVTIMLCCMTSCCSCLKGCCSCGSCCKFDEDDSEPVLKGVKLHYT

SEQ ID NO: 986 - protein, 1273 aa, Artificial Sequence
  SARS-CoV-2/Belgium/ULG-6939/2020__EPI_ISL_417020 spike protein (1-1273)(Q965C_S1003C)
MFVFLVLLPLVSSQCVNLTTRTQLPPAYTNSFTRGVYYPDKVFRSSVLHSTQDLFLPFFSNVTWFHAIHVSGTNGTKRFDNPVLPFNDGVYFASTEKSNIIRGWIFGTTLDSKTQSLLIVNNATNVVIKVCEFQFCNDPFLGVYYHKNNKSWMESEFRVYSSANNCTFEYVSQPFLMDLEGKQGNFKNLREFVFKNIDGYFKIYSKHTPINLVRDLPQGFSALEPLVDLPIGINITRFQTLLALHRSYLTPGDSSSGWTAGAAAYYVGYLQPRTFLLKYNENGTITDAVDCALDPLSETKCTLKSFTVEKGIYQTSNFRVQPTESIVRFPNITNLCPFGEVFNATRFASVYAWNRKRISNCVADYSVLYNSASFSTFKCYGVSPTKLNDLCFTNVYADSFVIRGDEVRQIAPGQTGKIADYNYKLPDDFTGCVIAWNSNNLDSKVGGNYNYLYRLFRKSNLKPFERDISTEIYQAGSTPCNGVEGFNCYFPLQSYGFQPTNGVGYQPYRVVVLSFELLHAPATVCGPKKSTNLVKNKCVNFNFNGLTGTGVLTESNKKFLPFQQFGRDIADTTDAVRDPQTLEILDITPCSFGGVSVITPGTNTSNQVAVLYQGVNCTEVPVAIHADQLTPTWRVYSTGSNVFQTRAGCLIGAEHVNNSYECDIPIGAGICASYQTQTNSPRRARSVASQSIIAYTMSLGAENSVVYSNNSIAIPTNFTISVTTEILPVSMTKTSVDCTMYICGDSTECSNLLLQYGSFCTQLNRALTGIAVEQDKNTQEVFAQVKQIYKTPPIKDFGGFNFSQILPDPSKPSKRSFIEDLLFNKVTLADAGFIKQYGDCLGDIAARDLICAQKFNGLTVLPPLLTDEMIAQYTSALLAGTITSGWTFGAGAALQIPFAMQMAYRFNGIGVTQNVLYENQKLIANQFNSAIGKIQDSLSSTASALGKLQDVVNQNAQALNTLVKCLSSNFGAISSVLNDILSRLDKVEAEVQIDRLITGRLQCLQTYVTQQLIRAAEIRASANLAATKMSECVLGQSKRVDFCGKGYHLMSFPQSAPHGVVFLHVTYVPAQEKNFTTAPAICHDGKAHFPREGVFVSNGTHWFVTQRNFYEPQIITTDNTFVSGNCDVVIGIVNNTVYDPLQPELDSFKEELDKYFKNHTSPDVDLGDISGINASVVNIQKEIDRLNEVAKNLNESLIDLQELGKYEQYIKWPWYIWLGFIAGLIAIVMVTIMLCCMTSCCSCLKGCCSCGSCCKFDEDDSEPVLKGVKLHYT

SEQ ID NO: 987 - protein, 1273 aa, Artificial Sequence
  SARS-CoV-2/France/HF2496/2020__EPI_ISL_418231 spike protein (1-1273)(Q965C_S1003C)
MFVFLVLLPLVSSQCVNLTTRTQLPPAYTNSFTRGVYYPDKVFRSSVLHSTQDLFLPFFSNVTWFHAIHVSGTNGTKRFDNPVLPFNDGVYFASTEKSNIIRGWIFGTTLDSKTQSLLIVNNATNVVIKVCEFQFCNDPFLGVYYHKNNKSWMESEFRVYSSANNCTFEYVSQPFLMDLEGKQGNFKNLREFVFKNIDGYFKIYSKHTPINLVRDLPQGFSALEPLVDLPIGINITRFQTLLALHRSYLTPGDSSSGWTAGAAAYYVGYLQPRTFLLKYNENGTITDAVDCALDPLSETKCTLKSFTVEKGIYQTSNFRVQPTESIVRFPNITNLCPFGEVFNATRFASVYAWNRKRISNCVADYSVLYNSASFSTFKCYGVSPTKLNDLCFTNVYADSFVIRGDEVRQIAPGQTGKIADYNYKLPDDFTGCVIAWNSNNLDSKVGGNYNYLYRLFRKSNLKPFERDISTEIYQAGSTPCNGVEGFNCYFPLQSYGFQPTNGVGYQPYRVVVLSFELLHAPATVCGPKKSTNLVKNKCVNFNFNGLTGTGVLTESNKKFLPFQQFGRDIADTTDAVRDPQTLEILDITPCSFGGVSVITPGTNTSNQVAVLYQGVNCTEVPVAIHADQLTPTWRVYSTGSNVFQTRAGCLIGAEHVNNSYECDIPIGAGICASYQTQTNSPRRARSVASQSIIAYTMSLGAENSVAYSNNSIAIPTNFTISVTTEILPVSMTKTSVDCTMYICGDSTECSNLLLQYGSFCTQLNRALTGIAVEQDKNTQEVFAQVKQIYKTPPIKDFGGFNFSQILPDPSKPSKRSFIEDLLFNKVTLADAGFIKQYGDCLGDIVARDLICAQKFNGLTVLPPLLTDEMIAQYTSALLAGTITSGWTFGAGAALQIPFAMQMAYRFNGIGVTQNVLYENQKLIANQFNSAIGKIQDSLSSTASALGKLQDVVNQNAQALNTLVKCLSSNFGAISSVLNDILSRLDKVEAEVQIDRLITGRLQCLQTYVTQQLIRAAEIRASANLAATKMSECVLGQSKRVDFCGKGYHLMSFPQSAPHGVVFLHVTYVPAQEKNFTTAPAICHDGKAHFPREGVFVSNGTHWFVTQRNFYEPQIITTDNTFVSGNCDVVIGIVNNTVYDPLQPELDSFKEELDKYFKNHTSPDVDLGDISGINASVVNIQKEIDRLNEVAKNLNESLIDLQELGKYEQYIKWPWYIWLGFIAGLIAIVMVTIMLCCMTSCCSCLKGCCSCGSCCKFDEDDSEPVLKGVKLHYT

SEQ ID NO: 988 - protein, 1273 aa, Artificial Sequence
  SARS-CoV-2/USA/WA-UW291/2020__EPI_ISL_418076 spike protein (1-1273)(Q965C_S1003C)
MFVFLVLLPLVSSQCVNLTTRTQLPPAYTNSFTRGVYYPDKVFRSSVLHSTQDLFLPFFSNVTWFHAIHVSGTNGTKRFDNPVLPFNDGVYFASTEKSNIIRGWIFGTTLDSKTQSLLIVNNATNVVIKVCEFQFCNDPFLGVYYHKNNKSWMESEFRVYSSANNCTFEYVSQPFLMDLEGKQGNFKNLREFVFKNIDGYFKIYSKHTPINLVRDLPQGFSALEPLVDLPIGINITRFQTLLALHRSYLTPGDSSSGWTAGAAAYYVGYLQPRTFLLKYNENGTITDAVDCALDPLSETKCTLKSFTVEKGIYQTSNFRVQPTESIVRFPNITNLCPFGEVFNATRFASVYAWNRKRISNCVADYSVLYNSASFSTFKCYGVSPTKLNDLCFTNVYADSFVIRGDEVRQIAPGQTGKIADYNYKLPDDFTGCVIAWNSNNLDSKVGGNYNYLYRLFRKSNLKPFERDISTEIYQAGSTPCNGVEGFNCYFPLQSYGFQPTNGVGYQPYRVVVLSFELLHAPATVCGPKKSTNLVKNKCVNFNFNGLTGTGVLTESNKKFLPFQQFGRDIADTTDAVRDPQTLEILDITPCSFGGVSVITPGTNTSNQVAVLYQGVNCTEVPVAIHADQLTPTWRVYSTGSNVFQTRAGCLIGAEHVNNSYECDIPIGAGICASYQTQTNSPRRARSVASQSIIAYTMSLGAENSVAYSNNSIAIPTNFTISVTTEILPVSMTKTSVDCTMYICGDSTECSNLLLQYGSFCTQLNRALTGIAVEQDKNTQEVFAQVKQIYKTPPIKDFGGFNFSQILPDPSKPSKRSFIEDLLFNKVTLADAGFIKQYGDCLGDIAARDLICAQKFNGLTVLPPLLTDEMIAQYTSALLAGTITSGWTFGAGAALQIPFAMQMAYRFNGIGVTQNVLYENQKLIANQFNSAIGKIQYSLSSTASALGKLQDVVNQNAQALNTLVKCLSSNFGAISSVLNDILSRLDKVEAEVQIDRLITGRLQCLQTYVTQQLIRAAEIRASANLAATKMSECVLGQSKRVDFCGKGYHLMSFPQSAPHGVVFLHVTYVPAQEKNFTTAPAICHDGKAHFPREGVFVSNGTHWFVTQRNFYEPQIITTDNTFVSGNCDVVIGIVNNTVYDPLQPELDSFKEELDKYFKNHTSPDVDLGDISGINASVVNIQKEIDRLNEVAKNLNESLIDLQELGKYEQYIKWPWYIWLGFIAGLIAIVMVTIMLCCMTSCCSCLKGCCSCGSCCKFDEDDSEPVLKGVKLHYT

SEQ ID NO: 989 - protein, 1273 aa, Artificial Sequence
  SARS-CoV-2/Portugal/PT0034/2020__EPI_ISL_418019 spike protein (1-1273)(Q965C_S1003C)
MFVFLVLLPLVSSQCVNLTTRTQLPPAYTNSFTRGVYYPDKVFRSSVLHSTQDLFLPFFSNVTWFHAIHVSGTNGTKRFDNPVLPFNDGVYFASTEKSNIIRGWIFGTTLDSKTQSLLIVNNATNVVIKVCEFQFCNDPFLGVYYHKNNKSWMESEFRVYSSANNCTFEYVSQPFLMDLEGKQGNFKNLREFVFKNIDGYFKIYSKHTPINLVRDLPQGFSALEPLVDLPIGINITRFQTLLALHRSYLTPGDSSSGWTAGAAAYYVGYLQPRTFLLKYNENGTITDAVDCALDPLSETKCTLKSFTVEKGIYQTSNFRVQPTESIVRFPNITNLCPFGEVFNATRFASVYAWNRKRISNCVADYSVLYNSASFSTFKCYGVSPTKLNDLCFTNVYADSFVIRGDEVRQIAPGQTGKIADYNYKLPDDFTGCVIAWNSNNLDSKVGGNYNYLYRLFRKSNLKPFERDISTEIYQAGSTPCNGVEGFNCYFPLQSYGFQPTNGVGYQPYRVVVLSFELLHAPATVCGPKKSTNLVKNKCVNFNFNGLTGTGVLTESNKKFLPFQQFGRDIADTTDAVRDPQTLEILDITPCSFGGVSVITPGTNTSNQVAVLYQGVNCTEVPVAIHADQLTPTWRVYSTGSNVFQTRAGCLIGAEHVNNSYECDIPIGAGICASYQTQTNSPRRARSVASQSIIAYTMSLGAENSVAYSNNSIAIPTNFTISVTTEILPVSMTKTSVDCTMYICGDSTECSNLLLQYGSFCTQLNRALTGIAVEQDKNTQEVFAQVKQIYKTPPIKDFGGFNFSQILPDPSKPSKRSFIEDLLFNKVTLADAGFIKQYGDCLGDIAARDLICAQKFNGLTVLPPLLTDEMIAQYTSALLAGTITSGWTFGAGAALQIPFAMQMAYRFNGIGVTQNVLYENQKLIANQFNSAIGKIQDSLSSTASALGKLQDVVNQNAQALNTLVKCLSSNFGAISSVLNDILSRLDKVEAEVQIDRLITGRLQCLQTYVTQQLIRAAEIRASANLAATKMSECVLGQSKRVDFCGKGYHLMSFPQSAPHGVVFLHVTYVPAQEKNFTTAPAICHDGKAHFPREGVFVSNGTHWFVTQRNFYEPQIITTDNTFVSGNCDVVIGIVNNTVYDPLQPELDSFKEELDKYFKNHTSPDVDLGDISGINASVVNIQKEIDRLNEVAKNLNESLIDLQELGKYEQYIKWPWYIWLGFIAGLIAIVMVTIMLCCITSCCSCLKGCCSCGSCCKFDEDDSEPVLKGVKLHYT

SEQ ID NO: 990 - protein, 1273 aa, Artificial Sequence
  SARS-CoV-2/Iceland/202/2020__EPI_ISL_417750 spike protein (1-1273)(Q965C_S1003C)
MFVFLVLLPLVSSQCVNLTTRTQLPPAYTNSFTRGVYYPDKVFRSSVLHSTQDLFLPFFSNVTWFHAIHVSGTNGTKRFDNPVLPFNDGVYFASTEKSNIIRGWIFGTTLDSKTQSLLIVNNATNVVIKVCEFQFCNDPFLGVYYHKNNKSWMESEFRVYSSANNCTFEYVSQPFLMDLEGKQGNFKNLREFVFKNIDGYFKIYSKHTPINLVRDLPQGFSALEPLVDLPIGINITRFQTLLALHRSYLTPGDSSSGWTAGAAAYYVGYLQPRTFLLKYNENGTITDAVDCALDPLSETKCTLKSFTVEKGIYQTSNFRVQPTESIVRFPNITNLCPFGEVFNATRFASVYAWNRKRISNCVADYSVLYNSASFSTFKCYGVSPTKLNDLCFTNVYADSFVIRGDEVRQIAPGQTGKIADYNYKLPDDFTGCVIAWNSNNLDSKVGGNYNYLYRLFRKSNLKPFERDISTEIYQAGSTPCNGVEGFNCYFPLQSYGFQPTNGVGYQPYRVVVLSFELLHAPATVCGPKKSTNLVKNKCVNFNFNGLTGTGVLTESNKKFLPFQQFGRDIADTTDAVRDPQTLEILDITPCSFGGVSVITPGTNTSNQVAVLYQDVNCTEVPVAIHADQLTPTWRVYSTGSNVFQTRAGCLIGAEHVNNSYECDIPIGAGICASYQTQTNSPRRARSVASQSIIAYTMSLGAENSVAYSNNSIAIPTNFTISVTTEILPVSMTKTSVDCTMYICGDSTECSNLLLQYGSFCTQLNRALTGIAVEQDKNTQEVFAQVKQIYKTPPIKDFGGFNFSQILPDPSKPSKRSFIEDLLFNKVTLADAGFIKQYGDCLGDIAARDLICAQKFNGLTVLPPLLTDEMIAQYTSALLAGTITSGWTFGAGAALQIPFAMQMAYRFNGIGVTQNVLYENQKLIANQFNSAIGKIQDSLSSTASALGKLQDVVNQNAQALNTLVKCLSSNFGAISSVLNDILSRLDKVEAEVQIDRLITGRLQCLQTYVTQQLIRAAEIRASANLAATKMSECVLGQSKRVDFCGKGYHLMSFPQSAPHGVVFLHVTYVPAQEKNFTTAPAICHDGKAHFPREGVFVSNGTHWFVTQRNFYEPQIITTDNTFVSGNCDVVIGIVNNTVYDPLQPELDSFKEELDKYFKNHTSPDVDLGDIPGINASVVNIQKEIDRLNEVAKNLNESLIDLQELGKYEQYIKWPWYIWLGFIAGLIAIVMVTIMLCCMTSCCSCLKGCCSCGSCCKFDEDDSEPVLKGVKLHYT

SEQ ID NO: 991 - protein, 1273 aa, Artificial Sequence
  SARS-CoV-2/USA/WA-UW261/2020__EPI_ISL_418046 spike protein (1-1273)(Q965C_S1003C)
MFVFLVLLPLVSSQCVNLTTRTQLPPAYTNSFTRGVYYPDKVFRSSVLHSTQDLFLPFFSNVTWFHAIHVSGTNGTKRFDNPVLPFNDGVYFASTEKSNIIRGWIFGTTLDSKTQSLLIVNNATNVVIKVCEFQFCNDPFLGVYYHKNNKSWMESEFRVYSSANNCTFEYVSQPFLMDLEGKQGNFKNLREFVFKNIDGYFKIYSKHTPINLVRDLPQGFSALEPLVDLPIGINITRFQTLLALHRSYLTPGDSSSGWTAGAAAYYVGYLQPRTFLLKYNENGTITDAVDCALDPLSETKCTLKSFTVEKGIYQTSNFRVQPTESIVRFPNITNLCPFGEVFNATRFTSVYAWNRKRISNCVADYSVLYNSASFSTFKCYGVSPTKLNDLCFTNVYADSFVIRGDEVRQIAPGQTGKIADYNYKLPDDFTGCVIAWNSNNLDSKVGGNYNYLYRLFRKSNLKPFERDISTEIYQAGSTPCNGVEGFNCYFPLQSYGFQPTNGVGYQPYRVVVLSFELLHAPATVCGPKKSTNLVKNKCVNFNFNGLTGTGVLTESNKKFLPFQQFGRDIADTTDAVRDPQTLEILDITPCSFGGVSVITPGTNTSNQVAVLYQDVNCTEVPVAIHADQLTPTWRVYSTGSNVFQTRAGCLIGAEHVNNSYECDIPIGAGICASYQTQTNSPRRARSVASQSIIAYTMSLGAENSVAYSNNSIAIPTNFTISVTTEILPVSMTKTSVDCTMYICGDSTECSNLLLQYGSFCTQLNRALTGIAVEQDKNTQEVFAQVKQIYKTPPIKDFGGFNFSQILPDPSKPSKRSFIEDLLFNKVTLADAGFIKQYGDCLGDIAARDLICAQKFNGLTVLPPLLTDEMIAQYTSALLAGTITSGWTFGAGAALQIPFAMQMAYRFNGIGVTQNVLYENQKLIANQFNSAIGKIQDSLSSTASALGKLQDVVNQNAQALNTLVKCLSSNFGAISSVLNDILSRLDKVEAEVQIDRLITGRLQCLQTYVTQQLIRAAEIRASANLAATKMSECVLGQSKRVDFCGKGYHLMSFPQSAPHGVVFLHVTYVPAQEKNFTTAPAICHDGKAHFPREGVFVSNGTHWFVTQRNFYEPQIITTDNTFVSGNCDVVIGIVNNTVYDPLQPELDSFKEELDKYFKNHTSPDVDLGDISGINASVVNIQKEIDRLNEVAKNLNESLIDLQELGKYEQYIKWPWYIWLGFIAGLIAIVMVTIMLCCMTSCCSCLKGCCSCGSCCKFDEDDSEPVLKGVKLHYT

SEQ ID NO: 992 - protein, 1273 aa, Artificial Sequence
  SARS-CoV-2/Portugal/PT0035/2020__EPI_ISL_418020 spike protein (1-1273)(Q965C_S1003C)
MFVFLVLLPLVSSQCVNLTTRTQLPPAYTNSFTRGVYYPDKVFRSSVLHSTQDLFLPFFSNVTWFHAIHVSGTNGTKRFDNPVLPFNDGVYFASTEKSNIIRGWIFGTTLDSKTQSLLIVNNATNVVIKVCEFQFCNDPFLGVYYHKNNKSWMESEFRVYSSANNCTFEYVSQPFLMDLEGKQGNFKNLREFVFKNIDGYFKIYSKHTPINLVRDLPQGFSALEPLVDLPIGINITRFQTLLALHRSYLTPGDSSSGWTAGAAAYYVGYLQPRTFLLKYNENGTITDAVDCALDPLSETKCTLKSFTVEKGIYQTSNFRVQPTESIVRFPNITNLCPFGEVFNATRFASVYAWNRKRISNCVADYSVLYNSASFSTFKCYGVSPTKLNDLCFTNVYADSFVIRGDEVRQIAPGQTGKIADYNYKLPDDFTGCVIAWNSNNLDSKVGGNYNYLYRLFRKSNLKPFERDISTEIYQAGSTPCNGVEGFNCYFPLQSYGFQPTNGVGYQPYRVVVLSFELLHAPATVCGPKKSTNLVKNKCVNFNFNGLTGTGVLTESNKKFLPFQQFGRDIADTTDAVRDPQTLEILDITPCSFGGVSVITPGTNTSNQVAVLYQDVNCTEVPVAIHADQLTPTWRVYSTGSNVFQTRAGCLIGAEHVNNSYECDIPIGAGICASYQTQTNSPRRARSVASQSIIAYTMSLGAENSVAYSNNSIAIPTNFTISVTTEILPVSMTKTSVDCTMYICGDSTECSNLLLQYGSFCTQLNRALTGIAVEQDKNTQEVFAQVKQIYKTPPIKDFGGFNFSQILPDPSKPSKRSFIEDLLFNKVTLADAGFIKQYGDCLGDISARDLICAQKFNGLTVLPPLLTDEMIAQYTSALLAGTITSGWTFGAGAALQIPFAMQMAYRFNGIGVTQNVLYENQKLIANQFNSAIGKIQDSLSSTASALGKLQDVVNQNAQALNTLVKCLSSNFGAISSVLNDILSRLDKVEAEVQIDRLITGRLQCLQTYVTQQLIRAAEIRASANLAATKMSECVLGQSKRVDFCGKGYHLMSFPQSAPHGVVFLHVTYVPAQEKNFTTAPAICHDGKAHFPREGVFVSNGTHWFVTQRNFYEPQIITTDNTFVSGNCDVVIGIVNNTVYDPLQPELDSFKEELDKYFKNHTSPDVDLGDISGINASVVNIQKEIDRLNEVAKNLNESLIDLQELGKYEQYIKWPWYIWLGFIAGLIAIVMVTIMLCCMTSCCSCLKGCCSCGSCCKFDEDDSEPVLKGVKLHYT

SEQ ID NO: 993 - protein, 1273 aa, Artificial Sequence
  SARS-CoV-2/USA/NY-NYUMC7/2020__EPI_ISL_418192 spike protein (1-1273)(Q965C_S1003C)
MFVFLVLLPLVSSQCVNLTTRTQLPPAYTNSFTRGVYYPDKVFRSSVLHSTQDLFLPFFSNVTWFHAIHVSGTNGTKRFDNPVLPFNDGVYFASTEKSNIIRGWIFGTTLDSKTQSLLIVNNATNVVIKVCEFQFCNDPFLGVYHHKNNKSWMESEFRVYSSANNCTFEYVSQPFLMDLEGKQGNFKNLREFVFKNIDGYFKIYSKHTPINLVRDLPQGFSALEPLVDLPIGINITRFQTLLALHRSYLTPGDSSSGWTAGAAAYYVGYLQPRTFLLKYNENGTITDAVDCALDPLSETKCTLKSFTVEKGIYQTSNFRVQPTESIVRFPNITNLCPFGEVFNATRFASVYAWNRKRISNCVADYSVLYNSASFSTFKCYGVSPTKLNDLCFTNVYADSFVIRGDEVRQIAPGQTGKIADYNYKLPDDFTGCVIAWNSNNLDSKVGGNYNYLYRLFRKSNLKPFERDISTEIYQAGSTPCNGVEGFNCYFPLQSYGFQPTNGVGYQPYRVVVLSFELLHAPATVCGPKKSTNLVKNKCVNFNFNGLTGTGVLTESNKKFLPFQQFGRDIADTTDAVRDPQTLEILDITPCSFGGVSVITPGTNTSNQVAVLYQGVNCTEVPVAIHADQLTPTWRVYSTGSNVFQTRAGCLIGAEHVNNSYECDIPIGAGICASYQTQTNSPRRARSVASQSIIAYTMSLGAENSVAYSNNSIAIPTNFTISVTTEILPVSMTKTSVDCTMYICGDSTECSNLLLQYGSFCTQLNRALTGIAVEQDKNTQEVFAQVKQIYKTPPIKDFGGFNFSQILPDPSKPSKRSFIEDLLFNKVTLADAGFIKQYGDCLGDIAARDLICAQKFNGLTVLPPLLTDEMIAQYTSALLAGTITSGWTFGAGAALQIPFAMQMAYRFNGIGVTQNVLYENQKLIANQFNSAIGKIQDSLSSTASALGKLQDVVNQNAQALNTLVKCLSSNFGAISSVLNDILSRLDKVEAEVQIDRLITGRLQCLQTYVTQQLIRAAEIRASANLAATKMSECVLGQSKRVDFCGKGYHLMSFPQSAPHGVVFLHVTYVPAQEKNFTTAPAICHDGKAHFPREGVFVSNGTHWFVTQRNFYEPQIITTDNTFVSGNCDVVIGIVNNTVYDPLQPELDSFKEELDKYFKNHTSPDVDLGDISGINASVVNIQKEIDRLNEVAKNLNESLIDLQELGKYEQYIKWPWYIWLGFIAGLIAIVMVTIMLCCMTSCCSCLKGCCSCGSCCKFDEDDSEPVLKGVKLHYT

SEQ ID NO: 994 - protein, 1273 aa, Artificial Sequence
  SARS-CoV-2/Iceland/189/2020__EPI_ISL_417709 spike protein (1-1273)(Q965C_S1003C)
MFVFLVLLPLVSSQCVNLTTRTQLPPAYTNSFTRGVYYPDKVFRSSVLHSTQDLFLPFFSNVTWFHAIHVSGTNGTKRFDNPVLPFNDGVYFASTEKSNIIRGWIFGTTLDSKTQSLLIVNNATNVVIKVCEFQFCNDPFLGVYYHKNNKSWMESEFRVYSSANNCTFEYVSQPFLMDLEGKQGNFKNLREFVFKNIDGYFKIYSKHTPINLVRDLPQGFSALEPLVDLPIGINITRFQTLLALHRSYLTPGDSSSGWTAGAAAYYVGYLQPRTFLLKYNENGTITDAVDCALDPLSETKCTLKSFTVEKGIYQTSNFRVQPTESIVRFPNITNLCPFGEVFNATRFASVYAWNRKRISNCVADYSVLYNSASFSTFKCYGVSPTKLNDLCFTNVYADSFVIRGDEVRQIAPGQTGKIADYNYKLPDDFTGCVIAWNSNNLDSKVGGNYNYLYRLFRKSNLKPFERDISTEIYQAGSTPCNGVEGFNCYFPLQSYGFQPTNGVGYQPYRVVVLSFELLHAPATVCGPKKSTNLVKNKCVNFNFNGLTGTGVLTESNKKFLPFQQFGRDIADTTDAVRDPQTLEILDITPCSFGGVSVITPGTNTSNQVAVLYQGVNCTEVPVAIHADQLTPTWRVYSTGSNVFQTRAGCLIGAEHVNNSYECDIPIGAGICASYQTQTNSPRRARSVASQSIIAYTMSLGAENSVAYSNNSIAIPTNFTISVTTEILPVSMTKTSVDCTMYICGDSTECSNLLLQYGSFCTQLNRALTGIAVEQDKNTQEVFAQVKQIYKTPPIKDFGGFNFSQILPDPSKPSKRSFIEDLLFNKVTLADAGFTKQYGDCLGDIAARDLICAQKFNGLTVLPPLLTDEMIAQYTSALLAGTITSGWTFGAGAALQIPFAMQMAYRFNGIGVTQNVLYENQKLIANQFNSAIGKIQDSLSSTASALGKLQDVVNQNAQALNTLVKCLSSNFGAISSVLNDILSRLDKVEAEVQIDRLITGRLQCLQTYVTQQLIRAAEIRASANLAATKMSECVLGQSKRVDFCGKGYHLMSFPQSAPHGVVFLHVTYVPAQEKNFTTAPAICHDGKAHFPREGVFVSNGTHWFVTQRNFYEPQIITTDNTFVSGNCDVVIGIVNNTVYDPLQPELDSFKEELDKYFKNHTSPDVDLGDISGINASVVNIQKEIDRLNEVAKNLNESLIDLQELGKYEQYIKWPWYIWLGFIAGLIAIVMVTIMLCCMTSCCSCLKGCCSCGSCCKFDEDDSEPVLKGVKLHYT

SEQ ID NO: 995 - protein, 1273 aa, Artificial Sequence
  SARS-CoV-2/Australia/NSW56/2020__EPI_ISL_417408 spike protein (1-1273)(Q965C_S1003C)
MFVFLVLLPLVSSQCVNLTTRTQLPPAYTNSFTRGVYYPDKVFRSSVLHSTQDLFLPFFSNVTWFHAIHVSGTNGTKRFDNPVLPFNDGVYFASTEKSNIIRGWIFGTTLDSKTQSLLIVNNATNVVIKVCEFQFCNDPFLGVYYHKNNKSWMESEFRVYSSANNCTFEYVSQPFLMDLEGKQGNFKNLREFVFKNIDGYFKIYSKHTPINLVRDLPQGFSALEPLVDLPIGINITRFQTLLALHRSYLTPGDSSSGWTAGAAAYYVGYLQPRTFLLKYNENGTITDAVDCALDPLSETKCTLKSFTVEKGIYQTSNFRVQPTESIVRFPNITNLCPFGEVFNATRFASVYAWNRKRISNCVADYSVLYNSASFSTFKCYGVSPTKLNDLCFTNVYADSFVIRGDEVRQIAPGQTGKIADYNYKLPDDFTGCVIAWNSNNLDSKVGGNYNYLYRLFRKSNLKPFERDISTEIYQAGSTPCNGVEGFNCYFPLQSYGFQPTNGVGYQPYRVVVLSFELLHAPATVCGPKKSTNLVKNKCVNFNFNGLTGTGVLTESNKKFLPFQQFGRDIADTTDAVRDPQTLEILDITPCSFGGVSVITPGTNTSNQVAVLYQDVNCTEVPVAIHADQLTPTWRVYSTGSNVFQTRAGCLIGAEHVNNSYECDIPIGAGICASYQTQTNSPRRARSVASQSIIAYTMSLGAENSVAYSNNSIAIPTNFTISVTTEILPVSMTKTSVDCTMYICGDSTECSNLLLQYGSFCTQLNRALTGIAVEQDKNTQEVFAQVKQIYKTPPIKDFGGFNFSQILPDSSKPSKRSFIEDLLFNKVTLADAGFIKQYGDCLGDIAARDLICAQKFNGLTVLPPLLTDEMIAQYTSALLAGTITSGWTFGAGAALQIPFAMQMAYRFNGIGVTQNVLYENQKLIANQFNSAIGKIQDSLSSTASALGKLQDVVNQNAQALNTLVKCLSSNFGAISSVLNDILSRLDKVEAEVQIDRLITGRLQCLQTYVTQQLIRAAEIRASANLAATKMSECVLGQSKRVDFCGKGYHLMSFPQSAPHGVVFLHVTYVPAQEKNFTTAPAICHDGKAHFPREGVFVSNGTHWFVTQRNFYEPQIITTDNTFVSGNCDVVIGIVNNTVYDPLQPELDSFKEELDKYFKNHTSPDVDLGDISGINASVVNIQKEIDRLNEVAKNLNESLIDLQELGKYEQYIKWPWYIWLGFIAGLIAIVMVTIMLCCMTSCCSCLKGCCSCGSCCKFDEDDSEPVLKGVKLHYT

SEQ ID NO: 996 - protein, 1273 aa, Artificial Sequence
  SARS-CoV-2/Iceland/280/2020__EPI_ISL_417608 spike protein (1-1273)(Q965C_S1003C)
MFVFLVLLPLVSSQCVNLTTRTQLPPAYTNSFTRGVYYPDKVFRSSVLHSTQDLFLPFFSNVTWFHAIHVSGTNGTKRFDNPVLPFNDGVYFASTEKSNIIRGWIFGTTLDSKTQSLLIVNNATNVVIKVCEFQFCNDPFLGVYYHKNNKSWMESEFRVYSSANNCTFEYVSQPFLMDLEGKQGNFKNLREFVFKNIDGYFKIYSKHTPINLVRDLPQGFSALEPLVDLPIGINITRFQTLLALHRSYLTPGDSSSGWTAGAAAYYVGYLQPRTFLLKYNENGTITDAVDCALDPLSETKCTLKSFTVEKGIYQTSNFRVQPTESIVRFPNITNLCPFGEVFNATRFASVYAWNRKRISNCVADYSVLYNSASFSTFKCYGVSPTKLNDLCFTNVYADSFVIRGDEVRQIAPGQTGKIADYNYKLPDDFTGCVIAWNSNNLDSKVGGNYNYLYRLFRKSNLKPFERDISTEIYQAGSTPCNGVEGFNCYFPLQSYGFQPTNGVGYQPYRVVVLSFELLHAPATVCGPKKSTNLVKNKCVNFNFNGLTGTGVLTESNKKFLPFQQFGRDIADTTDAVRDPQTLEILDITPCSFGGVSVITPGTNTSNQVAVLYQGVNCTEVPVAIHADQLTPTWRVYSTGSNVFQTRAGCLIGAEHVNNSYECDIPIGAGICASYHTQTNSPRRARSVASQSIIAYTMSLGAENSVAYSNNSIAIPTNFTISVTTEILPVSMTKTSVDCTMYICGDSTECSNLLLQYGSFCTQLNRALTGIAVEQDKNTQEVFAQVKQIYKTPPIKDFGGFNFSQILPDPSKPSKRSFIEDLLFNKVTLADAGFIKQYGDCLGDIAARDLICAQKFNGLTVLPPLLTDEMIAQYTSALLAGTITSGWTFGAGAALQIPFAMQMAYRFNGIGVTQNVLYENQKLIANQFNSAIGKIQDSLSSTASALGKLQDVVNQNAQALNTLVKCLSSNFGAISSVLNDILSRLDKVEAEVQIDRLITGRLQCLQTYVTQQLIRAAEIRASANLAATKMSECVLGQSKRVDFCGKGYHLMSFPQSAPHGVVFLHVTYVPAQEKNFTTAPAICHDGKAHFPREGVFVSNGTHWFVTQRNFYEPQIITTDNTFVSGNCDVVIGIVNNTVYDPLQPELDSFKEELDKYFKNHTSPDVDLGDISGINASVVNIQKEIDRLNEVAKNLNESLIDLQELGKYEQYIKWPWYIWLGFIAGLIAIVMVTIMLCCMTSCCSCLKGCCSCGSCCKFDEDDSEPVLKGVKLHYT

SEQ ID NO: 997 - protein, 1273 aa, Artificial Sequence
  SARS-CoV-2/Iceland/247/2020__EPI_ISL_417575 spike protein (1-1273)(Q965C_S1003C)
MFVFLVLLPLVSSQCVNLTTRTQLPPAYTNSFTRGVYYPDKVFRSSVLHSTQDLFLPFFSNVTWFHAIHVSGTNGTKRFDNPVLPFNDGVYFASTEKSNIIRGWIFGTTLDSKTQSLLIVNNATNVVIKVCEFQFCNDPFLGVYYHKNNKSWMESEFRVYSSANNCTFEYVSQPFLMDLEGKQGNFKNLREFVFKNIDGYFKIYSKHTPINLVRDLPQGFSALEPLVDLPIGINITRFQTLLALHRSYLTPGDSSSGWTAGAAAYYVGYLQPRTFLLKYNENGTITDAVDCALDPLSETKCTLKSFTVEKGIYQTSNFRVQPTESIVRFPNITNLCPFGEVFNATRFASVYAWNRKRISNCVADYSVLYNSASFSTFKCYGVSPTKLNDLCFTNVYADSFVIRGDEVRQIAPGQTGKIADYNYKLPDDFTGCVIAWNSNNLDSKVGGNYNYLYRLFRKSNLKPFERDISTEIYQAGSTPCNGVEGFNCYFPLQSYGFQPTNGVGYQPYRVVVLSFELLHAPATVCGPKKSTNLVKNKCVNFNFNGLTGTGVLTESNKKFLPFQQFGRDIADTTDAVRDPQTLEILDITPCSFGGVSVITPGTNTSNQVAVLYQGVNCTEVPVAIHADQLTPTWRVYSTGSNVFQTRAGCLIGAEHVNNSYECDIPIGAGICASYQTQTNSPRRARSVASQSIIAYTMSLGAENSVAYSNNSIAIPTNFTISVTTEILPVSMTKTSVDCTMYICGDSTECSNLLLQYGSFCTQLNRALTGIAVEQDKNTQEVFAQVKQIYKTPPIKDFGGFNFSQILPDPSKPSKRSFIEDLLFNKVTLADAGFIKQYGDCLGDIAARDLICAQKFNGLTVLPPLLTDEMIAQYTSALLAGTITSGWTFGAGAALQIPFAMQMAYRFNGIGVTQNVLYENQKLIANQFNSAIGKIQDSLSSTASALGKLQDVVNQNAQALNTLVKCLSSNFGAISSVLNDILSRLDKVEAEVQIDRLITGRLQCLQTYVTQQLIRAAEIRASANLAATKMSECVLGQSKRVDFCGKGYHLMSFPQSAPHGVVFLHVTYVPAQEKNFTTAPAICHDGKAHFPREGVFVSNGTHWFVTQRNFYEPQIITTDNTFVSGNCDVVIGIVNNTVYDPLQPELDSFKEELDKYFKNHTSPDVDLGDISGINASVVNIQKEIDRLNEVAKNLNESLIDLQELGKYEQYIKWPWYIWLGFIAGLIAIVIVTIMLCCMTSCCSCLKGCCSCGSCCKFDEDDSEPVLKGVKLHYT

SEQ ID NO: 998 - protein, 1273 aa, Artificial Sequence
  SARS-CoV-2/Iceland/238/2020__EPI_ISL_417566 spike protein (1-1273)(Q965C_S1003C)
MFVFLVLLPLVSSQCVNLTTRTQLPPAYTNSFTRGVYYPDKVFRSSVLHSTQDLFLPFFSNVTWFHAIHVSGTNGTKRFDNPVLPFNDGVYFASTEKSNIIRGWIFGTTLDSKTQSLLIVNNATNVVIKVCEFQFCNDPFLGVYYHKNNKSWMESEFRVYSSANNCTFEYVSQPFLMDLEGKQGNFKNLREFVFKNIDGYFKIYSKHTPINLVRDLPQGFSALEPLVDLPIGINITRFQTLLALHRSYLTPGDSSSGWTAGAAAYYVGYLQPRTFLLKYNENGTITDAVDCALDPLSETKCTLKSFTVEKGIYQTSNFRVQPTESIVRFPNITNLCPFGEVFNATRFASVYAWNRKRISNCVADYSVLYNSASFSTFKCYGVSPTKLNDLCFTNVYADSFVIRGDEVRQIAPGQTGKIADYNYKLPDDFTGCVIAWNSNNLDSKVGGNYNYLYRLFRKSNLKPFERDISTEIYQAGSTPCNGVEGFNCYFPLQSYGFQPTNGVGYQPYRVVVLSFELLHAPATVCGPKKSTNLVKNKCVNFNFNGLTGTGVLTESNKKFLPFQQFGRDIADTTDAVRDPQTLEILDITPCSFGGVSVITPGTNTSNQVAVLYQGVNCTEVPVAIHADQLTPTWRVYSTGSNVFQTRAGCLIGAEHVNNSYECDIPIGAGICASYQTQTNSPRRARSVASQSIIAYTMSLGAENSVAYSNNSIAIPTNFTISVTTEILPVSMTKTSVDCTMYICGDSTECSNLLLQYGSFCTQLNRALTGIAVEQDKNTQEVFAQVKQIYKTPPIKDFGGFNFSQILPDPSKPSKRSFIEDLLFNKVTLADVGFIKQYGDCLGDIAARDLICAQKFNGLTVLPPLLTDEMIAQYTSALLAGTITSGWTFGAGAALQIPFAMQMAYRFNGIGVTQNVLYENQKLIANQFNSAIGKIQDSLSSTASALGKLQDVVNQNAQALNTLVKCLSSNFGAISSVLNDILSRLDKVEAEVQIDRLITGRLQCLQTYVTQQLIRAAEIRASANLAATKMSECVLGQSKRVDFCGKGYHLMSFPQSAPHGVVFLHVTYVPAQEKNFTTAPAICHDGKAHFPREGVFVSNGTHWFVTQRNFYEPQIITTDNTFVSGNCDVVIGIVNNTVYDPLQPELDSFKEELDKYFKNHTSPDVDLGDISGINASVVNIQKEIDRLNEVAKNLNESLIDLQELGKYEQYIKWPWYIWLGFIAGLIAIVMVTIMLCCMTSCCSCLKGCCSCGSCCKFDEDDSEPVLKGVKLHYT

SEQ ID NO: 999 - protein, 1273 aa, Artificial Sequence
  SARS-CoV-2/Greece/16/2020__EPI_ISL_418265 spike protein (1-1273)(Q965C_S1003C)
MFVFLVLLPLVSSQCVNLTTRTQLPPAYTNSFTRGVYYPDKVFRSSVLHSTQDLFLPFFSNVTWFHAIHVSGTNGTKRFDNPVLPFNDGVYFASTEKSNIIRGWIFGTTLDSKTQSLLIVNNATNVVIKVCEFQFCNDPFLGVYYHKNNKSWMESEFRVYSSANNCTFEYVSQPFLMDLEGKQGNFKNLREFVFKNVDGYFKIYSKHTPINLVRDLPQGFSALEPLVDLPIGINITRFQTLLALHRSYLTPGDSSSGWTAGAAAYYVGYLQPRTFLLKYNENGTITDAVDCALDPLSETKCTLKSFTVEKGIYQTSNFRVQPTESIVRFPNITNLCPFGEVFNATRFASVYAWNRKRISNCVADYSVLYNSASFSTFKCYGVSPTKLNDLCFTNVYADSFVIRGDEVRQIAPGQTGKIADYNYKLPDDFTGCVIAWNSNNLDSKVGGNYNYLYRLFRKSNLKPFERDISTEIYQAGSTPCNGVEGFNCYFPLQSYGFQPTNGVGYQPYRVVVLSFELLHAPATVCGPKKSTNLVKNKCVNFNFNGLTGTGVLTESNKKFLPFQQFGRDIADTTDAVRDPQTLEILDITPCSFGGVSVITPGTNTSNQVAVLYQDVNCTEVPVAIHADQLTPTWRVYSTGSNVFQTRAGCLIGAEHVNNSYECDIPIGAGICASYQTQTNSPRRARSVASQSIIAYTMSLGAENSVAYSNNSIAIPTNFTISVTTEILPVSMTKTSVDCTMYICGDSTECSNLLLQYGSFCTQLNRALTGIAVEQDKNTQEVFAQVKQIYKTPPIKDFGGFNFSQILPDPSKPSKRSFIEDLLFNKVTLADAGFIKQYGDCLGDIAARDLICAQKFNGLTVLPPLLTDEMIAQYTSALLAGTITSGWTFGAGAALQIPFAMQMAYRFNGIGVTQNVLYENQKLIANQFNSAIGKIQDSLSSTASALGKLQDVVNQNAQALNTLVKCLSSNFGAISSVLNDILSRLDKVEAEVQIDRLITGRLQCLQTYVTQQLIRAAEIRASANLAATKMSECVLGQSKRVDFCGKGYHLMSFPQSAPHGVVFLHVTYVPAQEKNFTTAPAICHDGKAHFPREGVFVSNGTHWFVTQRNFYEPQIITTDNTFVSGNCDVVIGIVNNTVYDPLQPELDSFKEELDKYFKNHTSPDVDLGDISGINASVVNIQKEIDRLNEVAKNLNESLIDLQELGKYEQYIKWPWYIWLGFIAGLIAIVMVTIMLCCMTSCCSCLKGCCSCGSCCKFDEDDSEPVLKGVKLHYT

SEQ ID NO: 1000 - protein, 1273 aa, Artificial Sequence
  SARS-CoV-2/Iceland/319/2020__EPI_ISL_417648 spike protein (1-1273)(Q965C_S1003C)
MFVFLVLLPLVSSQCVNLTTRTQLPPAYTNSFTRGVYYPDKVFRSSVLHSTQDLFLPFFSNVTWFHAIHVSGTNGTKRFDNPVLPFNDGVYFASTEKSNIIRGWIFGTTLDSKTQSLLIVNNATNVVIKVCEFQFCNDPFLGVYYHKNNKSWMESEFRVYSSANNCTFEYVSQPFLIDLEGKQGNFKNLREFVFKNIDGYFKIYSKHTPINLVRDLPQGFSALEPLVDLPIGINITRFQTLLALHRSYLTPGDSSSGWTAGAAAYYVGYLQPRTFLLKYNENGTITDAVDCALDPLSETKCTLKSFTVEKGIYQTSNFRVQPTESIVRFPNITNLCPFGEVFNATRFASVYAWNRKRISNCVADYSVLYNSASFSTFKCYGVSPTKLNDLCFTNVYADSFVIRGDEVRQIAPGQTGKIADYNYKLPDDFTGCVIAWNSNNLDSKVGGNYNYLYRLFRKSNLKPFERDISTEIYQAGSTPCNGVEGFNCYFPLQSYGFQPTNGVGYQPYRVVVLSFELLHAPATVCGPKKSTNLVKNKCVNFNFNGLTGTGVLTESNKKFLPFQQFGRDIADTTDAVRDPQTLEILDITPCSFGGVSVITPGTNTSNQVAVLYQGVNCTEVPVAIHADQLTPTWRVYSTGSNVFQTRAGCLIGAEHVNNSYECDIPIGAGICASYQTQTNSPRRARSVASQSIIAYTMSLGAENSVAYSNNSIAIPTNFTISVTTEILPVSMTKTSVDCTMYICGDSTECSNLLLQYGSFCTQLNRALTGIAVEQDKNTQEVFAQVKQIYKTPPIKDFGGFNFSQILPDPSKPSKRSFIEDLLFNKVTLADAGFIKQYGDCLGDIAARDLICAQKFNGLTVLPPLLTDEMIAQYTSALLAGTITSGWTFGAGAALQIPFAMQMAYRFNGIGVTQNVLYENQKLIANQFNSAIGKIQDSLSSTASALGKLQDVVNQNAQALNTLVKCLSSNFGAISSVLNDILSRLDKVEAEVQIDRLITGRLQCLQTYVTQQLIRAAEIRASANLAATKMSECVLGQSKRVDFCGKGYHLMSFPQSAPHGVVFLHVTYVPAQEKNFTTAPAICHDGKAHFPREGVFVSNGTHWFVTQRNFYEPQIITTDNTFVSGNCDVVIGIVNNTVYDPLQPELDSFKEELDKYFKNHTSPDVDLGDISGINASVVNIQKEIDRLNEVAKNLNESLIDLQELGKYEQYIKWPWYIWLGFIAGLIAIVMVTIMLCCMTSCCSCLKGCCSCGSCCKFDEDDSEPVLKGVKLHYT

SEQ ID NO: 1001 - protein, 1273 aa, Artificial Sequence
  SARS-CoV-2/Congo/94/2020__EPI_ISL_417947 spike protein (1-1273)(Q965C_S1003C)
MFVFLVLLPLVSSQCVNLTTRTQLPPAYTNSFTRGVYYPDKVFRSSVLHSTQDLFLPFFSNVTWFHAIHVSGTNGTKRFDNPVLPFNDGVYFASTEKSNIIRGWIFGTTLDSKTQSLLIVNNATNVVIKVCEFQFCNDPFLGVYYHKNNKSWMESEFRVYSSANNCTFEYVSQPFLMDLEGKQGNFKNLREFVFKNIDGYFKIYSKHTPINLVRDLPQGFSALEPLVDLPIGINITRFQTLLALHRSYLTPGDSSSGWTAGAAAYYVGYLQPRTFLLKYNENGTITDAVDCALDPLSETKCTLKSFTVEKGIYQTSNFRVQPTESIVRFPNITNLCPFGEVFNATRFASVYAWNRKRISNCVADYSVLYNSASFSTFKCYGVSPTKLNDLCFTNVYADSFVIRGDEVRQIAPGQTGKIADYNYKLPDDFTGCVIAWNSNNLDSKVGGNYNYLYRLFRKSNLKPFERDISTEIYQAGSTPCNGVEGFNCYFPLQSYGFQPTNGVGYQPYRVVVLSFELLHAPATVCGPKKSTNLVKNKCVNFNFNGLTGTGVLTESNKKFLPFQQFGRDIADTTDAVRDPQTLEILDITPCSFGGVSVITPGTNTSNQVAVLYQGVNCTEVPVAIHADQLTPTWRVYSTGSNVFQTRAGCLIGAEHVNNSYECDIPIGAGICASYQTQTNSPRRARSVASQSIIAYTMSLGAENSVAYSNNSIAIPTNFTISVTTEILPVSMTKTSVDCTMYICGDSTECSNLLLQYGSFCTQLNRALTGIAVEQDKNTQEVFAQVKQIYKTPPIKDFGGFNFSQILPDPSKPSKRSFIEDILFNKVTLADAGFIKQYGDCLGDIAARDLICAQKFNGLTVLPPLLTDEMIAQYTSALLAGTITSGWTFGAGAALQIPFAMQMAYRFNGIGVTQNVLYENQKLIANQFNSAIGKIQDSLSSTASALGKLQDVVNQNAQALNTLVKCLSSNFGAISSVLNDILSRLDKVEAEVQIDRLITGRLQCLQTYVTQQLIRAAEIRASANLAATKMSECVLGQSKRVDFCGKGYHLMSFPQSAPHGVVFLHVTYVPAQEKNFTTAPAICHDGKAHFPREGVFVSNGTHWFVTQRNFYEPQIITTDNTFVSGNCDVVIGIVNNTVYDPLQPELDSFKEELDKYFKNHTSPDVDLGDISGINASVVNIQKEIDRLNEVAKNLNESLIDLQELGKYEQYIKWPWYIWLGFIAGLIAIVMVTIMLCCMTSCCSCLKGCCSCGSCCKFDEDDSEPVLKGVKLHYT

SEQ ID NO: 1002 - protein, 1273 aa, Artificial Sequence
  SARS-CoV-2/Congo/158/2020__EPI_ISL_417950 spike protein (1-1273)(Q965C_S1003C)
MFVFLVLLPLVSSQCVNLTTRTQLPPAYTNSFTRGVYYPDKVFRSSVLHSTQDLFLPFFSNVTWFHAIHVSGTNGTKRFDNPVLPFNDGVYFASTEKSNIIRGWIFGTTLDSKTQSLLIVNNATNVVIKVCEFQFCNDPFLGVYYHKNNKSWMESEFRVYSSANNCTFEYVSQPFLMDLEGKQGNFKNLREFVFKNIDGYFKIYSKHTPINLVRDLPQGFSALEPLVDLPIGINITRFQTLLALHRSYLTPGDSSSGWTAGAAAYYVGYLQPRTFLLKYNENGTITDAVDCALDPLSETKCTLKSFTVEKGIYQTSNFRVQPTESIVRFPNITNLCPFGEVFNATRFASVYAWNRKRISNCVADYSVLYNSASFSTFKCYGVSPTKLNDLCFTNVYADSFVIRGDEVRQIAPGQTGKIADYNYKLPDDFTGCVIAWNSNNLDSKVGGNYNYLYRLFRKSNLKPFERDISTEIYQAGSTPCNGVEGFNCYFPLQSYGFQPTNGVGYQPYRVVVLSFELLHAPATVCGPKKSTNLVKNKCVNFNFNGLTGTGVLTESNKKFLPFQQFGRDIADTTDAVRDPQTLEILDITPCSFGGVSVITPGTNTSNQVAVLYQDVNCTEVPVAIHADQLTPTWRVYSTGSNVFQTRAGCLIGAEHVNNSYECDIPIGAGICASYQTQTNSPRRARSVASQSIIAYTMSLGAENSVAYSNNSIAIPTNFTISVTTEILPVSMTKTSVDCTMYICGDSTECSNLLLQYGSFCTQLNRALTGIAVEQDKNTQEVFAQVKQIYKTPPIKDFGGFNFSQILPDPSKPSKRSFIEDLLFNKVTLADAGFIKQYGDCLGDIAARDLICAQKFNGLTVLPPLLTDEMIAQYTSALLAGTITSGWTFGAGAALQIPFAMQMAYRFNGIGVTQNVLYENQKLIANQFNSAIGKIQDSLSSTASALGKLQDVVNQNAQALNTLVKCLSSNFGAISSVLNDILSRLDKVEAEVQIDRLITGRLQCLQTYVTQQLIRAAEIRASANLAATKMSECVLGQSKRVDFCGKGYHLMSFPQSAPHGVVFLHVTYVPAQEKNFTTAPAICHDGKAHFPREGVFVSNGTHWFVTQRNFYEPQIITTDNTFLSGNCDVVIGIVNNTVYDPLQPELDSFKEELDKYFKNHTSPDVDLGDISGINASVVNIQKEIDRLNEVAKNLNESLIDLQELGKYEQYIKWPWYIWLGFIAGLIAIVMVTIMLCCMTSCCSCLKGCCSCGSCCKFDEDDSEPVLKGVKLHYT

SEQ ID NO: 1003 - protein, 1273 aa, Artificial Sequence
  SARS-CoV-2/USA/UT-00034/2020__EPI_ISL_417977 spike protein (1-1273)(Q965C_S1003C)
MFVFLVLLPLVSSQCVNLTTRTQLPPAYTNSFTRGVYYPDKVFRSSVLHSTQDLFLPFFSNVTWFHAIHVSGTNGTKRFDNPVLPFNDGVYFASTEKSNIIRGWIFGTTLDSKTQSLLIVNNATNVVIKVCEFQFCNDPFLGVYYYKNNKSWMESEFRVYSSANNCTFEYVSQPFLMDLEGKQGNFKNLREFVFKNIDGYFKIYSKHTPINLVRDLPQGFSALEPLVDLPIGINITRFQTLLALHRSYLTPGDSSSGWTAGAAAYYVGYLQPRTFLLKYNENGTITDAVDCALDPLSETKCTLKSFTVEKGIYQTSNFRVQPTESIVRFPNITNLCPFGEVFNATRFASVYAWNRKRISNCVADYSVLYNSASFSTFKCYGVSPTKLNDLCFTNVYADSFVIRGDEVRQIAPGQTGKIADYNYKLPDDFTGCVIAWNSNNLDSKVGGNYNYLYRLFRKSNLKPFERDISTEIYQAGSTPCNGVEGFNCYFPLQSYGFQPTNGVGYQPYRVVVLSFELLHAPATVCGPKKSTNLVKNKCVNFNFNGLTGTGVLTESNKKFLPFQQFGRDIADTTDAVRDPQTLEILDITPCSFGGVSVITPGTNTSNQVAVLYQGVNCTEVPVAIHADQLTPTWRVYSTGSNVFQTRAGCLIGAEHVNNSYECDIPIGAGICASYQTQTNSPRRARSVASQSIIAYTMSLGAENSVAYSNNSIAIPTNFTISVTTEILPVSMTKTSVDCTMYICGDSTECSNLLLQYGSFCTQLNRALTGIAVEQDKNTQEVFAQVKQIYKTPPIKDFGGFNFSQILPDPSKPSKRSFIEDLLFNKVTLADAGFIKQYGDCLGDIAARDLICAQKFNGLTVLPPLLTDEMIAQYTSALLAGTITSGWTFGAGAALQIPFAMQMAYRFNGIGVTQNVLYENQKLIANQFNSAIGKIQDSLSSTASALGKLQDVVNQNAQALNTLVKCLSSNFGAISSVLNDILSRLDKVEAEVQIDRLITGRLQCLQTYVTQQLIRAAEIRASANLAATKMSECVLGQSKRVDFCGKGYHLMSFPQSAPHGVVFLHVTYVPAQEKNFTTAPAICHDGKAHFPREGVFVSNGTHWFVTQRNFYEPQIITTDNTFVSGNCDVVIGIVNNTVYDPLQPELDSFKEELDKYFKNHTSPDVDLGDISGINASVVNIQKEIDRLNEVAKNLNESLIDLQELGKYEQYIKWPWYIWLGFIAGLIAIVMVTIMLCCMTSCCSCLKGCCSCGSCCKFDEDDSEPVLKGVKLHYT

SEQ ID NO: 1004 - protein, 1273 aa, Artificial Sequence
  SARS-CoV-2/USA/UT-00033/2020__EPI_ISL_417976 spike protein (1-1273)(Q965C_S1003C)
MFVFLVLLPLVSSQCVNLTTRTQLPPAYTNSFTRGVYYPDKVFRSSVLHSTQDLFLPFFSNVTWFHAIHVSGTNGTKRFDNPVLPFNDGVYFASTEKSNIIRGWIFGTTLDSKTQSLLIVNNATNVVIKVCEFQFCNDPFLGVYYHKNNKSWMESEFRVYSSANNCTFEYVSQPFLMDLEGKQGNFKNLREFVFKNIDGYFKIYSKHTPINLVRDLPQGFSALEPLVDLPIGINITRFQTLLALHRSYLTPGDSSSGLTAGAAAYYVGYLQPRTFLLKYNENGTITDAVDCALDPLSETKCTLKSFTVEKGIYQTSNFRVQPTESIVRFPNITNLCPFGEVFNATRFASVYAWNRKRISNCVADYSVLYNSASFSTFKCYGVSPTKLNDLCFTNVYADSFVIRGDEVRQIAPGQTGKIADYNYKLPDDFTGCVIAWNSNNLDSKVGGNYNYLYRLFRKSNLKPFERDISTEIYQAGSTPCNGVEGFNCYFPLQSYGFQPTNGVGYQPYRVVVLSFELLHAPATVCGPKKSTNLVKNKCVNFNFNGLTGTGVLTESNKKFLPFQQFGRDIADTTDAVRDPQTLEILDITPCSFGGVSVITPGTNTSNQVAVLYQGVNCTEVPVAIHADQLTPTWRVYSTGSNVFQTRAGCLIGAEHVNNSYECDIPIGAGICASYQTQTNSPRRARSVASQSIIAYTMSLGAENSVAYSNNSIAIPTNFTISVTTEILPVSMTKTSVDCTMYICGDSTECSNLLLQYGSFCTQLNRALTGIAVEQDKNTQEVFAQVKQIYKTPPIKDFGGFNFSQILPDPSKPSKRSFIEDLLFNKVTLADAGFIKQYGDCLGDIAARDLICAQKFNGLTVLPPLLTDEMIAQYTSALLAGTITSGWTFGAGAALQIPFAMQMAYRFNGIGVTQNVLYENQKLIANQFNSAIGKIQDSLSSTASALGKLQDVVNQNAQALNTLVKCLSSNFGAISSVLNDILSRLDKVEAEVQIDRLITGRLQCLQTYVTQQLIRAAEIRASANLAATKMSECVLGQSKRVDFCGKGYHLMSFPQSAPHGVVFLHVTYVPAQEKNFTTAPAICHDGKAHFPREGVFVSNGTHWFVTQRNFYEPQIITTDNTFVSGNCDVVIGIVNNTVYDPLQPELDSFKEELDKYFKNHTSPDVDLGDISGINASVVNIQKEIDRLNEVAKNLNESLIDLQELGKYEQYIKWPWYIWLGFIAGLIAIVMVTIMLCCMTSCCSCLKGCCSCGSCCKFDEDDSEPVLKGVKLHYT

SEQ ID NO: 1005 - protein, 1273 aa, Artificial Sequence
  SARS-CoV-2/USA/WI-13/2020__EPI_ISL_417516 spike protein (1-1273)(Q965C_S1003C)
MFVFLVLLPLVSSQCVNLTTRTQLPPAYTNSFTRGVYYPDKVFRSSVLHSTQDLFLPFFSNVTWFHAIHVSGTNGTKRFDNPVLPFNDGVYFASTEKSNIIRGWIFGTTLDSKTQSLLIVNNATNVVIKVCEFQFCNDPFLGVYYHKNNKSWMESEFRVYSSANNCTFEYVSQPFLMDLEGKQGNFKNLREFVFKNIDGYFKIYSKHTPINLVRDLPQGFSALEPLVDLPIGINITRFQTLLALHRSYLTPGDSSSGWTAGAAAYYVGYLQPRTFLLKYNENGTITDAVDCALDPLSETKCTLKSFTVEKGIYQTSNFRVLPTESIVRFPNITNLCPFGEVFNATRFASVYAWNRKRISNCVADYSVLYNSASFSTFKCYGVSPTKLNDLCFTNVYADSFVIRGDEVRQIAPGQTGKIADYNYKLPDDFTGCVIAWNSNNLDSKVGGNYNYLYRLFRKSNLKPFERDISTEIYQAGSTPCNGVEGFNCYFPLQSYGFQPTNGVGYQPYRVVVLSFELLHAPATVCGPKKSTNLVKNKCVNFNFNGLTGTGVLTESNKKFLPFQQFGRDIADTTDAVRDPQTLEILDITPCSFGGVSVITPGTNTSNQVAVLYQGVNCTEVPVAIHADQLTPTWRVYSTGSNVFQTRAGCLIGAEHVNNSYECDIPIGAGICASYQTQTNSPRRARSVASQSIIAYTMSLGAENSVAYSNNSIAIPTNFTISVTTEILPVSMTKTSVDCTMYICGDSTECSNLLLQYGSFCTQLNRALTGIAVEQDKNTQEVFAQVKQIYKTPPIKDFGGFNFSQILPDPSKPSKRSFIEDLLFNKVTLADAGFIKQYGDCLGDIAARDLICAQKFNGLTVLPPLLTDEMIAQYTSALLAGTITSGWTFGAGAALQIPFAMQMAYRFNGIGVTQNVLYENQKLIANQFNSAIGKIQDSLSSTASALGKLQDVVNQNAQALNTLVKCLSSNFGAISSVLNDILSRLDKVEAEVQIDRLITGRLQCLQTYVTQQLIRAAEIRASANLAATKMSECVLGQSKRVDFCGKGYHLMSFPQSAPHGVVFLHVTYVPAQEKNFTTAPAICHDGKAHFPREGVFVSNGTHWFVTQRNFYEPQIITTDNTFVSGNCDVVIGIVNNTVYDPLQPELDSFKEELDKYFKNHTSPDVDLGDISGINASVVNIQKEIDRLNEVAKNLNESLIDLQELGKYEQYIKWPWYIWLGFIAGLIAIVMVTIMLCCMTSCCSCLKGCCSCGSCCKFDEDDSEPVLKGVKLHYT

SEQ ID NO: 1006 - protein, 1272 aa, Artificial Sequence
  SARS-CoV-2/India/1-27/2020__EPI_ISL_413522 spike protein (1-1272)(Q964C_S1002C)
MFVFLVLLPLVSSQCVNLTTRTQLPPAYTNSFTRGVYYPDKVFRSSVLHSTQDLFLPFFSNVTWFHAIHVSGTNGTKRFDNPVLPFNDGVYFASTEKSNIIRGWIFGTTLDSKTQSLLIVNNATNVVIKVCEFQFCNDPFLGVYHKNNKSWMESEFRVYSSANNCTFEYVSQPFLMDLEGKQGNFKNLREFVFKNIDGYFKIYSKHTPINLVRDLPQGFSALEPLVDLPIGINITRFQTLLALHRSYLTPGDSSSGWTAGAAAYYVGYLQPRTFLLKYNENGTITDAVDCALDPLSETKCTLKSFTVEKGIYQTSNFRVQPTESIVRFPNITNLCPFGEVFNATRFASVYAWNRKRISNCVADYSVLYNSASFSTFKCYGVSPTKLNDLCFTNVYADSFVIRGDEVIQIAPGQTGKIADYNYKLPDDFTGCVIAWNSNNLDSKVGGNYNYLYRLFRKSNLKPFERDISTEIYQAGSTPCNGVEGFNCYFPLQSYGFQPTNGVGYQPYRVVVLSFELLHAPATVCGPKKSTNLVKNKCVNFNFNGLTGTGVLTESNKKFLPFQQFGRDIADTTDAVRDPQTLEILDITPCSFGGVSVITPGTNTSNQVAVLYQDVNCTEVPVAIHADQLTPTWRVYSTGSNVFQTRAGCLIGAEHVNNSYECDIPIGAGICASYQTQTNSPRRARSVASQSIIAYTMSLGAENSVAYSNNSIAIPTNFTISVTTEILPVSMTKTSVDCTMYICGDSTECSNLLLQYGSFCTQLNRALTGIAVEQDKNTQEVFAQVKQIYKTPPIKDFGGFNFSQILPDPSKPSKRSFIEDLLFNKVTLADAGFIKQYGDCLGDIAARDLICAQKFNGLTVLPPLLTDEMIAQYTSALLAGTITSGWTFGAGAALQIPFAMQMAYRFNGIGVTQNVLYENQKLIANQFNSAIGKIQDSLSSTASALGKLQDVVNQNAQALNTLVKCLSSNFGAISSVLNDILSRLDKVEAEVQIDRLITGRLQCLQTYVTQQLIRAAEIRASANLAATKMSECVLGQSKRVDFCGKGYHLMSFPQSAPHGVVFLHVTYVPAQEKNFTTAPAICHDGKAHFPREGVFVSNGTHWFVTQRNFYEPQIITTDNTFVSGNCDVVIGIVNNTVYDPLQPELDSFKEELDKYFKNHTSPDVDLGDISGINASVVNIQKEIDRLNEVAKNLNESLIDLQELGKYEQYIKWPWYIWLGFIAGLIAIVMVTIMLCCMTSCCSCLKGCCSCGSCCKFDEDDSEPVLKGVKLHYT

SEQ ID NO: 1007 - protein, 1267 aa, Artificial Sequence
  SARS-CoV-2/pangolin/Guangxi/P4L/2017__EPI_ISL_410538 spike protein (1-1267)(Q959C_S997C)
MFVFLFVLPLVSSQCVNLTTRTGIPPGYTNSSTRGVYYPDKVFRSSILHLTQDLFLPFFSNVTWFNTINYQGGFKKFDNPVLPFNDGVYFASTEKSNIIRGWIFGTTLDARTQSLLIVNNATNVVIKVCEFQFCTDPFLGVYYHNNNKTWVENEFRVYSSANNCTFEYISQPFLMDLEGKQGNFKNLREFVFKNVDGYFKIYSKHTPIDLVRDLPRGFAALEPLVDLPIGINITRFQTLLALHRSYLTPGNLESGWTTGAAAYYVGYLQQRTFLLSYNQNGTITDAVDCSLDPLSETKCTLKSLTVEKGIYQTSNFRVQPTISIVRFPNITNLCPFGEVFNASKFASVYAWNRKRISNCVADYSVLYNSTSFSTFKCYGVSPTKLNDLCFTNVYADSFVVKGDEVRQIAPGQTGVIADYNYKLPDDFTGCVIAWNSVKQDALTGGNYGYLYRLFRKSKLKPFERDISTEIYQAGSTPCNGQVGLNCYYPLERYGFHPTTGVNYQPFRVVVLSFELLNGPATVCGPKLSTTLVKDKCVNFNFNGLTGTGVLTTSKKQFLPFQQFGRDISDTTDAVRDPQTLEILDITPCSFGGVSVITPGTNTSNQVAVLYQDVNCTEVPMAIHAEQLTPAWRVYSAGANVFQTRAGCLVGAEHVNNSYECDIPVGAGICASYHSMSSLRSVNQRSIIAYTMSLGAENSVAYSNNSIAIPTNFTISVTTEILPVSMTKTSVDCTMYICGDSIECSNLLLQYGSFCTQLNRALTGIAVEQDKNTQEVFAQVKQIYKTPPIKDFGGFNFSQILPDPSKPSKRSFIEDLLFNKVTLADAGFIKQYGDCLGDIAARDLICAQKFNGLTVLPPLLTDEMIAQYTSALLAGTITSGWTFGAGAALQIPFAMQMAYRFNGIGVTQNVLYENQKLIANQFNSAIGKIQDSLSSTASALGKLQDVVNQNAQALNTLVKCLSSNFGAISSVLNDILSRLDKVEAEVQIDRLITGRLQCLQTYVTQQLIRAAEIRASANLAATKMSECVLGQSKRVDFCGKGYHLMSFPQSAPHGVVFLHVTYVPAQEKNFTTAPAICHEGKAHFPREGVFVSNGTHWFITQRNFYEPQIITTDNTFVSGSCDVVIGIVNNTVYDPLQPELDSFKEELDKYFKNHTSPDVDLGDISGINASVVNIQKEIDRLNEVAKNLNESPIDLQELGKYEQYIKWPWYIWLGFIAGLIAIIMVTIMLCCMTSCCSCLKGCCSCGSCCKFDEDDSEPVLKGVKLHYT

SEQ ID NO: 1008 - protein, 1267 aa, Artificial Sequence
  SARS-CoV-2/pangolin/Guangxi/P5L/2017__EPI_ISL_410540 spike protein (1-1267)(Q959C_S997C)
MFVFLFVLPLVSSQCVNLTTRTGIPPGYTNSSTRGVYYPDKVFRSSILHLTQDLFLPFFSNVTWFNTINYQGGFKKFDNPVLPFNDGVYFASTEKSNIIRGWIFGTTLDARTQSLLIVNNATNVVIKVCEFQFCTDPFLGVYYHNNNKTWVENEFRVYSSANNCTFEYISQPFLMDLEGKQGNFKNLREFVFKNVDGYFKIYSKHTPIDLVRDLPRGFAALEPLVDLPIGINITRFQTLLALHRSYLTPGKLESGWTTGAAAYYVGYLQQRTFLLSYNQNGTITDAVDCSLDPLSETKCTLKSLTVEKGIYQTSNFRVQPTISIVRFPNITNLCPFGEVFNASKFASVYAWNRKRISNCVADYSVLYNSTSFSTFKCYGVSPTKLNDLCFTNVYADSFVVKGDEVRQIAPGQTGVIADYNYKLPDDFTGCVIAWNSVKQDALTGGNYGYLYRLFRKSKLKPFERDISTEIYQAGSTPCNGQVGLNCYYPLERYGFHPTTGVNYQPFRVVVLSFELLNGPATVCGPKLSTTLVKDKCVNFNFNGLTGTGVLTTSKKQFLPFQQFGRDISDTTDAVRDPQTLEILDITPCSFGGVSVITPGTNTSNQVAVLYQDVNCTEVPMAIHAEQLTPAWRVYSAGANVFQTRAGCLVGAEHVNNSYECDIPVGAGICASYHSMSSFRSVNQRSIIAYTMSLGAENSVAYSNNSIAIPTNFTISVTTEILPVSMTKTSVDCTMYICGDSIECSNLLLQYGSFCTQLNRALTGIAVEQDKNTQEVFAQVKQIYKTPPIKDFGGFNFSQILPDPSKPSKRSFIEDLLFNKVTLADAGFIKQYGDCLGDIAARDLICAQKFNGLTVLPPLLTDEMIAQYTSALLAGTITSGWTFGAGAALQIPFAMQMAYRFNGIGVTQNVLYENQKLIANQFNSAIGKIQDSLSSTASALGKLQDVVNQNAQALNTLVKCLSSNFGAISSVLNDILSRLDKVEAEVQIDRLITGRLQCLQTYVTQQLIRAAEIRASANLAATKMSECVLGQSKRVDFCGKGYHLMSFPQSAPHGVVFLHVTYVPAQEKNFTTAPAICHEGKAHFPREGVFVSNGTHWFITQRNFYEPQIITTDNTFVSGSCDVVIGIVNNTVYDPLQPELDSFKEELDKYFKNHTSPDVDLGDISGINASVVNIQKEIDRLNEVAKNLNESLIDLQELGKYEQYIKWPWYIWLGFIAGLIAIIMVTIMLCCMTSCCSCLKGCCSCGSCCKFDEDDSEPVLKGVKLHYT

SEQ ID NO: 1009 - protein, 1267 aa, Artificial Sequence
  SARS-CoV-2/pangolin/Guangxi/P5E/2017__EPI_ISL_410541 spike protein (1-1267)(Q959C_S997C)
MFVFLFVLPLVSSQCVNLTTRTGIPPGYTNSSTRGVYYPDKVFRSSILHLTQDLFLPFFSNVTWFNTITYQGGSKKFDNPVLPFNDGVYFASTEKSNIIRGWIFGTTLDARTQSLLIVNNATNVVIKVCEFQFCTDPFLGVYYHNNNKTWVENEFRVYSSANNCTFEYISQPFLMDLEGKQGNFKNLREFVFKNVDGYFKIYSKHTPIDLVRDLPRGFAALEPLVDLPIGINITRFQTLLALHRSYLTPGKLESGWTTGAAAYYVGYLQQRTFLLSYNQNGTITDAVDCSLDPLSETKCTLKSLTVEKGIYQTSNFRVQPTISIVRFPNITNLCPFGEVFNASKFASVYAWNRKRISNCVADYSVLYNSTSFSTFKCYGVSPTKLNDLCFTNVYADSFVVKGDEVRQIAPGQTGVIADYNYKLPDDFTGCVIAWNSVKQDALTGDNYGYLYRLFRKSKLKPFERDISTEIYQAGSTPCNGQVGLNCYYPLERYGFHPTTGVNYQPFRVVVLSFELLNGPATVCGPKLSTTLVKDKCVNFNFNGLTGTGVLTTSKKQFLPFQQFGRDISDTTDAVRDPQTLEILDITPCSFGGVSVITPGTNTSNQVAVLYQDVNCTEVPMAIHAEQLTPAWRVYSAGANVFQTRAGCLVGAEHVNNSYECDIPVGAGICASYHSMSSFRSVNQRSIIAYTMSLGAENSVAYSNNSIAIPTNFTISVTTEILPVSMTKTSVDCTMYICGDSIECSNLLLQYGSFCTQLNRALTGIAVEQDKNTQEVFAQVKQIYKTPPIKDFGGFNFSQILPDPSKPSKRSFIEDLLFNKVTLADAGFIKQYGDCLGDIAARDLICAQKFNGLTVLPPLLTDEMIAQYTSALLAGTITSGWTFGAGAALQIPFAMQMAYRFNGIGVTQNVLYENQKLIANQFNSAIGKIQDSLSSTASALGKLQDVVNQNAQALNTLVKCLSSNFGAISSVLNDILSRLDKVEAEVQIDRLITGRLQCLQTYVTQQLIRAAEIRASANLAATKMSECVLGQSKRVDFCGKGYHLMSFPQSAPHGVVFLHVTYVPAQEKNFTTAPAICHEGKAHFPREGVFVSNGTHWFITQRNFYEPQIITTDNTFVSGSCDVVIGIVNNTVYDPLQPELDSFKEELDKYFKNHTSPDVDLGDISGINASVVNIQKEIDRLNEVAKNLNESLIDLQELGKYEQYIKWPWYIWLGFIAGLIAIIMVTIMLCCMTSCCSCLKGCCSCGSCCKFDEDDSEPVLKGVKLHYT

SEQ ID NO: 1010 - protein, 1265 aa, Artificial Sequence
  SARS-CoV-2/pangolin/Guangxi/P1E/2017__EPI_ISL_410539 spike protein (1-1265)(Q957C_S995C)
MFVFLFVLPLVSSQCVNLTTRTGIQPGYTNSSTRGVYYPDKVFRSSILHLTQDLFLPFFSNVTWFNTINYQGGFKKFDNPVLPFNDGVYFASTEKSNIIRGWIFGTTLDARTQSLLIVNNATNVVIKVCEFQFCTDPFLGVYYHNNNKTWVENEFRVYSSANNCTFEYISQPFLMDLEGKQGNFKNLREFVFKNVDGYFKIYSKHTPIDLVRDLPRGFAALEPLVDLPIGINITRFQTLLALHRSYLTPGKLESGWTTGAAAYYVGYLQQRTFLLSYNQNGTITDAVDCSLDPLSETKCTLKSLTVEKGIYQTSNFRVQPTISIVRFPNITNLCPFGEVFNASKFASVYAWNRKRISNCVADYSVLYNSTSFSTFKCYGVSPTKLNDLCFTNVYADSFVVKGDEVRQIAPGQTGVIADYNYKLPDDFTGCVIAWNSVKQDALTGGNYLYRLFRKSKLKPFERDISTEIYQAGSTPCNGQVGLNCYYPLERYGFHPTTGVNYQPFRVVVLSFELLNGPATVCGPKLSTTLVKDKCVNFNFNGLTGTGVLTTSKKQFLPFQQFGRDISDTTDAVRDPQTLEILDITPCSFGGVSVITPGTNTSNQVAVLYQDVNCTEVPMAIHAEQLTPAWRVYSAGANVFQTRAGCLVGAEHVNNSYECDIPVGAGICASYHSMSSLRSVNQRSIIAYTMSLGAENSVAYSNNSIAIPTNFTISVTTEILPVSMTKTSVDCTMYICGDSIECSNLLLQYGSFCTQLNRALTGIAVEQDKNTQEVFAQVKQIYKTPPIKDFGGFNFSQILPDPSKPSKRSFIEDLLFNKVTLADAGFIKQYGDCLGDIAARDLICAQKFNGLTVLPPLLTDEMIAQYTSALLAGTITSGWTFGAGAALQIPFAMQMAYRFNGIGVTQNVLYENQKLIANQFNSAIGKIQDSLSSTASALGKLQDVVNQNAQALNTLVKCLSSNFGAISSVLNDILSRLDKVEAEVQIDRLITGRLQCLQTYVTQQLIRAAEIRASANLAATKMSECVLGQSKRVDFCGKGYHLMSFPQSAPHGVVFLHVTYVPAQEKNFTTAPAICHEGKAHFPREGVFVSNGTHWFITQRNFYEPQIITTDNTFVSGSCDVVIGIVNNTVYDPLQPELDSFKEELDKYFKNHTSPDVDLGDISGINASVVNIQKEIDRLNEVAKNLNESLIDLQELGKYEQYIKWPWYIWLGFIAGLIAIIMVTIMLCCMTSCCSCLKGCCSCGSCCKFDEDDSEPVLKGVKLHYT

SEQ ID NO: 1011 - protein, 1273 aa, Artificial Sequence; identical to SEQ ID NO: 25
  SARS-CoV-2/Wuhan/WIV05/2019__EPI_ISL_402128 spike protein (1-1273)(F970C_G999C)

SEQ ID NO: 1012 - protein, 1269 aa, Artificial Sequence
  SARS-CoV-2/bat/Yunnan/RaTG13/2013__EPI_ISL_402131 spike protein (1-1269)(F966C_G995C)
MFVFLVLLPLVSSQCVNLTTRTQLPPAYTNSSTRGVYYPDKVFRSSVLHLTQDLFLPFFSNVTWFHAIHVSGTNGIKRFDNPVLPFNDGVYFASTEKSNIIRGWIFGTTLDSKTQSLLIVNNATNVVIKVCEFQFCNDPFLGVYYHKNNKSWMESEFRVYSSANNCTFEYVSQPFLMDLEGKQGNFKNLREFVFKNIDGYFKIYSKHTPINLVRDLPPGFSALEPLVDLPIGINITRFQTLLALHRSYLTPGDSSSGWTAGAAAYYVGYLQPRTFLLKYNENGTITDAVDCALDPLSETKCTLKSFTVEKGIYQTSNFRVQPTDSIVRFPNITNLCPFGEVFNATTFASVYAWNRKRISNCVADYSVLYNSTSFSTFKCYGVSPTKLNDLCFTNVYADSFVITGDEVRQIAPGQTGKIADYNYKLPDDFTGCVIAWNSKHIDAKEGGNFNYLYRLFRKANLKPFERDISTEIYQAGSKPCNGQTGLNCYYPLYRYGFYPTDGVGHQPYRVVVLSFELLNAPATVCGPKKSTNLVKNKCVNFNFNGLTGTGVLTESNKKFLPFQQFGRDIADTTDAVRDPQTLEILDITPCSFGGVSVITPGTNASNQVAVLYQDVNCTEVPVAIHADQLTPTWRVYSTGSNVFQTRAGCLIGAEHVNNSYECDIPIGAGICASYQTQTNSRSVASQSIIAYTMSLGAENSVAYSNNSIAIPTNFTISVTTEILPVSMTKTSVDCTMYICGDSTECSNLLLQYGSFCTQLNRALTGIAVEQDKNTQEVFAQVKQIYKTPPIKDFGGFNFSQILPDPSKPSKRSFIEDLLFNKVTLADAGFIKQYGDCLGDIAARDLICAQKFNGLTVLPPLLTDEMIAQYTSALLAGTITSGWTFGAGAALQIPFAMQMAYRFNGIGVTQNVLYENQKLIANQFNSAIGKIQDSLSSTASALGKLQDVVNQNAQALNTLVKQLSSNCGAISSVLNDILSRLDKVEAEVQIDRLITCRLQSLQTYVTQQLIRAAEIRASANLAATKMSECVLGQSKRVDFCGKGYHLMSFPQSAPHGVVFLHVTYVPAQEKNFTTAPAICHDGKAHFPREGVFVSNGTHWFVTQRNFYEPQIITTDNTFVSGSCDVVIGIVNNTVYDPLQPELDSFKEELDKYFKNHTSPDVDLGDISGINASVVNIQKEIDRLNEVAKNLNESLIDLQELGKYEQYIKWPWYIWLGFIAGLIAIIMVTIMLCCMTSCCSCLKGCCSCGSCCKFDEDDSEPVLKGVKLHYT

SEQ ID NO: 1013 - protein, 1273 aa, Artificial Sequence
  SARS-CoV-2/Wuhan/HBCDC-HB-01/2019__EPI_ISL_402132 spike protein (1-1273)(F970C_G999C)
MFVFLVLLPLVSSQCVNLTTRTQLPPAYTNSITRGVYYPDKVFRSSVLHSTQDLFLPFFSNVTWFHAIHVSGTNGTKRFDNPVLPFNDGVYFASTEKSNIIRGWIFGTTLDSKTQSLLIVNNATNVVIKVCEFQFCNDPFLGVYYHKNNKSWMESEFRVYSSANNCTFEYVSQPFLMDLEGKQGNFKNLREFVFKNIDGYFKIYSKHTPINLVRDLPQGFSALEPLVDLPIGINITRFQTLLALHRSYLTPGDSSSGWTAGAAAYYVGYLQPRTFLLKYNENGTITDAVDCALDPLSETKCTLKSFTVEKGIYQTSNFRVQPTESIVRFPNITNLCPFGEVFNATRFASVYAWNRKRISNCVADYSVLYNSASFSTFKCYGVSPTKLNDLCFTNVYADSFVIRGDEVRQIAPGQTGKIADYNYKLPDDFTGCVIAWNSNNLDSKVGGNYNYLYRLFRKSNLKPFERDISTEIYQAGSTPCNGVEGFNCYFPLQSYGFQPTNGVGYQPYRVVVLSFELLHAPATVCGPKKSTNLVKNKCVNFNFNGLTGTGVLTESNKKFLPFQQFGRDIADTTDAVRDPQTLEILDITPCSFGGVSVITPGTNTSNQVAVLYQDVNCTEVPVAIHADQLTPTWRVYSTGSNVFQTRAGCLIGAEHVNNSYECDIPIGAGICASYQTQTNSPRRARSVASQSIIAYTMSLGAENSVAYSNNSIAIPTNFTISVTTEILPVSMTKTSVDCTMYICGDSTECSNLLLQYGSFCTQLNRALTGIAVEQDKNTQEVFAQVKQIYKTPPIKDFGGFNFSQILPDPSKPSKRSFIEDLLFNKVTLADAGFIKQYGDCLGDIAARDLICAQKFNGLTVLPPLLTDEMIAQYTSALLAGTITSGWTFGAGAALQIPFAMQMAYRFNGIGVTQNVLYENQKLIANQFNSAIGKIQDSLSSTASALGKLQDVVNQNAQALNTLVKQLSSNCGAISSVLNDILSRLDKVEAEVQIDRLITCRLQSLQTYVTQQLIRAAEIRASANLAATKMSECVLGQSKRVDFCGKGYHLMSFPQSAPHGVVFLHVTYVPAQEKNFTTAPAICHDGKAHFPREGVFVSNGTHWFVTQRNFYEPQIITTDNTFVSGNCDVVIGIVNNTVYDPLQPELDSFKEELDKYFKNHTSPDVDLGDISGINASVVNIQKEIDRLNEVAKNLNESLIDLQELGKYEQYIKWPWYIWLGFIAGLIAIVMVTIMLCCMTSCCSCLKGCCSCGSCCKFDEDDSEPVLKGVKLHYT

SEQ ID NO: 1014 - protein, 1273 aa, Artificial Sequence
  SARS-CoV-2/Guangdong/20SF028/2020__EPI_ISL_403936 spike protein (1-1273)(F970C_G999C)
MFVFLVLLPLVSSQCVNLTTRTQLPPAYTNSFTRGVYYPDKVFRSSVLYSTQDLFLPFFSNVTWFHAIHVSGTNGTKRFDNPVLPFNDGVYFASTEKSNIIRGWIFGTTLDSKTQSLLIVNNATNVVIKVCEFQFCNDPFLGVYYHKNNKSWMESEFRVYSSANNCTFEYVSQPFLMDLEGKQGNFKNLREFVFKNIDGYFKIYSKHTPINLVRDLPQGFSALEPLVDLPIGINITRFQTLLALHRSYLTPGDSSSGWTAGAAAYYVGYLQPRTFLLKYNENGTITDAVDCALDPLSETKCTLKSFTVEKGIYQTSNFRVQPTESIVRFPNITNLCPFGEVFNATRFASVYAWNRKRISNCVADYSVLYNSASFSTFKCYGVSPTKLNDLCFTNVYADSFVIRGDEVRQIAPGQTGKIADYNYKLPDDFTGCVIAWNSNNLDSKVGGNYNYLYRLFRKSNLKPFERDISTEIYQAGSTPCNGVEGFNCYFPLQSYGFQPTNGVGYQPYRVVVLSFELLHAPATVCGPKKSTNLVKNKCVNFNFNGLTGTGVLTESNKKFLPFQQFGRDIADTTDAVRDPQTLEILDITPCSFGGVSVITPGTNTSNQVAVLYQDVNCTEVPVAIHADQLTPTWRVYSTGSNVFQTRAGCLIGAEHVNNSYECDIPIGAGICASYQTQTNSPRRARSVASQSIIAYTMSLGAENSVAYSNNSIAIPTNFTISVTTEILPVSMTKTSVDCTMYICGDSTECSNLLLQYGSFCTQLNRALTGIAVEQDKNTQEVFAQVKQIYKTPPIKDFGGFNFSQILPDPSKPSKRSFIEDLLFNKVTLADAGFIKQYGDCLGDIAARDLICAQKFNGLTVLPPLLTDEMIAQYTSALLAGTITSGWTFGAGAALQIPFAMQMAYRFNGIGVTQNVLYENQKLIANQFNSAIGKIQDSLSSTASALGKLQDVVNQNAQALNTLVKQLSSNCGAISSVLNDILSRLDKVEAEVQIDRLITCRLQSLQTYVTQQLIRAAEIRASANLAATKMSECVLGQSKRVDFCGKGYHLMSFPQSAPHGVVFLHVTYVPAQEKNFTTAPAICHDGKAHFPREGVFVSNGTHWFVTQRNFYEPQIITTDNTFVSGNCDVVIGIVNNTVYDPLQPELDSFKEELDKYFKNHTSPDVDLGDISGINASVVNIQKEIDRLNEVAKNLNESLIDLQELGKYEQYIKWPWYIWLGFIAGLIAIVMVTIMLCCMTSCCSCLKGCCSCGSCCKFDEDDSEPVLKGVKLHYT

SEQ ID NO: 1015 - protein, 1273 aa, Artificial Sequence
  SARS-CoV-2/Shenzhen/SZTH-001/2020__EPI_ISL_406592 spike protein (1-1273)(F970C_G999C)
MFVFLVLLPLVSSQCVNLTTRTQLPPAYTNSFTRGVYYPDKVFRSSVLHSTQDLFLPFFSNVTWFHAIHVSGTNGTKRFDNPVLPFNDGVYFASTEKSNIIRGWIFGTTLDSKTQSLLIVNNATNVVIKVCEFQFCNDPFLGVYYHKNNKSWMESEFRVYSSANNCTFEYVSQPFLMDLEGKQGNFKNLREFVFKNIDGYFKIYSKHTPINLVRDLPQGFSALEPLVDLPIGINITRFQTLLALHRSYLTPGDSSSGWTAGAAAYYVGYLQPRTFLLKYNENGTITDAVDCALDPLSETKCTLKSFTVEKGIYQTSNFRVQPTESIVRFPNITNLCPFGEVFNATRFASVYAWNRKRISNCVADYSVLYNSASFSTFKCYGVSPTKLNDLCFTNVYADSFVIRGDEVRQIAPGQTGKIADYNYKLPDDFTGCVIAWNSNNLDSKVGGNYNYLYRLFRKSNLKPFERDISTEIYQAGSTPCNGVEGFNCYFPLQSYGFQPTNGVGYQPYRVVVLSFELLHAPATVCGPKKSTNLVKNKCVNFNFNGLTGTGVLTESNKKFLPFQQFGRDIADTTDAVRDPQTLEILDITPCSFGGVSVITPGTNTSNQVAVLYQDVNCTEVPVAIHADQLTPTWRVYSTGSNVFQTRAGCLIGAEHVNNSYECDIPIGAGICASYQTQTNSPRRARSVASQSIIAYTMSLGAENSVAYSNNSIAIPTNFTISVTTEILPVSMTKTSVDCTMYICGDSTECSNLLLQYGSFCTQLNRALTGIAVEQDKNTQEVFAQVKQIYKTPPIKDFGGFNFSQILPDPSKPSKRSFIEDLLFNKVTLADAGFIKQYGDCLGDIAARDLICAQKFNGLTVLPPLLTDEMIAQYTSALLAGTITSGWTFGAGAALQIPFAMQMAYRFNGIGVTQNVLYENQKLIANQFNSAIGKIQDSLSSTASALGKLQDVVNQNAQALNTLVKQLSSNCGAISSVLNDILSRLDKVEAEVQIDRLITCRLQSLQTYVTQQLIRAAEIRASANLAATKMSECVLGQSKRVDFCGKGYHLMSFPQSAPHGVVFLHVTYVPAQEKNFTTAPAICHDGKAHFPREGVFVSNGTHWFVTQRNFYEPQIITTDNTFVSGNCDVLIGIVNNTVYDPLQPELDSFKEELDKYFKNHTSPDVDLGDISGINASVVNIQKEIDRLNEVAKNLNESLIDLQELGKYEQYIKWPWYIWLGFIAGLIAIVMVTIMLCCMTSCCSCLKGCCSCGSCCKFDEDDSGPVLKGVKLHYT

SEQ ID NO: 1016 - protein, 1273 aa, Artificial Sequence
  SARS-CoV-2/Shenzhen/SZTH-004/2020__EPI_ISL_406595 spike protein (1-1273)(F970C_G999C)
MFVFLVLLPLVSSQCVNLTTRTQLPPAYTNSFTRGVYYPDKVFRSSVLHSTQDLFLPFFSNVTWFHAIHVSGTNGTKRFDNPVLPFNDGVYFASTEKSNIIRGWIFGTTLDSKTQSLLIVNNATNVVIKVCEFQFCNDPFLGVYYHKNNKSWMESEFRVYSSANNCTFEYVSQPFLMDLEGKQGNFKNLREFVFKNIDGYFKIYSKHTPINLVRDLPQGFSALEPLVDLPIGINITRFQTLLALHRSYLTPGDSSSGWTAGAAAYYVGYLQPRTFLLKYNENGTITDAVDCALDPLSETKCTLKSFTVEKGIYQTSNFRVQPTESIVRFPNITNLCPFGEVFNATRFASVYAWDRKRISNCVAYYSVLYNSASFSTFKCYGVSPTKLNDLCFTNVYADSFVIRGDEVRQIAPGQTGKIADYNYKLPDDFTGCVIAWNSNNLDSKVGGNYNYLYRLFRKSNLKPFERDISTEIYQAGSTPCNGVEGFNCYFPLQSYGFQPTNGVGYQPYRVVVLSFELLHAPATVCGPKKSTNLVKNKCVNFNFNGLTGTGVLTESNKKFLPFQQFGRDIADTTDAVRDPQTLEILDITPCSFGGVSVITPGTNTSNQVAVLYQDVNCTEVPVAIHADQLTPTWRVYSTGSNVFQTRAGCLIGAEHVNNSYECDIPIGAGICASYQTQTNSPRRARSVASQSIIAYTMSLGAENSVAYSNNSIAIPTNFTISVTTEILPVSMTKTSVDCTMYICGDSTECSNLLLQYGSFCTQLNRALTGIAVEQDKNTQEVFAQVKQIYKTPPIKDFGGFNFSQILPDPSKPSKRSFIEDLLFNKVTLADAGFIKQYGDCLGDIAARDLICAQKFNGLTVLPPLLTDEMIAQYTSALLAGTITSGWTFGAGAALQIPFAMQMAYRFNGIGVTQNVLYENQKLIANQFNSAIGKIQDSLSSTASALGKLQDVVNQNAQALNTLVKQLSSNCGAISSVLNDILSRLDKVEAEVQIDRLITCRLQSLQTYVTQQLIRAAEIRASANLAATKMSECVLGQSKRVDFCGKGYHLMSFPQSAPHGVVFLHVTYVPAQEKNFTTAPAICHDGKAHFPREGVFVSNGTHWFVTQRNFYEPQIITTDNTFVSGNCDVVIGIVNNTVYDPLQPELDSFKEELDKYFKNHTSPDVDLGDISGINASVVNIQKEIDRLNEVAKNLNESLIDLQELGKYEQYIKWPWYIWLGFIAGLIAIVMVTIMLCCMTSCCSCLKGCCSCGSCCKFDEDDSEPVLKGVKLHYT

SEQ ID NO: 1017 - protein, 1273 aa, Artificial Sequence
  SARS-CoV-2/France/IDF0372/2020__EPI_ISL_406596 spike protein (1-1273)(F970C_G999C)
MFVFLVLLPLVSSQCVNLTTRTQLPPAYTNSFTRGVYYPDKVFRSSVLHSTQDLFLPFFSNVTWFHAIHVSGTNGTKRFDNPVLPFNDGVYFASTEKSNIIRGWIFGTTLDSKTQSLLIVNNATNVVIKVCEFQFCNDPFLGVYYHKNNKSWMESEFRVYSSANNCTFEYVSQPFLMDLEGKQGNFKNLREFVFKNIDGYFKIYSKHTPINLVRDLPQGFSALEPLVDLPIGINITRFQTLLALHRSYLTPGDSSSGWTAGAAAYYVGYLQPRTFLLKYNENGTITDAVDCALDPLSETKCTLKSFTVEKGIYQTSNFRVQPTESIVRFPNITNLCPFGEVFNATRFASVYAWNRKRISNCVADYSFLYNSASFSTFKCYGVSPTKLNDLCFTNVYADSFVIRGDEVRQIAPGQTGKIADYNYKLPDDFTGCVIAWNSNNLDSKVGGNYNYLYRLFRKSNLKPFERDISTEIYQAGSTPCNGVEGFNCYFPLQSYGFQPTNGVGYQPYRVVVLSFELLHAPATVCGPKKSTNLVKNKCVNFNFNGLTGTGVLTESNKKFLPFQQFGRDIADTTDAVRDPQTLEILDITPCSFGGVSVITPGTNTSNQVAVLYQDVNCTEVPVAIHADQLTPTWRVYSTGSNVFQTRAGCLIGAEHVNNSYECDIPIGAGICASYQTQTNSPRRARSVASQSIIAYTMSLGAENSVAYSNNSIAIPTNFTISVTTEILPVSMTKTSVDCTMYICGDSTECSNLLLQYGSFCTQLNRALTGIAVEQDKNTQEVFAQVKQIYKTPPIKDFGGFNFSQILPDPSKPSKRSFIEDLLFNKVTLADAGFIKQYGDCLGDIAARDLICAQKFNGLTVLPPLLTDEMIAQYTSALLAGTITSGWTFGAGAALQIPFAMQMAYRFNGIGVTQNVLYENQKLIANQFNSAIGKIQDSLSSTASALGKLQDVVNQNAQALNTLVKQLSSNCGAISSVLNDILSRLDKVEAEVQIDRLITCRLQSLQTYVTQQLIRAAEIRASANLAATKMSECVLGQSKRVDFCGKGYHLMSFPQSAPHGVVFLHVTYVPAQEKNFTTAPAICHDGKAHFPREGVFVSNGTHWFVTQRNFYEPQIITTDNTFVSGNCDVVIGIVNNTVYDPLQPELDSFKEELDKYFKNHTSPDVDLGDISGINASVVNIQKEIDRLNEVAKNLNESLIDLQELGKYEQYIKWPWYIWLGFIAGLIAIVMVTIMLCCMTSCCSCLKGCCSCGSCCKFDEDDSEPVLKGVKLHYT

SEQ ID NO: 1018 - protein, 1273 aa, Artificial Sequence
  SARS-CoV-2/Australia/VIC01/2020__EPI_ISL_406844 spike protein (1-1273)(F970C_G999C)
MFVFLVLLPLVSSQCVNLTTRTQLPPAYTNSFTRGVYYPDKVFRSSVLHSTQDLFLPFFSNVTWFHAIHVSGTNGTKRFDNPVLPFNDGVYFASTEKSNIIRGWIFGTTLDSKTQSLLIVNNATNVVIKVCEFQFCNDPFLGVYYHKNNKSWMESEFRVYSSANNCTFEYVSQPFLMDLEGKQGNFKNLREFVFKNIDGYFKIYSKHTPINLVRDLPQGFSALEPLVDLPIGINITRFQTLLALHRRYLTPGDSSSGWTAGAAAYYVGYLQPRTFLLKYNENGTITDAVDCALDPLSETKCTLKSFTVEKGIYQTSNFRVQPTESIVRFPNITNLCPFGEVFNATRFASVYAWNRKRISNCVADYSVLYNSASFSTFKCYGVSPTKLNDLCFTNVYADSFVIRGDEVRQIAPGQTGKIADYNYKLPDDFTGCVIAWNSNNLDSKVGGNYNYLYRLFRKSNLKPFERDISTEIYQAGSTPCNGVEGFNCYFPLQSYGFQPTNGVGYQPYRVVVLSFELLHAPATVCGPKKSTNLVKNKCVNFNFNGLTGTGVLTESNKKFLPFQQFGRDIADTTDAVRDPQTLEILDITPCSFGGVSVITPGTNTSNQVAVLYQDVNCTEVPVAIHADQLTPTWRVYSTGSNVFQTRAGCLIGAEHVNNSYECDIPIGAGICASYQTQTNSPRRARSVASQSIIAYTMSLGAENSVAYSNNSIAIPTNFTISVTTEILPVSMTKTSVDCTMYICGDSTECSNLLLQYGSFCTQLNRALTGIAVEQDKNTQEVFAQVKQIYKTPPIKDFGGFNFSQILPDPSKPSKRSFIEDLLFNKVTLADAGFIKQYGDCLGDIAARDLICAQKFNGLTVLPPLLTDEMIAQYTSALLAGTITSGWTFGAGAALQIPFAMQMAYRFNGIGVTQNVLYENQKLIANQFNSAIGKIQDSLSSTASALGKLQDVVNQNAQALNTLVKQLSSNCGAISSVLNDILSRLDKVEAEVQIDRLITCRLQSLQTYVTQQLIRAAEIRASANLAATKMSECVLGQSKRVDFCGKGYHLMSFPQSAPHGVVFLHVTYVPAQEKNFTTAPAICHDGKAHFPREGVFVSNGTHWFVTQRNFYEPQIITTDNTFVSGNCDVVIGIVNNTVYDPLQPELDSFKEELDKYFKNHTSPDVDLGDISGINASVVNIQKEIDRLNEVAKNLNESLIDLQELGKYEQYIKWPWYIWLGFIAGLIAIVMVTIMLCCMTSCCSCLKGCCSCGSCCKFDEDDSEPVLKGVKLHYT

SEQ ID NO: 1019 - protein, 1273 aa, Artificial Sequence
  SARS-CoV-2/Germany/BavPat1/2020__EPI_ISL_406862 spike protein (1-1273)(F970C_G999C)
MFVFLVLLPLVSSQCVNLTTRTQLPPAYTNSFTRGVYYPDKVFRSSVLHSTQDLFLPFFSNVTWFHAIHVSGTNGTKRFDNPVLPFNDGVYFASTEKSNIIRGWIFGTTLDSKTQSLLIVNNATNVVIKVCEFQFCNDPFLGVYYHKNNKSWMESEFRVYSSANNCTFEYVSQPFLMDLEGKQGNFKNLREFVFKNIDGYFKIYSKHTPINLVRDLPQGFSALEPLVDLPIGINITRFQTLLALHRSYLTPGDSSSGWTAGAAAYYVGYLQPRTFLLKYNENGTITDAVDCALDPLSETKCTLKSFTVEKGIYQTSNFRVQPTESIVRFPNITNLCPFGEVFNATRFASVYAWNRKRISNCVADYSVLYNSASFSTFKCYGVSPTKLNDLCFTNVYADSFVIRGDEVRQIAPGQTGKIADYNYKLPDDFTGCVIAWNSNNLDSKVGGNYNYLYRLFRKSNLKPFERDISTEIYQAGSTPCNGVEGFNCYFPLQSYGFQPTNGVGYQPYRVVVLSFELLHAPATVCGPKKSTNLVKNKCVNFNFNGLTGTGVLTESNKKFLPFQQFGRDIADTTDAVRDPQTLEILDITPCSFGGVSVITPGTNTSNQVAVLYQGVNCTEVPVAIHADQLTPTWRVYSTGSNVFQTRAGCLIGAEHVNNSYECDIPIGAGICASYQTQTNSPRRARSVASQSIIAYTMSLGAENSVAYSNNSIAIPTNFTISVTTEILPVSMTKTSVDCTMYICGDSTECSNLLLQYGSFCTQLNRALTGIAVEQDKNTQEVFAQVKQIYKTPPIKDFGGFNFSQILPDPSKPSKRSFIEDLLFNKVTLADAGFIKQYGDCLGDIAARDLICAQKFNGLTVLPPLLTDEMIAQYTSALLAGTITSGWTFGAGAALQIPFAMQMAYRFNGIGVTQNVLYENQKLIANQFNSAIGKIQDSLSSTASALGKLQDVVNQNAQALNTLVKQLSSNCGAISSVLNDILSRLDKVEAEVQIDRLITCRLQSLQTYVTQQLIRAAEIRASANLAATKMSECVLGQSKRVDFCGKGYHLMSFPQSAPHGVVFLHVTYVPAQEKNFTTAPAICHDGKAHFPREGVFVSNGTHWFVTQRNFYEPQIITTDNTFVSGNCDVVIGIVNNTVYDPLQPELDSFKEELDKYFKNHTSPDVDLGDISGINASVVNIQKEIDRLNEVAKNLNESLIDLQELGKYEQYIKWPWYIWLGFIAGLIAIVMVTIMLCCMTSCCSCLKGCCSCGSCCKFDEDDSEPVLKGVKLHYT

SEQ ID NO: 1020 - protein, 1273 aa, Artificial Sequence
  SARS-CoV-2/Wuhan/HBCDC-HB-02/2020__EPI_ISL_412978 spike protein (1-1273)(F970C_G999C)
MFVFLVLLPLVSSQCVNLTTRTQLPPAYTNSFTRGVYYPDKVFRSSVLHSTQDLFLPFFSNVTWFHAIHVSGTNGTKRFDNPVLPFNDGVYFASTEKSNIIRGWIFGTTLDSKTQSLLIVNNATNVVIKVCEFQFCNDPFLGVYYHKNNKSWMESEFRVYSSANNCTFEYVSQPFLMDLEGKQGNFKNLREFVFKNIDGYFKIYSKHTPINLVRDLPQGFSALEPLVDLPIGINITRFQTLLALHRSYLTPGDSSSGWTAGAAAYYVGYLQPRTFLLKYNENGTITDAVDCALDPLSETKCTLKSFTVEKGIYQTSNFRVQPTESIVRFPNITNLCPFGEVFNATRFASVYAWNRKRISNCVADYSVLYNSASFSTFKCYGVSPTKLNDLCFTNVYADSFVIRGDEVRQIAPGQTGKIADYNYKLPDDFTGCVIAWNSNNLDSKVGGNYNYLYRLFRKSNLKPFERDISTEIYQAGSTPCNGVEGFNCYFPLQSYGFQPTNGVGYQPYRVVVLSFELLHAPATVCGPKKSTNLVKNKCVNFNFNGLTGTGVLTESNKKFLPFQQFGRDIADTTDAVRDPQTLEILDITPCSFGGVSVITPGTNTSNQVAVLYQDVNCTEVPVAIHADQLTPTWRVYSTGSNVFQTRAGCLIGAEHVNNSYECDIPIGAGICASYQTQTNSPRRARSVASQSIIAYTMSLGAENSVAYSNNSIAIPTNFTISVTTEILPVSMTKTSVDCTMYICGDSTECSNFLLQYGSFCTQLNRALTGIAVEQDKNTQEVFAQVKQIYKTPPIKDFGGFNFSQILPDPSKPSKRSFIEDLLFNKVTLADAGFIKQYGDCLGDIAARDLICAQKFNGLTVLPPLLTDEMIAQYTSALLAGTITSGWTFGAGAALQIPFAMQMAYRFNGIGVTQNVLYENQKLIANQFNSAIGKIQDSLSSTASALGKLQDVVNQNAQALNTLVKQLSSNCGAISSVLNDILSRLDKVEAEVQIDRLITCRLQSLQTYVTQQLIRAAEIRASANLAATKMSECVLGQSKRVDFCGKGYHLMSFPQSAPHGVVFLHVTYVPAQEKNFTTAPAICHDGKAHFPREGVFVSNGTHWFVTQRNFYEPQIITTDNTFVSGNCDVVIGIVNNTVYDPLQPELDSFKEELDKYFKNHTSPDVDLGDISGINASVVNIQKEIDRLNEVAKNLNESLIDLQELGKYEQYIKWPWYIWLGFIAGLIAIVMVTIMLCCMTSCCSCLKGCCSCGSCCKFDEDDSEPVLKGVKLHYT

SEQ ID NO: 1021 - protein, 1273 aa, Artificial Sequence
  SARS-CoV-2/Australia/QLD02/2020__EPI_ISL_407896 spike protein (1-1273)(F970C_G999C)
MFVFLVLLPLVSSQCVNLTTRTQLPPAYTNSFTRGVYYPDKVFRSSVLHSTQDLFLPFFSNVTWFHAIHVSGTNGTKRFDNPVLPFNDGVYFASTEKSNIIRGWIFGTTLDSKTQSLLIVNNATNVVIKVCEFQFCNDPFLGVYYHKNNKSWMESEFRVYSSANNCTFEYVSQPFLMDLEGKQGNFKNLREFVFKNIDGYFKIYSKHTPINLVRDLPQGFSALEPLVDLPIGINITRFQTLLALHRSYLTPGDSSSGWTAGAAAYYVGYLQPRTFLLKYNENGTITDAVDCALDPLSETKCTLKSFTVEKGIYQTSNFRVQPTESIVRFPNITNLCPFGEVFNATRFASVYAWNRKRISNCVADYSVLYNSASFSTFKCYGVSPTKLNDLCFTNVYADSFVIRGDEVRQIAPGQTGKIADYNYKLPDDFTGCVIAWNSNNLDSKVGGNYNYLYRLFRKSNLKPFERDISTEIYQAGSTPCNGVEGFNCYFPLQSYGFQPTNGVGYQPYRVVVLSFELLHAPATVCGPKKSTNLVKNKCVNFNFNGLTGTGVLTESNKKFLPFQQFGRDIADTTDAVRDPQTLEILDITPCSFGGVSVITPGTNTSNQVAVLYQDVNCTEVPVAIHADQLTPTWRVYSTGSNVFQTRAGCLIGAEHVNNSYECDIPIGAGICASYQTQTNSPRRARSVASQSIIAYTMSLGAENSVAYSNNSIAIPTNFTISVTTEILPVSMTKTSVDCTMYICGDSTECSNLLLQYGSFCTQLNRALTGIAVEQDKNTQEVFAQVKQIYKTPPIKDFGGFNFSQILPDPSKPSKRSFIEDLLFNKVTLADAGFIKQYGDCLGDIAARDLICAQKFNGLTVLPPLLTDEMIAQYTSALLAGTITSGWTFGAGAALQIPFAMQMAYRFNGIGVTQNVLYENQKLIANQFNSAIGKIQDSLSSTASALGKLQDVVNQNAQALNTLVKQLSSNCGAISSVLNDILSRLDKVEAEVQIDRLITCRLQSLQTYVTQQLIRAAEIRASANLAATKMSECVLGQSKRVDFCGKGYHLMSFPQSAPHGVVFLHVTYVPAQEKNFTTAPAICHDGKAHFPREGVFVSNGTHWFVTQRNFYEPQIITTDNTFVSGNCDVVIGIVNNTVYDPLQLELDSFKEELDKYFKNHTSPDVDLGDISGINASVVNIQKEIDRLNEVAKNLNESLIDLQELGKYEQYIKWPWYIWLGFIAGLIAIVMVTIMLCCMTSCCSCLKGCCSCGSCCKFDEDDSEPVLKGVKLHYT

SEQ ID NO: 1022 - protein, 1273 aa, Artificial Sequence
  SARS-CoV-2/India/1-31/2020__EPI_ISL_413523 spike protein (1-1273)(F970C_G999C)
MFVFLVLLPLVSSQCVNLTTRTQLPPAYTNSFTRGVYYPDKVFRSSVLHSTQDLFLPFFSNVTWFHAIHVSGTNGTKRFDNPVLPFNDGVYFASTEKSNIIRGWIFGTTLDSKTQSLLIVNNATNVVIKVCEFQFCNDPFLGVYYHKNNKSWMESEFRVYSSANNCTFEYVSQPFLMDLEGKQGNFKNLREFVFKNIDGYFKIYSKHTPINLVRDLPQGFSALEPLVDLPIGINITRFQTLLALHRSYLTPGDSSSGWTAGAAAYYVGYLQPRTFLLKYNENGTITDAVDCALDPLSETKCTLKSFTVEKGIYQTSNFRVQPTESIVRFPNITNLCPFGEVFNATRFASVYAWNRKRISNCVADYSVLYNSASFSTFKCYGVSPTKLNDLCFTNVYADSFVIRGDEVRQIAPGQTGKIADYNYKLPDDFTGCVIAWNSNNLDSKVGGNYNYLYRLFRKSNLKPFERDISTEIYQAGSTPCNGVEGFNCYFPLQSYGFQPTNGVGYQPYRVVVLSFELLHAPATVCGPKKSTNLVKNKCVNFNFNGLTGTGVLTESNKKFLPFQQFGRDIADTTDAVRDPQTLEILDITPCSFGGVSVITPGTNTSNQVAVLYQDVNCTEVPVAIHADQLTPTWRVYSTGSNVFQTRAGCLIGAEHVNNSYECDIPIGAGICASYQTQTNSPRRARSVASQSIIAYTMSLGAENSVAYSNNSIAIPTNFTISVTTEILPVSMTKTSVDCTMYICGDSTECSNLLLQYGSFCTQLNRALTGIAVEQDKNTQEVFAQVKQIYKTPPIKDFGGFNFSQILPDPSKPSKRSFIEDLLFNKVTLADAGFIKQYGDCLGDIAARDLICAQKFNGLTVLPPLLTDEMIAQYTSALLAGTITSGWTFGAGAALQIPFAMQMAYRFNGIGVTQNVLYENQKLIANQFNSVIGKIQDSLSSTASALGKLQDVVNQNAQALNTLVKQLSSNCGAISSVLNDILSRLDKVEAEVQIDRLITCRLQSLQTYVTQQLIRAAEIRASANLAATKMSECVLGQSKRVDFCGKGYHLMSFPQSAPHGVVFLHVTYVPAQEKNFTTAPAICHDGKAHFPREGVFVSNGTHWFVTQRNFYEPQIITTDNTFVSGNCDVVIGIVNNTVYDPLQPELDSFKEELDKYFKNHTSPDVDLGDISGINASVVNIQKEIDRLNEVAKNLNESLIDLQELGKYEQYIKWPWYIWLGFIAGLIAIVMVTIMLCCMTSCCSCLKGCCSCGSCCKFDEDDSEPVLKGVKLHYT

SEQ ID NO: 1023 - protein, 1273 aa, Artificial Sequence
  SARS-CoV-2/Guangdong/GD2020087-P0008/2020__EPI_ISL_413863 spike protein (1-1273)(F970C_G999C)
MFVFLVLLPLVSSQCVNLTTRTQLPPAYTNSFTRGVYYPDKVFRSSVLHSTQDLFLPFFSNVTWFHAIHVSGTNGTKRFDNPVLPFNDGVYFASTEKSNIIRGWIFGTTLDSKTQSLLIVNNATNVVIKVCEFQFCNDPFLGVYYHKNNKSWMESEFRVYSSANNCTFEYVSQPFLMDLEGKQGNFKNLREFVFKNIDGYFKIYSKHTPINLVRDLPQGFSALEPLVDLPIGINITRFQTLLALHRSYLTPGDSSSGWTAGAAAYYVGYLQPRTFLLKYNENGTITDAVDCALDPLSETKCTLKSFTVEKGIYQTSNFRVQPTESIVRFPNITNLCPFGEVFNATRFASVYAWNRKRISNCVADYSVLYNSASFSTFKCYGVSPTKLNDLCFTNVYADSFVIRGDEVREIAPGQTGKIADYNYKLPDDFTGCVIAWNSNNLDSKVGGNYNYLYRLFRKSNLKPFERDISTEIYQAGSTPCNGVEGFNCYFPLQSYGFQPTNGVGYQPYRVVVLSFELLHAPATVCGPKKSTNLVKNKCVNFNFNGLTGTGVLTESNKKFLPFQQFGRDIADTTDAVRDPQTLEILDITPCSFGGVSVITPGTNTSNQVAVLYQDVNCTEVPVAIHADQLTPTWRVYSTGSNVFQTRAGCLIGAEHVNNSYECDIPIGAGICASYQTQTNSPRRARSVASQSIIAYTMSLGAENSVAYSNNSIAIPTNFTISVTTEILPVSMTKTSVDCTMYICGDSTECSNLLLQYGSFCTQLNRALTGIAVEQDKNTQEVFAQVKQIYKTPPIKDFGGFNFSQILPDPSKPSKRSFIEDLLFNKVTLADAGFIKQYGDCLGDIAARDLICAQKFNGLTVLPPLLTDEMIAQYTSALLAGTITSGWTFGAGAALQIPFAMQMAYRFNGIGVTQNVLYENQKLIANQFNSAIGKIQDSLSSTASALGKLQDVVNQNAQALNTLVKQLSSNCGAISSVLNDILSRLDKVEAEVQIDRLITCRLQSLQTYVTQQLIRAAEIRASANLAATKMSECVLGQSKRVDFCGKGYHLMSFPQSAPHGVVFLHVTYVPAQEKNFTTAPAICHDGKAHFPREGVFVSNGTHWFVTQRNFYEPQIITTDNTFVSGNCDVVIGIVNNTVYDPLQPELDSFKEELDKYFKNHTSPDVDLGDISGINASVVNIQKEIDRLNEVAKNLNESLIDLQELGKYEQYIKWPWYIWLGFIAGLIAIVMVTIMLCCMTSCCSCLKGCCSCGSCCKFDEDDSEPVLKGVKLHYT

SEQ ID NO: 1024 - protein, 1273 aa, Artificial Sequence
  SARS-CoV-2/Sweden/01/2020__EPI_ISL_411951 spike protein (1-1273)(F970C_G999C)
MFVFLVLLPLVSSQCVNLTTRTQLPPAYTNSFTRGVYYPDKVFRSSVLHSTQDLFLPFFSNVTWFHAIHVSGTNGTKRFDNPVLPFNDGVYFASTEKSNIIRGWIFGTTLDSKTQSLLIVNNATNVVIKVCEFQFCNDPFLGVYYHKNNKSWMESEFRVYSSANNCTFEYVSQPFLMDLEGKQGNFKNLREFVFKNIDGYFKIYSKHTPINLVRDLPQGFSALEPLVDLPIGINITRFQTLLALHRSYLTPGDSSSGWTAGAAAYYVGYLQPRTFLLKYNENGTITDAVDCALDPLSETKCTLKSFTVEKGIYQTSNFRVQPTESIVRFPNITNLCPFGEVFNATRFASVYAWNRKRISNCVADYSVLYNSASFSTFKCYGVSPTKLNDLCFTNVYADSFVIRGDEVRQIAPGQTGKIADYNYKLPDDFTGCVIAWNSNNLDSKVGGNYNYLYRLFRKSNLKPFERDISTEIYQAGSTPCNGVEGFNCYFPLQSYGFQPTNGVGYQPYRVVVLSFELLHAPATVCGPKKSTNLVKNKCVNFNFNGLTGTGVLTESNKKFLPFQQFGRDIADTTDAVRDPQTLEILDITPCSFGGVSVITPGTNTSNQVAVLYQDVNCTEVPVAIHADQLTPTWRVYSTGSNVFQTRAGCLIGAEHVNNSYECDIPIGAGICASYQTQTNSPRRARSVASQSIIAYTMSLGAENSVAYSNNSIAIPTNFTISVTTEILPVSMTKTSVDCTMYICGDSTECSNLLLQYGSFCTQLNRALTGIAVEQDKNTQEVFAQVKQIYKTPPIKDCGGFNFSQILPDPSKPSKRSFIEDLLFNKVTLADAGFIKQYGDCLGDIAARDLICAQKFNGLTVLPPLLTDEMIAQYTSALLAGTITSGWTFGAGAALQIPFAMQMAYRFNGIGVTQNVLYENQKLIANQFNSAIGKIQDSLSSTASALGKLQDVVNQNAQALNTLVKQLSSNCGAISSVLNDILSRLDKVEAEVQIDRLITCRLQSLQTYVTQQLIRAAEIRASANLAATKMSECVLGQSKRVDFCGKGYHLMSFPQSAPHGVVFLHVTYVPAQEKNFTTAPAICHDGKAHFPREGVFVSNGTHWFVTQRNFYEPQIITTDNTFVSGNCDVVIGIVNNTVYDPLQPELDSFKEELDKYFKNHTSPDVDLGDISGINASVVNIQKEIDRLNEVAKNLNESLIDLQELGKYEQYIKWPWYIWLGFIAGLIAIVMVTIMLCCMTSCCSCLKGCCSCGSCCKFDEDDSEPVLKGVKLHYT

SEQ ID NO: 1025 - protein, 1273 aa, Artificial Sequence
  SARS-CoV-2/Tianmen/HBCDC-HB-07/2020__EPI_ISL_412983 spike protein (1-1273)(F970C_G999C)
MFVFLVLLPLVSSQCVNLTTRTQLPPAYTNSFTRGVYYPDKVFRSSVLHSTQDLFLPFFSNVTWFHAIHVSGTNGTKRFDNPVLPFNDGVYFASTEKSNIIRGWIFGTTLDSKTQSLLIVNNATNVVIKVCEFQFCNDPFLGVYYHKNNKSWMESEFRVYSSANNCTFEYVSQPFLMDLEGKQGNFKNLREFVFKNIDGYFKIYSKHTPINLVRDLPQGFSALEPLVDLPIGINITRFQTLLALHRSYLTPGDSSSGWTAGAAAYYVGYLQPRTFLLKYNENGTITDAVDCALDPLSETKCTLKSFTVEKGIYQTSNFRVQPTESIVRFPNITNLCPFGEVFNATRFASVYAWNRKRISNCVADYSVLYNSASFSTFKCYGVSPTKLNDLCFTNVYADSFVIRGDEVRQIAPGQTGKIADYNYKLPDDFTGCVIAWNSNNLDSKVGGNYNYLYRLFRKSNLKPFERDISTEIYQAGSTPCNGVEGFNCYFPLQSYGFQPTNGVGYQPYRVVVLSFELLHAPATVCGPKKSTNLVKNKCVNFNFNGLTGTGVLTESNKKFLPFQQFGRDIADTTDAVRDPQTLEILDITPCSFGGVSVITPGTNTSNQVAVLYQDLNCTEVPVAIHADQLTPTWRVYSTGSNVFQTRAGCLIGAEHVNNSYECDIPIGAGICASYQTQTNSPRRARSVASQSIIAYTMSLGAENSVAYSNNSIAIPTNFTISVTTEILPVSMTKTSVDCTMYICGDSTECSNLLLQYGSFCTQLNRALTGIAVEQDKNTQEVFAQVKQIYKTPPIKDFGGFNFSQILPDPSKPSKRSFIEDLLFNKVTLADAGFIKQYGDCLGDIAARDLICAQKFNGLTVLPPLLTDEMIAQYTSALLAGTITSGWTFGAGAALQIPFAMQMAYRFNGIGVTQNVLYENQKLIANQFNSAIGKIQDSLSSTASALGKLQDVVNQNAQALNTLVKQLSSNCGAISSVLNDILSRLDKVEAEVQIDRLITCRLQSLQTYVTQQLIRAAEIRASANLAATKMSECVLGQSKRVDFCGKGYHLMSFPQSAPHGVVFLHVTYVPAQEKNFTTAPAICHDGKAHFPREGVFVSNGTHWFVTQRNFYEPQIITTDNTFVSGNCDVVIGIVNNTVYDPLQPELDSFKEELDKYFKNHTSPDVDLGDISGINASVVNIQKEIDRLNEVAKNLNESLIDLQELGKYEQYIKWPWYIWLGFIAGLIAIVMVTIMLCCMTSCCSCLKGCCSCGSCCKFDEDDSEPVLKGVKLHYT

SEQ ID NO: 1026 - protein, 1273 aa, Artificial Sequence
  SARS-CoV-2/Hong Kong/case42_VM20002493/2020__EPI_ISL_414527 spike protein (1-1273)(F970C_G999C)
MFVFLVLLPLVSSQCVNLTTRTQLPPAYTNSFTRGVYYPDKVFRSSVLHSTQDLFLPFFSNVTWFHAIHVSGTNGTKRFDNPVLPFNDGVYFASTEKSNIIRGWIFGTTLDSKTQSLLIVNNATNVVIKVCEFQFCNDPFLGVYYHKNNKSWMESEFRVYSSANNCTFEYVSQPFLMDLEGKQGNFKNLREFVFKNIDGYFKIYSKHTPINLVRDLPQGFSALEPLVDLPIGINITRFQTLLALHRSYLTPGDSSSGWTAGAAAYYVGYLQPRTFLLKYNENGTITDAVDCALDPLSETKCTLKSFTVEKGIYQTSNFRVQPTESIVRFPNITNLCPFGEVFNATRFASVYAWNRKRISNCVADYSVLYNSASFSTFKCYGVSPTKLNDLCFTNVYADSFVIRGDEVRQIAPGQTGKIADYNYKLPDDFTGCVIAWNSNNLDSKVGGNYNYLYRLFRKSNLKPFERDISTEIYQAGSTPCNGVEGFNCYFPLQSYGFQPTNGVGYQPYRVVVLSFELLHAPATVCGPKKSTNLVKNKCVNFNFNGLTGTGVLTESNKKFLPFQQFGRDIADTTDAVRDPQTLEILDITPCSFGGVSVITPGTNTSNQVAVLYQDVNCTEVPVAIHADQLTPTWRVYSTGSNVFQTRAGCLIGAEHVNNSYECDIPIGAGICASYQTQTNSPRRARSVASQSIIAYTMSLGAENSVAYSNNSIAIPTNFAISVTTEILPVSMTKTSVDCTMYICGDSTECSNLLLQYGSFCTQLNRALTGIAVEQDKNTQEVFAQVKQIYKTPPIKDFGGFNFSQILPDPSKPSKRSFIEDLLFNKVTLADAGFIKQYGDCLGDIAARDLICAQKFNGLTVLPPLLTDEMIAQYTSALLAGTITSGWTFGAGAALQIPFAMQMAYRFNGIGVTQNVLYENQKLIANQFNSAIGKIQDSLSSTASALGKLQDVVNQNAQALNTLVKQLSSNCGAISSVLNDILSRLDKVEAEVQIDRLITCRLQSLQTYVTQQLIRAAEIRASANLAATKMSECVLGQSKRVDFCGKGYHLMSFPQSAPHGVVFLHVTYVPAQEKNFTTAPAICHDGKAHFPREGVFVSNGTHWFVTQRNFYEPQIITTDNTFVSGNCDVVIGIVNNTVYDPLQPELDSFKEELDKYFKNHTSPDVDLGDISGINASVVNIQKEIDRLNEVAKNLNESLIDLQELGKYEQYIKWPWYIWLGFIAGLIAIVMVTIMLCCMTSCCSCLKGCCSCGSCCKFDEDDSEPVLKGVKLHYT

SEQ ID NO: 1027 - protein, 1273 aa, Artificial Sequence
  SARS-CoV-2/USA/CruiseA-23/2020__EPI_ISL_414482 spike protein (1-1273)(F970C_G999C)
MFVFLVLLPLVSSQCVNLTTRTQLPPAYTNSFTRGVYYPDKVFRSSVLHSTQDLFLPFFSNVTWFHAIHVSGTNGTKRFDNPVLPFNDGVYFASTEKSNIIRGWIFGTTLDSKTQSLLIVNNATNVVIKVCEFQFCNDPFLGVYYHKNNKSWMESEFRVYSSANNCTFEYVSQPFLMDLEVKQGNFKNLREFVFKNIDGYFKIYSKHTPINLVRDLPQGFSALEPLVDLPIGINITRFQTLLALHRSYLTPGDSSSGWTAGAAAYYVGYLQPRTFLLKYNENGTITDAVDCALDPLSETKCTLKSFTVEKGIYQTSNFRVQPTESIVRFPNITNLCPFGEVFNATRFASVYAWNRKRISNCVADYSVLYNSASFSTFKCYGVSPTKLNDLCFTNVYADSFVIRGDEVRQIAPGQTGKIADYNYKLPDDFTGCVIAWNSNNLDSKVGGNYNYLYRLFRKSNLKPFERDISTEIYQAGSTPCNGVEGFNCYFPLQSYGFQPTNGVGYQPYRVVVLSFELLHAPATVCGPKKSTNLVKNKCVNFNFNGLTGTGVLTESNKKFLPFQQFGRDIADTTDAVRDPQTLEILDITPCSFGGVSVITPGTNTSNQVAVLYQDVNCTEVPVAIHADQLTPTWRVYSTGSNVFQTRAGCLIGAEHVNNSYECDIPIGAGICASYQTQTNSPRRARSVASQSIIAYTMSLGAENSVAYSNNSIAIPTNFTISVTTEILPVSMTKTSVDCTMYICGDSTECSNLLLQYGSFCTQLNRALTGIAVEQDKNTQEVFAQVKQIYKTPPIKDFGGFNFSQILPDPSKPSKRSFIEDLLFNKVTLADAGFIKQYGDCLGDIAARDLICAQKFNGLTVLPPLLTDEMIAQYTSALLAGTITSGWTFGAGAALQIPFAMQMAYRFNGIGVTQNVLYENQKLIANQFNSAIGKIQDSLSSTASALGKLQDVVNQNAQALNTLVKQLSSNCGAISSVLNDILSRLDKVEAEVQIDRLITCRLQSLQTYVTQQLIRAAEIRASANLAATKMSECVLGQSKRVDFCGKGYHLMSFPQSAPHGVVFLHVTYVPAQEKNFTTAPAICHDGKAHFPREGVFVSNGTHWFVTQRNFYEPQIITTDNTFVSGNCDVVIGIVNNTVYDPLQPELDSFKEELDKYFKNHTSPDVDLGDISGINASVVNIQKEIDRLNEVAKNLNESLIDLQELGKYEQYIKWPWYIWLGFIAGLIAIVMVTIMLCCMTSCCSCLKGCCSCGSCCKFDEDDSEPVLKGVKLHYT

SEQ ID NO: 1028 - protein, 1273 aa, Artificial Sequence
  SARS-CoV-2/Hong Kong/case85_VM20002868/2020__EPI_ISL_414519 spike protein (1-1273)(F970C_G999C)
MFVFLVLVPLVSSQCVNLTTRTQLPPAYTNSFTRGVYYPDKVFRSSVLHSTQDLFLPFFSNVTWFHAIHVSGTNGTKRFDNPVLPFNDGVYFASTEKSNIIRGWIFGTTLDSKTQSLLIVNNATNVVIKVCEFQFCNDPFLGVYYHKNNKSWMESEFRVYSSANNCTFEYVSQPFLMDLEGKQGNFKNLREFVFKNIDGYFKIYSKHTPINLVRDLPQGFSALEPLVDLPIGINITRFQTLLALHRSYLTPGDSSSGWTAGAAAYYVGYLQPRTFLLKYNENGTITDAVDCALDPLSETKCTLKSFTVEKGIYQTSNFRVQPTESIVRFPNITNLCPFGEVFNATRFASVYAWNRKRISNCVADYSVLYNSASFSTFKCYGVSPTKLNDLCFTNVYADSFVIRGDEVRQIAPGQTGKIADYNYKLPDDFTGCVIAWNSNNLDSKVGGNYNYLYRLFRKSNLKPFERDISTEIYQAGSTPCNGVEGFNCYFPLQSYGFQPTNGVGYQPYRVVVLSFELLHAPATVCGPKKSTNLVKNKCVNFNFNGLTGTGVLTESNKKFLPFQQFGRDIADTTDAVRDPQTLEILDITPCSFGGVSVITPGTNTSNQVAVLYQDVNCTEVPVAIHADQLTPTWRVYSTGSNVFQTRAGCLIGAEHVNNSYECDIPIGAGICASYQTQTNSPRRARSVASQSIIAYTMSLGAENSVAYSNNSIAIPTNFTISVTTEILPVSMTKTSVDCTMYICGDSTECSNLLLQYGSFCTQLNRALTGIAVEQDKNTQEVFAQVKQIYKTPPIKDFGGFNFSQILPDPSKPSKRSFIEDLLFNKVTLADAGFIKQYGDCLGDIAARDLICAQKFNGLTVLPPLLTDEMIAQYTSALLAGTITSGWTFGAGAALQIPFAMQMAYRFNGIGVTQNVLYENQKLIANQFNSAIGKIQDSLSSTASALGKLQDVVNQNAQALNTLVKQLSSNCGAISSVLNDILSRLDKVEAEVQIDRLITCRLQSLQTYVTQQLIRAAEIRASANLAATKMSECVLGQSKRVDFCGKGYHLMSFPQSAPHGVVFLHVTYVPAQEKNFTTAPAICHDGKAHFPREGVFVSNGTHWFVTQRNFYEPQIITTDNTFVSGNCDVVIGIVNNTVYDPLQPELDSFKEELDKYFKNHTSPDVDLGDISGINASVVNIQKEIDRLNEVAKNLNESLIDLQELGKYEQYIKWPWYIWLGFIAGLIAIVMVTIMLCCMTSCCSCLKGCCSCGSCCKFDEDDSEPVLKGVKLHYT

SEQ ID NO: 1029 - protein, 1273 aa, Artificial Sequence
  SARS-CoV-2/England/200990660/2020__EPI_ISL_414523 spike protein (1-1273)(F970C_G999C)
MFVFLVLLPLVSSQCVNLTTRTQLPPAYTNSFTRGVYYPDKVFRSSVLHSTQDLFLPFFSNVTWFHAIHVSGTNGTKRFDNPVLPFNDGVYFASTEKSNIIRGWIFGTTLDSKTQSLLIVNNATNVVIKVCEFQFCNDPFLGVYYHKNNKSWMESEFRVYSSANNCTFEYVSQPFLMDLEGKQGNFKNLREFVFKNIDGYFKIYSKHTPINLVRDLPQGFSALEPLVDLPIGINITRFQTLLALHRSYLTPGDSSSGWTAGAAAYYVGYLQPRTFLLKYNENGTITDAVDCALDPLSETKCTLKSFTVEKGIYQTSNFRVQPTESIVRFPNITNLCPFGEVFNATRFASVYAWNRKRISNCVADYSVLYNSASFSTFKCYGVSPTKLNDLCFTNVYADSFVIRGDEVRQIAPGQTGKIADYNYKLPDDFTGCVIAWNSNNLDSKVGGNYNYLYRLFRKSNLKPFERDISTEIYQAGSTPCNGVEGFNCYFPLQSYGFQPTNGVGYQPYRVVVLSFELLHAPATVCGPKKSTNLVKNKCVNFNFNGLTGTGVLTESNKKFLPFQQFGRDIADTTDAVRDPQTLEILDITPCSFGGVSVITPGTNTSNQVAVLYQGVNCTEVPVAIHADQLTPTWRVYSTGSNVFQTRAGCLIGAEHVNNSYECDIPIGAGICASYQTQTNSPRRARSVASQSIIAYTMSLGAENSVAYSNNSIAIPTNFTISVTTEILPVSMTKTSVDCTMYICGDSTECSNLLLQYGSFCTQLNRALTGIAVEQDKNTQEVFAQVKQIYKTPPIKDFGGFNFSQILPDPSKPSKRSFIEDLLFNKVTLADAGFIKQYGDCLGDIAARDLICAQKFNGLTVLPPLLTDEMIAQYTSALLAGTITSGWTFGAGAALQIPFAMQMAYRFNGIGVTQNVLYENQKLIANQFNSAIGKIQDSLSSTASALGKLQDVVNQNAQALNTLVKQLSSNCGAISSVLNDILSRLDKVEAEVQIDRLITCRLQSLQTYVTQQLIRAAEIRASANLAATKMSECVLGQSKRVDFCGKGYHLMSFPQSAPHGVVFLHVTYVPAQEKNFTTAPAICHDGKAHFPREGVFVSNGTHWFVTQRNFYEPQIITTDNTFVSGNCDVVIGIVNNTVYDPLQPELDSFKEELDKYFKNHTSPDVDLGDISGINASVVNIQKEIDRLNEVAKNLNESLIDLQELGKYEQYIKWPWYIWLGFIAGLIAIVMVTIMLCCMTSCCSCLKGCCSCGSCCKFDEDDSELVLKGVKLHYT

SEQ ID NO: 1030 - protein, 1273 aa, Artificial Sequence
  SARS-CoV-2/Australia/NSW09/2020__EPI_ISL_413595 spike protein (1-1273)(F970C_G999C)
MFVFLVLLPLVSSQCVNLTTRTQLPPAYTNSFTRGVYYPDKVFRSSVLHSTQDLFLPFFSNVTWFHAIHVSGTNGTKRFDNPVLPFNDGVYFASTEKSNIIRGWIFGTTLDSKTQSLLIVNNATNVVIKVCEFQFCNDPFLGVYYHKNNKSWMESEFRVYSSANNCTFEYVSQPFLMDLEGKQGNFKNLREFVFKNIDGYFKIYSKHTPINLVRDLPQGFSALEPLVDLPIGINITRFQTLLALHRSYLTPGDSSSGWTAGAAAYYVGYLQPRTFLLKYNENGTITDAVDCALDPLSETKCTLKSFTVEKGIYQTSNFRVQPTESIVRFPNITNLCPFGEVFNATRFASVYAWNRKRISNCVADYSVLYNSASFSTFKCYGVSPTKLNDLCFTNVYADSFVIRGDEVRQIAPGQTGKIADYNYKLPDDFTGCVIAWNSNNLDSKVGGNYNYLYRLFRKSNLKPFERDISTEIYQAGSTPCNGVEGFNCYFPLQSYGFQPTNGVGYQPYRVVVLSFELLHAPATVCGPKKSTNLVKNKCVNFNFNGLTGTGVLTESNKKFLPFQQFGRDIADTTDAVRDPQTLEILDITPCSFGGVSVITPGTNTSNQVAVLYQDVNCTEVPVAIHADQLTPTWRVYSTGSNVFQTRAGCLIGAEHVNNSYECDIPIGAGICASYQTQTNSPRRARSVASQSIIAYTMSLGAENSVAYSNNSIAIPTNFTISVTTEILPVSMTKTSVDCTMYICGDSTECSNLLLQYGSFCTQLNRALTGIAVEQDKNTQEVFAQVKQIYKTPPIKDFGGFNFSQILPDPSKPSKRSFIEDLLFNKVTLADAGFIKQYGDCLGDIAARDLICAQKFNGLTVLPPLLTDEMIAQYTSALLAGTITSGWTFGAGAALQIPFAMQMAYRFNGIGVTQNVLYENQKLIANQFNSAIGKIQDSLSFTASALGKLQDVVNQNAQALNTLVKQLSSNCGAISSVLNDILSRLDKVEAEVQIDRLITCRLQSLQTYVTQQLIRAAEIRASANLAATKMSECVLGQSKRVDFCGKGYHLMSFPQSAPHGVVFLHVTYVPAQEKNFTTAPAICHDGKAHFPREGVFVSNGTHWFVTQRNFYEPQIITTDNTFVSGNCDVVIGIVNNTVYDPLQPELDSFKEELDKYFKNHTSPDVDLGDISGINASVVNIQKEIDRLNEVAKNLNESLIDLQELGKYEQYIKWPWYIWLGFIAGLIAIVMVTIMLCCMTSCCSCLKGCCSCGSCCKFDEDDSEPVLKGVKLHYT

SEQ ID NO: 1031 - protein, 1273 aa, Artificial Sequence
  SARS-CoV-2/Australia/NSW10/2020__EPI_ISL_413596 spike protein (1-1273)(F970C_G999C)
MFVFLVLLPLVSSQCVNLTTRTQLPPAYTNSFTRGVYYPDKVFRSSVLHSTQDLFLPFFSNVTWFHAIHVSGTNGTKRFDNPVLPFNDGVYFASTEKSNIIRGWIFGTTLDSKTQSLLIVNNATNVVIKVCEFQFCNDPFLGVYYHKNNKSWMESEFRVYSSANNCTFEYVSQPFLMDLEGKQGNFKNLREFVFKNIDGYFKIYSKHTPINLVRDLPQGFSALEPLVDLPIGINITRFQTLLALHRSYLTPGDSSSGWTAGAAAYYVGYLQPRTFLLKYNENGTITDAVDCALDPLSETKCTLKSFTVEKGIYQTSNFRVQPTESIVRFPNITNLCPFGEVFNATRFASVYAWNRKRISNCVADYSVLYNSASFSTFKCYGVSPTKLNDLCFTNVYADSFVIRGDEVRQIAPGQTGKIADYNYKLPDDFTGCVIAWNSNNLDSKVGGNYNYLYRLFRKSNLKPFERDISTEIYQAGSTPCNGVEGFNCYFPLQSYGFQPTNGVGYQPYRVVVLSFELLHAPATVCGPKKSTNLVKNKCVNFNFNGLTGTGVLTESNKKFLPFQQFGRDIADTTDAVRDPQTLEILDITPCSFGGVSVITPGTNTSNQVAVLYQDVNCTEVPVAIHADQLTPTWRVYSTGSNVFQTRAGCLIGAEHVNNSYECDIPIGAGICASYQTQTNSPRRARSVASQSIIAYTMSLGAENSVAYSNNSIAIPTNFTISVTTEILPVSMTKTSVDCTMYICGDSTECSNLLLQYGSFCTQLNRALTGIAVEQDKNTQEVFAQVKQIYKTPPIKDFGGFNFSQILPDPSKPSKRSFIEDLLFNKVTLADAGFIKQYGDCLGDIAARDLICAQKFNGLTVLPPLLTDEMIAQYTSALLAGTITSGWTFGAGAALQIPFAMQMAYRFNGIGVTQNVLYENQKLIANQFNSAIGKIQDSLSSTASALGKLQDVVNQNAQALNTLVKQLSSNCGAISSVLNDILSRLDKVEAEVQIDRLITCRLQSLQTYVTQQLIRAAEIRASANLAATKMSECVLGQSKRVDFCGKGYHLMSFPQSAPHGVVFLHVTYVPAQEKNFTTAPAICHDGKAHFPREGVFVSNGTHWFVTQRNFYEPQIITTDNTFVSGNCDVVIGIVNNTVYDPLQPELDSFKEELDKYFKNHTSPDVDLGDISGINASVVNIQKEIDRLNEVAKNLNESLIDLQELGKYEQYIKWPWYIWLGFIAGLIAIVMVTIMLCCMTSCCSCLKGCCSCGSCFKFDEDDSEPVLKGVKLHYT

SEQ ID NO: 1032 - protein, 1273 aa, Artificial Sequence
  SARS-CoV-2/Switzerland/1000477797/2020__EPI_ISL_413023 spike protein (1-1273)(F970C_G999C)
MFVFLVLLPLVSSQCVNLTTRTQLPPAYTNSFTRGVYYPDKVFRSSVLHSTQDLFLPFFSNVTWFHAIHVSGTNGTKRFDNPVLPFNDGVYFASTEKSNIIRGWIFGTTLDSKTQSLLIVNNATNVVIKVCEFQFCNDPFLGVYYHKNNKSWMESEFRVYSSANNCTFEYVSQPFLMDLEGKQGNFKNLREFVFKNIDGYFNIYSKHTPINLVRDLPQGFSALEPLVDLPIGINITRFQTLLALHRSYLTPGDSSSGWTAGAAAYYVGYLQPRTFLLKYNENGTITDAVDCALDPLSETKCTLKSFTVEKGIYQTSNFRVQPTESIVRFPNITNLCPFGEVFNATRFASVYAWNRKRISNCVADYSVLYNSASFSTFKCYGVSPTKLNDLCFTNVYADSFVIRGDEVRQIAPGQTGKIADYNYKLPDDFTGCVIAWNSNNLDSKVGGNYNYLYRLFRKSNLKPFERDISTEIYQAGSTPCNGVEGFNCYFPLQSYGFQPTNGVGYQPYRVVVLSFELLHAPATVCGPKKSTNLVKNKCVNFNFNGLTGTGVLTESNKKFLPFQQFGRDIADTTDAVRDPQTLEILDITPCSFGGVSVITPGTNTSNQVAVLYQGVNCTEVPVAIHADQLTPTWRVYSTGSNVFQTRAGCLIGAEHVNNSYECDIPIGAGICASYQTQTNSPRRARSVASQSIIAYTMSLGAENSVAYSNNSIAIPTNFTISVTTEILPVSMTKTSVDCTMYICGDSTECSNLLLQYGSFCTQLNRALTGIAVEQDKNTQEVFAQVKQIYKTPPIKDFGGFNFSQILPDPSKPSKRSFIEDLLFNKVTLADAGFIKQYGDCLGDIAARDLICAQKFNGLTVLPPLLTDEMIAQYTSALLAGTITSGWTFGAGAALQIPFAMQMAYRFNGIGVTQNVLYENQKLIANQFNSAIGKIQDSLSSTASALGKLQDVVNQNAQALNTLVKQLSSNCGAISSVLNDILSRLDKVEAEVQIDRLITCRLQSLQTYVTQQLIRAAEIRASANLAATKMSECVLGQSKRVDFCGKGYHLMSFPQSAPHGVVFLHVTYVPAQEKNFTTAPAICHDGKAHFPREGVFVSNGTHWFVTQRNFYEPQIITTDNTFVSGNCDVVIGIVNNTVYDPLQPELDSFKEELDKYFKNHTSPDVDLGDISGINASVVNIQKEIDRLNEVAKNLNESLIDLQELGKYEQYIKWPWYIWLGFIAGLIAIVMVTIMLCCMTSCCSCLKGCCSCGSCCKFDEDDSEPVLKGVKLHYT

SEQ ID NO: 1033 - protein, 1273 aa, Artificial Sequence
  SARS-CoV-2/Belgium/BA-02291/2020__EPI_ISL_415159 spike protein (1-1273)(F970C_G999C)
MFVFLVLLPLVSSQCVNLTTRTQLPPAYTNSFTRGVYYPDKVFRSSVLHSTQDLFLPFFSNVTWFHAIHVSGTNGTKRFDNPVLPFNDGVYFASTEKSNIIRGWIFGTTLDSKTQSLLIVNNATNVVIKVCEFQFCNDPFLGVYYHKNNKSWMESEFRVYSSANNCTFEYVSQPFLMDLEGKQGNFKNLREFVFKNIDGYFKIYSKHTPINLVRDLPQGFSALEPLVDLPIGINITRFQTLLALHRSYLTPGDSSSGWTAGAAAYYVGYLQPRTFLLKYNENGTITDAVDCALDPLSETKCTLKSFTVEKGIYQTSNFRVQPTESIVRFPNITNLCPFGEVFNATRFASVYAWNRKRISNCVADYSVLYNSASFSTFKCYGVSPTKLNDLCFTNVYADSFVIRGDEVRQIAPGQTGKIADYNYKLPDDFTGCVIAWNSNNLDSKVGGNYNYLYRLFRRSNLKPFERDISTEIYQAGSTPCNGVEGFNCYFPLQSYGFQPTNGVGYQPYRVVVLSFELLPAPATVCGPKKSTNLVKNKCVNFNFNGLTGTGVLTESNKKFLPFQQFGRDIADTTDAVRDPQTLEILDITPCSFGGVSVITPGTNTSNQVAVLYQGVNCTEVPVAIHADQLTPTWRVYSTGSNVFQTRAGCLIGAEHVNNSYECDIPIGAGICASYQTQTNSPRRARSVASQSIIAYTMSLGAENSVAYSNNSIAIPTNFTISVTTEILPVSMTKTSVDCTMYICGDSTECSNLLLQYGSFCTQLNRALTGIAVEQDKNTQEVFAQVKQIYKTPPIKDFGGFNFSQILPDPSKPSKRSFIEDLLFNKVTLADAGFIKQYGDCLGDIAARDLICAQKFNGLTVLPPLLTDEMIAQYTSALLAGTITSGWTFGAGAALQIPFAMQMAYRFNGIGVTQNVLYENQKLIANQFNSAIGKIQDSLSSAAPALGKLQDVVNQNAQALNTLVKQLSSNCGAISSVLNDILSRLDKVEAEVQIDRLITCRLQSLQTYVTQQLIRAAEIRASANLAATKMSECVLGQSKRVDFCGKGYHLMSFPQSAPHGVVFLHVTYVPAQEKNFTTAPAICHDGKAHFPREGVFVSNGTHWFVTQRNFYEPQIITTDNTFVSGNCDVVIGIVNNTVYDPLQPELDSFKEELDKYFKNHTSPDVDLGDISGINASVVNIQKEIDRLNEVAKNLNESLIDLQELGKYEQYIKWPWYIWLGFIAGLIAIVMVTIMLCCMTSCCSCLKGCCSCGSCCKFDEDDSEPVLKGVKLHYT

SEQ ID NO: 1034 - protein, 1273 aa, Artificial Sequence
  SARS-CoV-2/USA/WA8-UW5/2020__EPI_ISL_413486 spike protein (1-1273)(F970C_G999C)
MFVFLVLLPLVSSQCVNLTTRTQLPPAYTNSFTRGVYYPDKVFRSSVLHSTQDLFLPFFSNVTWFHAIHVSGTNGTKRFDNPVLPFNDGVYFASTEKSNIIRGWIFGTTLDSKTQSLLIVNNATNVVIKVCEFQFCNDPFLGVYYHKNNKSWMESEFRVYSSANNCTFEYVSQPFLMDLEGKQGNFKNLREFVFKNIDGYFKIYSKHTPINLVRDLPQGFSALEPLVDLPIGINITRFQTLLALHRSYLTPGDSSSGWTAGAAAYYVGYLQPRTFLLKYNENGTITDAVDCALDPLSETKCTLKSFTVEKGIYQTSNFRVQPTESIVRFPNITNLCPFGEVFNATRFASVYAWNRKRISNCVADYSVLYNSASFSTFKCYGVSPTKLNDLCFTNVYADSFVIRGDEVRQIAPGQTGKIADYNYKLPDDFTGCVIAWNSNNLDSKVGGNYNYLYRLFRKSNLKPFERDISTEIYQAGSTPCNGVEGFNCYFPLQSYGFQPTNGVGYQPYRVVVLSFELLHAPATVCGPKKSTNLVKNKCVNFNFNGLTGTGVLTESNKKFLPFQQFGRDIADTTDAVRDPQTLEILDITPCSFGGVSVITPGTNTSNQVAVLYQDVNCTEVPVAIHADQLTPTWRVYSTGSNVFQTRAGCLIGAEYVNNSYECDIPIGAGICASYQTQTNSPRRARSVASQSIIAYTMSLGAENSVAYSNNSIAIPTNFTISVTTEILPVSMTKTSVDCTMYICGDSTECSNLLLQYGSFCTQLNRALTGIAVEQDKNTQEVFAQVKQIYKTPPIKDFGGFNFSQILPDPSKPSKRSFIEDLLFNKVTLADAGFIKQYGDCLGDIAARDLICAQKFNGLTVLPPLLTDEMIAQYTSALLAGTITSGWTFGAGAALQIPFAMQMAYRFNGIGVTQNVLYENQKLIANQFNSAIGKIQDSLSSTASALGKLQDVVNQNAQALNTLVKQLSSNCGAISSVLNDILSRLDKVEAEVQIDRLITCRLQSLQTYVTQQLIRAAEIRASANLAATKMSECVLGQSKRVDFCGKGYHLMSFPQSAPHGVVFLHVTYVPAQEKNFTTAPAICHDGKAHFPREGVFVSNGTHWFVTQRNFYEPQIITTDNTFVSGNCDVVIGIVNNTVYDPLQPELDSFKEELDKYFKNHTSPDVDLGDISGINASVVNIQKEIDRLNEVAKNLNESLIDLQELGKYEQYIKWPWYIWLGFIAGLIAIVMVTIMLCCMTSCCSCLKGCCSCGSCCKFDEDDSEPVLKGVKLHYT

SEQ ID NO: 1035 - protein, 1273 aa, Artificial Sequence
  SARS-CoV-2/England/20102000506/2020__EPI_ISL_415147 spike protein (1-1273)(F970C_G999C)
MFVFLVLLPLVSSQCVNLTTRTQLPPAYTNSFTRGVYYPDKVFRSSVLHSTQDLFLPFFSNVTWFHAIHVSGTNGTKRFDNPVLPFNDGVYFASTEKSNIIRGWIFGTTLDSKTQSLLIVNNATNVVIKVCEFQFCNDPFLGVYYHKNNKSWMESEFRVYSSANNCTFEYVSQPFLMDLEGKQGNFKNLREFVFKNIDGYFKIYSKHTPINLVRDLPQGFSALEPLVDLPIGINITRFQTLLALHRSYLTPGDSSSGWTAGAAAYYVGYLQPRTFLLKYNENGTITDAVDCALDPLSETKCTLKSFTVEKGIYQTSNFRVQPTESIVRFPNITNLCPFGEVFNATRFASVYAWNRKRISNCVADYSVLYNSASFSTFKCYGVSPTKLNDLCFTNVYADSFVIRGDEVRQIAPGQTGKIADYNYKLPDDFTGCVIAWNSNNLDSKVGGNYNYLYRLFRKSNLKPFERDISTEIYQAGSTPCNGVEGFNCYFPLQSYGFQPTNGVGYQPYRVVVLSFELLHAPATVCGPKKSTNLVKNKCVNFNFNGLTGTGVLTESNKKFLPFQQFGRDIADTTDAVRDPQTLEILDITPCSFGGVSVITPGTNTSNQVAVLYQGVNCTEVPVAIHADQLTPTWRVYSTGSNVFQTRAGCLIGAEHVNNSYECDIPIGAGICASYQTQTNSPRRARSVASQSIIAYTMSLGAENSVAYSNNSIAIPTNFTISVTTEILPVSMTKTSVDCTMYICGDSTECSNLLLQYGSFCTQLNRALTGIAVEQDKNTQEVFAQVKQIYKTPPIKDFGGFNFSQILPDPSKPSKRSFIEDLLFNKVTLADAGFIKQYGYCLGDIAARDLICAQKFNGLTVLPPLLTDEMIAQYTSALLAGTITSGWTFGAGAALQIPFAMQMAYRFNGIGVTQNVLYENQKLIANQFNSAIGKIQDSLSSTASALGKLQDVVNQNAQALNTLVKQLSSNCGAISSVLNDILSRLDKVEAEVQIDRLITCRLQSLQTYVTQQLIRAAEIRASANLAATKMSECVLGQSKRVDFCGKGYHLMSFPQSAPHGVVFLHVTYVPAQEKNFTTAPAICHDGKAHFPREGVFVSNGTHWFVTQRNFYEPQIITTDNTFVSGNCDVVIGIVNNTVYDPLQPELDSFKEELDKYFKNHTSPDVDLGDISGINASVVNIQKEIDRLNEVAKNLNESLIDLQELGKYEQYIKWPWYIWLGFIAGLIAIVMVTIMLCCMTSCCSCLKGCCSCGSCCKFDEDDSEPVLKGVKLHYT

SEQ ID NO: 1036 - protein, 1273 aa, Artificial Sequence
  SARS-CoV-2/Belgium/VAG-03013/2020__EPI_ISL_415155 spike protein (1-1273)(F970C_G999C)
MFVFLVLLPLVSSQCVNLTTRTQLPPAYTNSFTRGVYYPDKVFRSSVLHSTQDLFLPFFSNVTWFHAIHVSGTNGTKRFDNPVLPFNDGVYFASTEKSNIIRGWIFGTTLDSKTQSLLIVNNATNVVIKVCEFQFCNDPFLGVYYHKNNKSWMESEFRVYSSANNCTFEYVSQPFLMDLEGKQGNFKNLREFVFKNIDGYFKIYSKHTPINLVRDLPQGFSALEPLVDLPIGINITRFQTLLALHRSYLTPGDSSSGWTAGAAAYYVGYLQPRTFLLKYNENGTITDAVDCALDPLSETKCTLKSFTVEKGIYQTSNFRVQPTESIVRFPNITNLCPFGEVFNATRFASVYAWNRKRISNCVADYSVLYNSASFSTFKCYGVSPTKLNDLCFTNVYADSFVIRGDEVRQIAPGQTGKIADYNYKLPDDFTGCVIAWNSNNLDSKVGGNYNYLYRLFRKSNLKPFERDISTEIYQAGSTPCNGVEGFNCYFPLQSYGFQPTNGVGYQPYRVVVLSFELLHAPATVCGPKKSTNLVKNKCVNFNFNGLTGTGVLTESNKKFLPFQQFGRDIADTTDAVRDPQTLEILDITPCSFGGVSVITPGTNTSNQVAVLYQGVNCTEVPVAIHADQLTPTWRVYSTGSNVFQTRAGCLIGAEHVNNSYECDIPIGAGICASYQTQTNSPRRARSVASQSIIAYTMSLGAENSVAYSNNSIAIPTNFTISVTTEILPVSMTKTSVDCTMYICGDSTECSNLLLQYGSFCTQLNRALTGIAVEQDKNTQEVFAQVKQIYKTPPIKDFGGFNFSQILPDPSKPSKRSFIEDLLFNKVTLADAGFIKQYGDCLGDIAARDLICAQKFNGLTVLPPLLTDEMIAQYTSALLAGTITSGWTFGAGAALQIPFAMQMAYRFNGIGVTQNVLYENQKLIANQFNSAIGKIQDSLSSTATALGKLQDVVNQNAQALNTLVKQLSSNCGAISSVLNDILSRLDKVEAEVQIDRLITCRLQSLQTYVTQQLIRAAEIRASANLAATKMSECVLGQSKRVDFCGKGYHLMSFPQSAPHGVVFLHVTYVPAQEKNFTTAPAICHDGKAHFPREGVFVSNGTHWFVTQRNFYEPQIITTDNTFVSGNCDVVIGIVNNTVYDPLQPELDSFKEELDKYFKNHTSPDVDLGDISGINASVVNIQKEIDRLNEVAKNLNESLIDLQELGKYEQYIKWPWYIWLGFIAGLIAIVMVTIMLCCMTSCCSCLKGCCSCGSCCKFDEDDSEPVLKGVKLHYT

SEQ ID NO: 1037 - protein, 1273 aa, Artificial Sequence
  SARS-CoV-2/Belgium/BC-03016/2020__EPI_ISL_415157 spike protein (1-1273)(F970C_G999C)
MFVFLVLLPLVSSQCVNLTTRTQLPPAYTNSFTRGVYYPDKVFRSSVLHSTQDLFLPFFSNVTWFHAIHVSGTNGTKRFDNPVLPFNDGVYFASTEKSNIIRGWIFGTTLDSKTQSLLIVNNATNVVIKVCEFQFCNDPFLGVYYHKNNKSWMESEFRVYSSANNCTFEYVSQPFLMDLEGKQGNFKNLREFVFKNIDGYFKIYSKHTPINLVRDLPQGFSALEPLVDLPIGINITRFQTLLALHRSYLTPGDSSSGWTAGAAAYYVGYLQPRTFLLKYNENGTITDAVDCALDPLSETKCTLKSFTVEKGIYQTSNFRVQPTESIVRFPNITNLCPFGEVFNATRFASVYAWNRKRISNCVADYSVLYNSASFSTFKCYGVSPTKLNDLCFTNVYADSFVIRGDEVRQIAPGQTGKIADYNYKLPDDFTGCVIAWNSNNLDSKVGGNYNYLYRLFRKSNLKPFERDISTEIYQAGSTPCNGVEGFNCYFPLQSYGFQPTNGVGYQPYRVVVLSFELLHAPATVCGPKKSTNLVKNKCVNFNFNGLTGTGVLTESNKKFLPFQQFGRDIADTTDAVRDPQTLEILDITPCSFGGVSVITPGTNTSNQVAVLYQGVNCTEVPVAIHADQLTPTWRVYSTGSNVFQTRAGCLIGAEHVNNSYECDIPIGAGICASYQTQTNSPRRARSVASQSIIAYTMSLGAENSVAYSNNSIAIPTNFTISVTTEILPVSMTKTSVDCTMYICGDSTECSNLLLQYGSFCTQLNRALTGIAVEQDKNTQEVFAQVKQIYKTPPIKDFGGFNFSQILPDPSKPSKRSFIEDLLFNKVTLADAGFIKQYGDCLGDIAARDLICAQKFNGLTVLPPLLTDEMIAQYTSALLAGTITSGWTFGAGAALQIPFAMQMAYRFNGIGVTQNVLYENQKLIANQFNSAIGKIQDSLSSTAPALGKLQDVVNQNAQALNTLVKQLSSNCGAISSVLNDILSRLDKVEAEVQIDRLITCRLQSLQTYVTQQLIRAAEIRASANLAATKMSECVLGQSKRVDFCGKGYHLMSFPQSAPHGVVFLHVTYVPAQEKNFTTAPAICHDGKAHFPREGVFVSNGTHWFVTQRNFYEPQIITTDNTFVSGNCDVVIGIVNNTVYDPLQPELDSFKEELDKYFKNHTSPDVDLGDISGINASVVNIQKEIDRLNEVAKNLNESLIDLQELGKYEQYIKWPWYIWLGFIAGLIAIVMVTIMLCCMTSCCSCLKGCCSCGSCCKFDEDDSEPVLKGVKLHYT

SEQ ID NO: 1038 - protein, 1273 aa, Artificial Sequence
  SARS-CoV-2/Germany/BavPat3/2020__EPI_ISL_414521 spike protein (1-1273)(F970C_G999C)
MFVFLVLLPLVSSQCVNLTTRTQLPPAYTNSFTRGVYYPDKVFRSSVLHSTQDLFLPFFSNVTWFHAIHVSGTNGTKRFDNPVLPFNDGVYFASTEKSNIIRGWIFGTTLDSKTQSLLIVNNATNVVIKVCEFQFCNDPFLGVYYHKNNKSWMESEFRVYSSANNCTFEYVSQPFLMDLEGKQGNFKNLREFVFKNIDGYFKIYSKHTPINLVRDLPQGFSALEPLVDLPIGINITRFQTLLALHRSYLTPGDSSSGWTAGAAAYYVGYLQPRTFLLKYNENGTITDAVDCALDPLSETKCTLKSFTVEKGIYQTSNFRVQPTESIVRFPNITNLCPFGEVFNATRFASVYAWNRKRISNCVADYSVLYNSASFSTFKCYGVSPTKLNDLCFTNVYADSFVIRGDEVRQIAPGQTGKIADYNYKLPDDFTGCVIAWNSNNLDSKVGGNYNYLYRLFRKSNLKPFERDISTEIYQAGSTPCNGVEGFNCYFPLQSYGFQPTNGVGYQPYRVVVLSFELLHAPATVCGPKKSTNLVKNKCVNFNFNGLTGTGVLTESNKKFLPFQQFGRDIADTTDAVRDPQTLEILDITPCSFGGVSVITPGTNTSNQVAVLYQDVNCTEVPVAIHADQLTPTWRVYSTGSNVFQTRAGCLIGAEHVNNSYECDIPIGAGICASYQTQTNSPRRARSVASQSIIAYTMSLGAENSVAYSNNSIAIPTNFTISVTTEILPVSMTKTSVDCTMYICGDSTECSNLLLQYGSFCTQLNRALTGIAVEQDKNTQQVFAQVKQIYKTPPIKDFGGFNFSQILPDPSKPSKRSFIEDLLFNKVTLADAGFIKQYGDCLGDIAARDLICAQKFNGLTVLPPLLTDEMIAQYTSALLAGTITSGWTFGAGAALQIPFAMQMAYRFNGIGVTQNVLYENQKLIANQFNSAIGKIQDSLSSTASALGKLQDVVNQNAQALNTLVKQLSSNCGAISSVLNDILSRLDKVEAEVQIDRLITCRLQSLQTYVTQQLIRAAEIRASANLAATKMSECVLGQSKRVDFCGKGYHLMSFPQSAPHGVVFLHVTYVPAQEKNFTTAPAICHDGKAHFPREGVFVSNGTHWFVTQRNFYEPQIITTDNTFVSGNCDVVIGIVNNTVYDPLQPELDSFKEELDKYFKNHTSPDVDLGDISGINASVVNIQKEIDRLNEVAKNLNESLIDLQELGKYEQYIKWPWYIWLGFIAGLIAIVMVTIMLCCMTSCCSCLKGCCSCGSCCKFDEDDSEPVLKGVKLHYT

SEQ ID NO: 1039 - protein, 1273 aa, Artificial Sequence
  SARS-CoV-2/France/HF1805/2020__EPI_ISL_414628 spike protein (1-1273)(F970C_G999C)
MFVFLVLLPLVSSQCVNLTTRTQLPPAYTNSFTRGVYYPDKVFRSSVLHSTQDLFLPFFSNVTWFHAIHVSGTNGTKRFDNPVLPFNDGVYFASTEKSNIIRGWIFGTTLDSKTQSLLIVNNATNVVIKVCEFQFCNDPFLGVYYHKNNKSWMESEFRVYSSANNCTFEYVSQPFLMDLEGKQGNFKNLREFVFKNIDGYFKIYSKHTPINLVRDLPQGFSALEPLVDLPIGINITRFQTLLALHRSYLTPGDSSSGWTAGAAAYYVGYLQPRTFLLKYNENGTITDAVDCALDPLSETKCTLKSFTVEKGIYQTSNFRVQPTESIVRFPNITNLCPFGEVFNATRFASVYAWNRKRISNCVADYSVLYNSASFSTFKCYGVSPTKLNDLCFTNVYADSFVIRGDEVRQIAPGQTGKIADYNYKLPDDFTGCVIAWNSNNLDSKVGGNYNYLYRLFRKSNLKPFERDISTEIYQAGSTPCNGVEGFNCYFPLQSYGFQPTNGVGYQPYRVVVLSFELLHAPATVCGPKKSTNLVKNKCVNFNFNGLTGTGVLTESNKKFLPFQQFGRDIADTTDAVRDPQTLEILDITPCSFGGVSVITPGTNTSNQVAVLYQGVNCTEVPVAIHADQLTPTWRVYSTGSNVFQTRAGCLIGAEHVNNSYECDIPIGAGICASYQTQTNSPRRARSVASQSIIAYTMSLGAENSVAYSNNSIAIPTNFTISVTTEILPVSMTKTSVDCTMYICGDSTECSNLLLQYGSFCTQLNRALTGIAVEQDKNTQEVFAQVKQIYKTPPIKDFGGFNFSQILPDPSKPSKRSFIEDLLFNKVTLADAGFIKQYGDCLGDIAARDLICAQKFNGLTVLPPLLTDEMIAQYTSALLAGTITSGWTFGAGAALQIPFAMQMAYRFNGIGVTQNVLYENQKLIANQFNSAIGKIQDSLSSTASALGKLQDVVNQNAQALNTLVKQLSSNCGAISSVLNDILSRLDKVEAEVQIDRLITCRLQSLQTYVTQQLIRAAEIRASANLAATKMSECVLGQSKRVDFCGKGYHLMSFPQSAPHGVVFLHVTYVPAQEKNFTTAPAICHDGKAHFPREGVFVSNGTHWFVTQRNFYEPQIITTDNTFVSGNCDVVIGVVNNTVYDPLQPELDSFKEELDKYFKNHTSPDVDLGDISGINASVVNIQKEIDRLNEVAKNLNESLIDLQELGKYEQYIKWPWYIWLGFIAGLIAIVMVTIMLCCMTSCCSCLKGCCSCGSCCKFDEDDSEPVLKGVKLHYT

SEQ ID NO: 1040 - protein, 1273 aa, Artificial Sequence
  SARS-CoV-2/Netherlands/ZuidHolland_9/2020__EPI_ISL_414445 spike protein (1-1273)(F970C_G999C)
MFVFLVLLPLVSSQCVNLTTRTQLPPAYTNSFTRGVYYPDKVFRSSVLHSTQDLFLPFFSNVTWFHAIHVSGTNGTKRFDNPVLPFNDGVYFASTEKSNIIRGWIFGTTLDSKTQSLLIVNNATNVVIKVCEFQFCNDPFLGVYYHKNNKSWMESEFRVYSSANNCTFEYVSQPFLMDLEGKQGNFKNLREFVFKNIDGYFKIYSKHTPINLVRDLPQGFSALEPLVDLPIGINITRFQTLLALHRSYLTPGDSSSGWTAGAAAYYVGYLQPRTFLLKYNENGTITDAVDCALDPLSETKCTLKSFTVEKGIYQTSNFRVQPTESIVRFPNITNLCPFGEVFNATRFASVYAWNRKRISNCVADYSVLYNSASFSTFKCYGVSPTKLNDLCFTNVYADSFVIRGDEVRQIAPGQTGKIADYNYKLPDDFTGCVIAWNSNNLDSKVGGNYNYLYRLFRKSNLKPFERDISTEIYQAGSTPCNGVEGFNCYFPLQSYGFQPTNGVGYQPYRVVVLSFELLHAPATVCGPKKSTNLVKNKCVNFNFNGLTGTGVLTESNKKFLPFQQFGRDIADTTDAVRDPQTLEILDITPCSFGGVSVITPGTNTSNQVAVLYQGVNCTEVPVAIHADQLTPTWRVYSTGSNVFQTRAGCLIGAEHVNNSYECDIPIGAGICASYQTQTNSPRRARSVASQSIIAYTMSLGAENSVAYSNNSIAIPTNFTISVTTEILPVSMTKTSVDCTMYICGDSTECSNLLLQYGSFCTQLNRALTGIAVEQDKNTQEVFAQVKQIYKTPPIKDFGGFNFSQILPDPSKPSKRSFIEDLLFNKVTLADAGFIKQYGDCLGDIAARDLICVQKFNGLTVLPPLLTDEMIAQYTSALLAGTITSGWTFGAGAALQIPFAMQMAYRFNGIGVTQNVLYENQKLIANQFNSAIGKIQDSLSSTASALGKLQDVVNQNAQALNTLVKQLSSNCGAISSVLNDILSRLDKVEAEVQIDRLITCRLQSLQTYVTQQLIRAAEIRASANLAATKMSECVLGQSKRVDFCGKGYHLMSFPQSAPHGVVFLHVTYVPAQEKNFTTAPAICHDGKAHFPREGVFVSNGTHWFVTQRNFYEPQIITTDNTFVSGNCDVVIGIVNNTVYDPLQPELDSFKEELDKYFKNHTSPDVDLGDISGINASVVNIQKEIDRLNEVAKNLNESLIDLQELGKYEQYIKWPWYIWLGFIAGLIAIVMVTIMLCCMTSCCSCLKGCCSCGSCCKFDEDDSEPVLKGVKLHYT

SEQ ID NO: 1041 - protein, 1273 aa, Artificial Sequence
  SARS-CoV-2/Finland/FIN03032020A/2020__EPI_ISL_413602 spike protein (1-1273)(F970C_G999C)
MFVFLVLLPLVSSQCVNLTTRTQLPPAYTNSFTRGVYYPDKVFRSSVLHSTQDLFLPFFSNVTWFHAIHVSGTNGTKRFDNPVLPFNDGVYFASTEKSNIIRGWIFGTTLDSKTQSLLIVNNATNVVIKVCEFQFCNDPFLGVYYHKNNKSWMESEFRVYSSANNCTFEYVSQPFLMDLEGKQGNFKNLREFVFKNIDGYFKIYSKHTPINLVRDLPQGFSALEPLVDLPIGINITRFQTLLALHRSYLTPGDSSSGWTAGAAAYYVGYLQPRTFLLKYNENGTITDAVDCALDPLSETKCTLKSFTVEKGIYQTSNFRVQPTESIVRFPNITNLCPFGEVFNATRFASVYAWNRKRISNCVADYSVLYNSASFSTFKCYGVSPTKLNDLCFTNVYADSFVIRGDEVRQIAPGQTGKIADYNYKLPDDFTGCVISWNSNNLDSKVGGNYNYLYRLFRKSNLKPFERDISTEIYQAGSTPCNGVEGFNCYFPLQSYGFQPTNGVGYQPYRVVVLSFELLHAPATVCGPKKSTNLVKNKCVNFNFNGLTGTGVLTESNKKFLPFQQFGRDIADTTDAVRDPQTLEILDITPCSFGGVSVITPGTNTSNQVAVLYQGVNCTEVPVAIHADQLTPTWRVYSTGSNVFQTRAGCLIGAEHVNNSYECDIPIGAGICASYQTQTNSPRRARSVASQSIIAYTMSLGAENSVAYSNNSIAIPTNFTISVTTEILPVSMTKTSVDCTMYICGDSTECSNLLLQYGSFCTQLNRALTGIAVEQDKNTQEVFAQVKQIYKTPPIKDFGGFNFSQILPDPSKPSKRSFIEDLLFNKVTLADAGFIKQYGDCLGDIAARDLICAQKFNGLTVLPPLLTDEMIAQYTSALLAGTITSGWTFGAGAALQIPFAMQMAYRFNGIGVTQNVLYENQKLIANQFNSAIGKIQDSLSSTASALGKLQDVVNQNAQALNTLVKQLSSNCGAISSVLNDILSRLDKVEAEVQIDRLITCRLQSLQTYVTQQLIRAAEIRASANLAATKMSECVLGQSKRVDFCGKGYHLMSFPQSAPHGVVFLHVTYVPAQEKNFTTAPAICHDGKAHFPREGVFVSNGTHWFVTQRNFYEPQIITTDNTFVSGNCDVVIGIVNNTVYDPLQPELDSFKEELDKYFKNHTSPDVDLGDISGINASVVNIQKEIDRLNEVAKNLNESLIDLQELGKYEQYIKWPWYIWLGFIAGLIAIVMVTIMLCCMTSCCSCLKGCCSCGSCCKFDEDDSEPVLKGVKLHYT

SEQ ID NO: 1042 - protein, 1273 aa, Artificial Sequence
  SARS-CoV-2/France/GE1977/2020__EPI_ISL_414632 spike protein (1-1273)(F970C_G999C)
MFVFLVLLPLVSSQCVNLTTRTQLPPAYTNSFTRGVYYPDKVFRSSVLHSTQDLFLPFFSNVTWFHAIHVSGTNGTKRFDNPVLPFNDGVYFASTEKSNIIRGWIFGTTLDSKTQSLLIVNNATNVVIKVCEFQFCNDPFLGVYYHKNNKSWMESEFRVYSSANNCTFEYVSQPFLMDLEGKQGNFKNLREFVFKNIDGYFKIYSKHTPINLVRDLPQGFSALEPLVDLPIGINITRFQTLLALHRSYLTPGDSSSGWTAGAAAYYVGYLQPRTFLLKYNENGTITDAVDCALDPLSETKCTLKSFTVEKGIYQTSNFRVQPTESIVRFPNITNLCPFGEVFNATRFASVYAWNRKRISNCVADYSVLYNSASFSTFKCYGVSPTKLNDLCFTNVYADSFVIRGDEVRQIAPGQTGKIADYNYKLPDDFTGCVIAWNSNNLDSKVGGNYNYLYRLFRKSNLKPFERDISTEIYQAGSTPCNGVEGFNCYFPLQSYGFQPTNGVGYQPYRVVVLSFELLHAPATVCGPKKSTNLVKNKCVNFNFNGLTGTGVLTESNKKFLPFQQFGRDIADTTDAVRDPQTLEILDITPCSFGGVSVITPGTNTSNQVAVLYQGVNCTEVPVAIHADQLTPTWRVYSTGSNVFQTRAGCLIGAEHVNNSYECDIPIGAGICASYQTQTNSPRRARSVASQSIIAYTMSLGAENSVAYSNNSIAIPTNFTISVTTEILPVSMTKTSVDCTMYICGDSTECSNLLLQYGSFCTQLNRALTGIAVEQDKNTQEVFAQVKQIYKTPPIKDFGGFNFSQILPDPSKPSKRSFIEDLLFNKVTLADAGFIKQYGDCLGDIAARDLICAQKFNGLTVLPPLLTDEMIAQYTSALLAGTITSGWTFGAGAALQIPFAMQMAYRFNGIGVTQNVLYENQKLIANQFNSAIGKIQDSLFSTASALGKLQDVVNQNAQALNTLVKQLSSNCGAISSVLNDILSRLDKVEAEVQIDRLITCRLQSLQTYVTQQLIRAAEIRASANLAATKMSECVLGQSKRVDFCGKGYHLMSFPQSAPHGVVFLHVTYVPAQEKNFTTAPAICHDGKAHFPREGVFVSNGTHWFVTQRNFYEPQIITTDNTFVSGNCDVVIGIVNNTVYDPLQPELDSFKEELDKYFKNHTSPDVDLGDISGINASVVNIQKEIDRLNEVAKNLNESLIDLQELGKYEQYIKWPWYIWLGFIAGLIAIVMVTIMLCCMTSCCSCLKGCCSCGSCCKFDEDDSEPVLKGVKLHYT

SEQ ID NO: 1043 - protein, 1273 aa, Artificial Sequence
  SARS-CoV-2/Finland/FIN-313/2020__EPI_ISL_414641 spike protein (1-1273)(F970C_G999C)
MFVFLVLLPLVSSQCVNLTTRTQLPPAYTNSFTRGVYYPDKVFRSSVLHSTQDLFLPFFSNVTWFHAIHVSGTNGTKRFDNPVLPFNDGVYFASTEKSNIIRGWIFGTTLDSKTQSLLIVNNATNVVIKVCEFQFCNDPFLGVYYHKNNKSWMESEFRVYSSANNCTFEYVSQPFLMDLEGKQGNFKNLREFVFKNIDGYFKIYSKHTPINLVRDLPQGFSALEPLVDLPIGINITRFKTLLALHRSYLTPGDSSSGWTAGAAAYYVGYLQPRTFLLKYNENGTITDAVDCALDPLSETKCTLKSFTVEKGIYQTSNFRVQPTESIVRFPNITNLCPFGEVFNATRFASVYAWNRKRISNCVADYSVLYNSASFSTFKCYGVSPTKLNDLCFTNVYADSFVIRGDEVRQIAPGQTGKIADYNYKLPDDFTGCVIAWNSNNLDSKVGGNYNYLYRLFRKSNLKPFERDISTEIYQAGSTPCNGVEGFNCYFPLQSYGFQPTNGVGYQPYRVVVLSFELLHAPATVCGPKKSTNLVKNKCVNFNFNGLTGTGVLTESNKKFLPFQQFGRDIADTTDAVRDPQTLEILDITPCSFGGVSVITPGTNTSNQVAVLYQGVNCTEVPVAIHADQLTPTWRVYSTGSNVFQTRAGCLIGAEHVNNSYECDIPIGAGICASYQTQTNSPRRARSVASQSIIAYTMSLGAENSVAYSNNSIAIPTNFTISVTTEILPVSMTKTSVDCTMYICGDSTECSNLLLQYGSFCTQLNRALTGIAVEQDKNTQEVFAQVKQIYKTPPIKDFGGFNFSQILPDPSKPSKRSFIEDLLFNKVTLADAGFIKQYGDCLGDIAARDLICAQKFNGLTVLPPLLTDEMIAQYTSALLAGTITSGWTFGAGAALQIPFAMQMAYRFNGIGVTQNVLYENQKLIANQFNSAIGKIQDSLSSTASALGKLQDVVNQNAQALNTLVKQLSSNCGAISSVLNDILSRLDKVEAEVQIDRLITCRLQSLQTYVTQQLIRAAEIRASANLAATKMSECVLGQSKRVDFCGKGYHLMSFPQSAPHGVVFLHVTYVPAQEKNFTTAPAICHDGKAHFPREGVFVSNGTHWFVTQRNFYEPQIITTDNTFVSGNCDVVIGIVNNTVYDPLQPELDSFKEELDKYFKNHTSPDVDLGDISGINASVVNIQKEIDRLNEVAKNLNESLIDLQELGKYEQYIKWPWYIWLGFIAGLIAIVMVTIMLCCMTSCCSCLKGCCSCGSCCKFDEDDSEPVLKGVKLHYT

SEQ ID NO: 1044 - protein, 1273 aa, Artificial Sequence
  SARS-CoV-2/Netherlands/ZuidHolland_2/2020__EPI_ISL_414556 spike protein (1-1273)(F970C_G999C)
MFVFLVLLPLVSSQCVNLTTRTQLPPAYTNSFTRGVYYPDKVFRSSVLHSTQDLFLPFFSNVTWFHAIHVSGTNGTKRFDNPVLPFNDGVYFASTEKSNIIRGWIFGTTLDSKTQSLLIVNNATNVVIKVCEFQFCNDPFLGVYYHKNNKSWMESEFRVYSSANNCTFEYVSQPFLMDLEGKQGNFKNLREFVFKNIDGYFKIYSKHTPINLVRDLPQGFSALEPLVDLPIGINITRFQTLLALHRSYLTPGDSSSGWTAGAAAYYVGYLQPRTFLLKYNENGTITDAVDCALDPLSETKCTLKSFTVEKGIYQTSNFRVQPTESIVRFPNITNLCPFGEVFNATRFASVYAWNRKRISNCVADYSVLYNSASFSTFKCYGVSPTKLNDLCFTNVYADSFVIRGDEVRQIAPGQTGKIADYNYKLPDDFTGCVIAWNSNNLDSKVGGNYNYLYRLFRKSNLKPFERDISTEIYQAGSTPCNGVEGFNCYFPLQSYGFQPTNGVGYQPYRVVVLSFELLHAPATVCGPKKSTNLVKNKCVNFNFNGLTGTGVLTESNKKFLPFQQFGRDIADTTDAVRDPQTLEILDITPCSFGGVSVITPGTNTSNQVAVLYQGVNCTEVPVAIHADQLTPTWRVYSTGSNVFQTRAGCLIGAEHVNNSYECDIPIGAGICASYQTQTNSPRRARSVASQSIIAYTMSLGAENSVAYSNNSIAIPTNFTISVTTEILPVSMTKTSVDCTMYICGDSTECSNLLLQYGSFCTQLNRALTGIALEQDKNTQEVFAQVKQIYKTPPIKDFGGFNFSQILPDPSKPSKRSFIEDLLFNKVTLADAGFIKQYGDCLGDIAARDLICAQKFNGLTVLPPLLTDEMIAQYTSALLAGTITSGWTFGAGAALQIPFAMQMAYRFNGIGVTQNVLYENQKLIANQFNSAIGKIQDSLSSTASALGKLQDVVNQNAQALNTLVKQLSSNCGAISSVLNDILSRLDKVEAEVQIDRLITCRLQSLQTYVTQQLIRAAEIRASANLAATKMSECVLGQSKRVDFCGKGYHLMSFPQSAPHGVVFLHVTYVPAQEKNFTTAPAICHDGKAHFPREGVFVSNGTHWFVTQRNFYEPQIITTDNTFVSGNCDVVIGIVNNTVYDPLQPELDSFKEELDKYFKNHTSPDVDLGDISGINASVVNIQKEIDRLNEVAKNLNESLIDLQELGKYEQYIKWPWYIWLGFIAGLIAIVMVTIMLCCMTSCCSCLKGCCSCGSCCKFDEDDSEPVLKGVKLHYT

SEQ ID NO: 1045 - protein, 1273 aa, Artificial Sequence
  SARS-CoV-2/USA/WA-UW31/2020__EPI_ISL_414618 spike protein (1-1273)(F970C_G999C)
MFVFLVLLPLVSSQCVNLTTRTQLPPAYTNSFTRGVYYPDKVFRSSVLHSTQDLFLPFFSNVTWFHAIHVSGTNGTKRFDNPVLPFNDGVYFASTEKSNIIRGWIFGTTLDSKTQSLLIVNNATNVVIKVCEFQFCNDPFLGVYYHKNNKSWMESEFRVYSSANNCTFEYVSQPFLMDLEGKQGNFKNLREFVFKNIDGYFKIYSKHTPINLVRDLPQGFSALEPLVDLPIGINITRFQTLLALHRSYLTPGDSSSGWTAGAAAYYVGYLQPRTFLLKYNENGTITDAVDCALDPLSETKCTLKSFTVEKGIYQTSNFRVQPTESIVRFPNITNLCPFGEVFNATRFASVYAWNRKRISNCVADYSVLYNSASFSTFKCYGVSPTKLNDLCFTNVYADSFVIRGDEVRQIAPGQTGKIADYNYKLPDDFTGCVIAWNSNNLDSKVGGNYNYLYRLFRKSNLKPFERDISTEIYQAGSTPCNGAEGFNCYFPLQSYGFQPTNGVGYQPYRVVVLSFELLHAPATVCGPKKSTNLVKNKCVNFNFNGLTGTGVLTESNKKFLPFQQFGRDIADTTDAVRDPQTLEILDITPCSFGGVSVITPGTNTSNQVAVLYQDVNCTEVPVAIHADQLTPTWRVYSTGSNVFQTRAGCLIGAEHVNNSYECDIPIGAGICASYQTQTNSPRRARSVASQSIIAYTMSLGAENSVAYSNNSIAIPTNFTISVTTEILPVSMTKTSVDCTMYICGDSTECSNLLLQYGSFCTQLNRALTGIAVEQDKNTQEVFAQVKQIYKTPPIKDFGGFNFSQILPDPSKPSKRSFIEDLLFNKVTLADAGFIKQYGDCLGDIAARDLICAQKFNGLTVLPPLLTDEMIAQYTSALLAGTITSGWTFGAGAALQIPFAMQMAYRFNGIGVTQNVLYENQKLIANQFNSAIGKIQDSLSSTASALGKLQDVVNQNAQALNTLVKQLSSNCGAISSVLNDILSRLDKVEAEVQIDRLITCRLQSLQTYVTQQLIRAAEIRASANLAATKMSECVLGQSKRVDFCGKGYHLMSFPQSAPHGVVFLHVTYVPAQEKNFTTAPAICHDGKAHFPREGVFVSNGTHWFVTQRNFYEPQIITTDNTFVSGNCDVVIGIVNNTVYDPLQPELDSFKEELDKYFKNHTSPDVDLGDISGINASVVNIQKEIDRLNEVAKNLNESLIDLQELGKYEQYIKWPWYIWLGFIAGLIAIVMVTIMLCCMTSCCSCLKGCCSCGSCCKFDEDDSEPVLKGVKLHYT

SEQ ID NO: 1046 - protein, 1273 aa, Artificial Sequence
  SARS-CoV-2/South Korea/SNU01/2020__EPI_ISL_411929 spike protein (1-1273)(F970C_G999C)
MFVFLVLLPLVSSQCVNLTTRTQLPPAYTNSFTRGVYYPDKVFRSSVLHSTQDLFLPFFSNVTWFHAIHVSGTNGTKRFDNPVLPFNDGVYFASTEKSNIIRGWIFGTTLDSKTQSLLIVNNATNVVIKVCEFQFCNDPFLGVYYHKNNKSWMESEFRVYSSANNCTFEYVSQPFLMDLEGKQGNFKNLREFVFKNIDGYFKIYSKHTPINLVRDLPQGFWALEPLVDLPIGINITRFQTLLALHRSYLTPGDSSSGWTAGAAAYYVGYLQPRTFLLKYNENGTITDAVDCALDPLSETKCTLKSFTVEKGIYQTSNFRVQPTESIVRFPNITNLCPFGEVFNATRFASVYAWNRKRISNCVADYSVLYNSASFSTFKCYGVSPTKLNDLCFTNVYADSFVIRGDEVRQIAPGQTGKIADYNYKLPDDFTGCVIAWNSNNLDSKVGGNYNYLYRLFRKSNLKPFERDISTEIYQAGSTPCNGVEGFNCYFPLQSYGFQPTNGVGYQPYRVVVLSFELLHAPATVCGPKKSTNLVKNKCVNFNFNGLTGTGVLTESNKKFLPFQQFGRDIADTTDAVRDPQTLEILDITPCSFGGVSVITPGTNTSNQVAVLYQDVNCTEVPVAIHADQLTPTWRVYSTGSNVFQTRAGCLIGAEHVNNSYECDIPIGAGICASYQTQTNSPRRARSVASQSIIAYTMSLGAENSVAYSNNSIAIPTNFTISVTTEILPVSMTKTSVDCTMYICGDSTECSNLLLQYGSFCTQLNRALTGIAVEQDKNTQEVFAQVKQIYKTPPIKDFGGFNFSQILPDPSKPSKRSFIEDLLFNKVTLADAGFIKQYGDCLGDIAARDLICAQKFNGLTVLPPLLTDEMIAQYTSALLAGTITSGWTFGAGAALQIPFAMQMAYRFNGIGVTQNVLYENQKLIANQFNSAIGKIQDSLSSTASALGKLQDVVNQNAQALNTLVKQLSSNCGAISSVLNDILSRLDKVEAEVQIDRLITCRLQSLQTYVTQQLIRAAEIRASANLAATKMSECVLGQSKRVDFCGKGYHLMSFPQSAPHGVVFLHVTYVPAQEKNFTTAPAICHDGKAHFPREGVFVSNGTHWFVTQRNFYEPQIITTDNTFVSGNCDVVIGIVNNTVYDPLQPELDSFKEELDKYFKNHTSPDVDLGDISGINASVVNIQKEIDRLNEVAKNLNESLIDLQELGKYEQYIKWPWYIWLGFIAGLIAIVMVTIMLCCMTSCCSCLKGCCSCGSCCKFDEDDSEPVLKGVKLHYT

SEQ ID NO: 1047 - protein, 1273 aa, Artificial Sequence
  SARS-CoV-2/China/WF0004/2020__EPI_ISL_413694 spike protein (1-1273)(F970C_G999C)
MFVFLVLLPLVSSQCVNLTTRTQLPPAYTNSFTRGVYYPDKVFRSSVLHSTQDLFLPFFSNVTWFHAIHVSGTNGTKRFDNPVLPFNDGVYFASTEKSNIIRGWIFGTTLDSKTQSLLIVNNATNVVIKVCEFQFCNDPFLGVYYHKNNKSWTESEFRVYSSANNCTFEYVSQPFLMDLEGKQGNFKNLREFVFKNIDGYFKIYSKHTPINLVRDLPQGFSALEPLVDLPIGINITRFQTLLALHRSYLTPGDSSSGWTAGAAAYYVGYLQPRTFLLKYNENGTITDAVDCALDPLSETKCTLKSFTVEKGIYQTSNFRVQPTESIVRFPNITNLCPFGEVFNATRFASVYAWNRKRISNCVADYSVLYNSASFSTFKCYGVSPTKLNDLCFTNVYADSFVIRGDEVRQIAPGQTGKIADYNYKLPDDFTGCVIAWNSNNLDSKVGGNYNYLYRLFRKSNLKPFERDISTEIYQAGSTPCNGVEGFNCYFPLQSYGFQPTNGVGYQPYRVVVLSFELLHAPATVCGPKKSTNLVKNKCVNFNFNGLTGTGVLTESNKKFLPFQQFGRDIADTTDAVRDPQTLEILDITPCSFGGVSVITPGTNTSNQVAVLYQDVNCTEVPVAIHADQLTPTWRVYSTGSNVFQTRAGCLIGAEHVNNSYECDIPIGAGICASYQTQTNSPRRARSVASQSIIAYTMSLGAENSVAYSNNSIAIPTNFTISVTTEILPVSMTKTSVDCTMYICGDSTECSNLLLQYGSFCTQLNRALTGIAVEQDKNTQEVFAQVKQIYKTPPIKDFGGFNFSQILPDPSKPSKRSFIEDLLFNKVTLADAGFIKQYGDCLGDIAARDLICAQKFNGLTVLPPLLTDEMIAQYTSALLAGTITSGWTFGAGAALQIPFAMQMAYRFNGIGVTQNVLYENQKLIANQFNSAIGKIQDSLSSTASALGKLQDVVNQNAQALNTLVKQLSSNCGAISSVLNDILSRLDKVEAEVQIDRLITCRLQSLQTYVTQQLIRAAEIRASANLAATKMSECVLGQSKRFDFCGKGYHLMSFPQSAPHGVVFLHVTYVPAQEKNFTTAPAICHDGKAHFPREGVFVSNGTHWFVTQRNFYEPQIITTDNTFVSGNCDVVIGIVNNTVYDPLQPELDSFKEELDKYFKNHTSPDVDLGDISGINASVVNIQKEIDRLNEVAKNLNESLIDLQELGKYEQYIKWPWYIWLGFIAGLIAIVMVTIMLCCMTSCCSCLKGCCSCGSCCKFDEDDSEPVLKGVKLHYT

SEQ ID NO: 1048 - protein, 1273 aa, Artificial Sequence
  SARS-CoV-2/China/WF0028/2020__EPI_ISL_413791 spike protein (1-1273)(F970C_G999C)
MFVFLVLLPLVSSQCVNLTTRTQLPPAYTNSFTRGVYYPDKVFRSSVLHSTQDLFLPFFSNVTWFHAIHVSGTNGTKRFDNPVLPFNDGVYFASTEKSNIIRGWIFGTTLDSKTQSLLIVNNATNVVIKVCEFQFCNDPFLGVYYHKNNKSWMESEFRVYSSANNCTFEYVSQPFLMDLEGKQGNFKNLREFVFKNIDGYFKIYSKHTPINLVRDLPQGFSALEPLVDLPIGINITRFQTLLALHRSYLTPGDSSSGWTAGAAAYYVGYLQPRTFLLKYNENGTITDAVDCALDPLSETKCTLKSFTVEKGIYQTSNFRVQPTESIVRFPNITNLCPFGEVFNATRFASVYAWNRKRISNCVADYSVLYNSASFSTFKCYGVSPTKLNDLCFTNVYADSFVIRGDEVRQIAPGQTGKIADYNYKLPDDFTGCVIAWNSNNLDSKVGGNYNYLYRLFRKSNLKPFERDISTEIYQAGSTPCNGVEGFNCYFPLQSYGFQPTNGVGYQPYRVVVLSFELLHAPATVCGPKKSTNLVKNKCVNFNFNGLTGTGVLTESNKKFLPFQQFGRDIADTTDAVRDPQTLEILDITPCSFGGVSVITPGTNTSNQVAVLYQDVNCTEVPVAIHADQLTPTWRVYSTGSNVFQTRAGCLIGAEHVNNSYECDIPIGAGICASYQTQTNSPRRARSVASQSIIAYTMSLGAENSVAYSNNSIAIPTNFTISVTTEILPVSMTKTSVDCTMYICGDSTECSNLLLQYGSFCTQLNRALTGIAVEQDKNTQEVFAQVKQIYKTPPIKDFGGFNFSQILPDPSKPSKRSFIEDLLFNKVTLADAGFIKQYGDCLGDIAARDLICAQKFNGLTVLPPLLTDEMIAQYTSALLAGTITSGWTFGAGAALQIPFAMQMAYRFNGIGVTQNVLYENQKLIANQFNSAIGKIQDSLSSTASALGKLQDVVNQNAQALNTLVKQLSSNCGAISSVLNDILSRLDKVEAEVQIDRLITCRLQSLQTYVTQQLIRAAEIRASANLAATKMSECVLGQSKRVDFCGKGYHLMSFPQSAPHGVVFLHVTYVPAQEKNFTTAPAICHDGKAHFPREGVFVSNGTHWFVTQRNFYEPQIITTDNTFVSGNCDVVIGIVNNTVYDPLQPELESFKEELDKYFKNHTSPDVDLGDISGINASVVNIQKEIDRLNEVAKNLNESLIDLQELGKYEQYIKWPWYIWLGFIAGLIAIVMVTIMLCCMTSCCSCLKGCCSCGSCCKFDEDDSEPVLKGVKLHYT

SEQ ID NO: 1049 - protein, 1273 aa, Artificial Sequence
  SARS-CoV-2/2019-nCoV/USA-CruiseA-18/2020__MT159716.1 spike protein (1-1273)(F970C_G999C)
MFVFLVLLPLVSSQCVNLTTRTQLPPAYTNSFTRGVYYPDKVFRSSVLHSTQDLFLPFFSNVTWFHAIHVSGTNGTKRFDNPVLPFNDGVYFASTEKSNIIRGWIFGTTLDSKTQSLLIVNNATNVVIKVCEFQFCNDPFLGVYYHKNNKSWMESELRVYSSANNCTFEYVSQPFLMDLEGKQGNFKNLREFVFKNIDGYFKIYSKHTPINLVRDLPQGFSALEPLVDLPIGINITRFQTLLALHRSYLTPGDSSSGWTAGAAAYYVGYLQPRTFLLKYNENGTITDAVDCALDPLSETKCTLKSFTVEKGIYQTSNFRVQPTESIVRFPNITNLCPFGEVFNATRFASVYAWNRKRISNCVADYSVLYNSASFSTFKCYGVSPTKLNDLCFTNVYADSFVIRGDEVRQIAPGQTGKIADYNYKLPDDFTGCVIAWNSNNLDSKVGGNYNYLYRLFRKSNLKPFERDISTEIYQAGSTPCNGVEGFNCYFPLQSYGFQPTNGVGYQPYRVVVLSFELLHAPATVCGPKKSTNLVKNKCVNFNFNGLTGTGVLTESNKKFLPFQQFGRDIADTTDAVRDPQTLEILDITPCSFGGVSVITPGTNTSNQVAVLYQDVNCTEVPVAIHADQLTPTWRVYSTGSNVFQTRAGCLIGAEHVNNSYECDIPIGAGICASYQTQTNSPRRARSVASQSIIAYTMSLGAENSVAYSNNSIAIPTNFTISVTTEILPVSMTKTSVDCTMYICGDSTECSNLLLQYGSFCTQLNRALTGIAVEQDKNTQEVFAQVKQIYKTPPIKDFGGFNFSQILPDPSKPSKRSFIEDLLFNKVTLADAGFIKQYGDCLGDIAARDLICAQKFNGLTVLPPLLTDEMIAQYTSALLAGTITSGWTFGAGAALQIPFAMQMAYRFNGIGVTQNVLYENQKLIANQFNSAIGKIQDSLSSTASALGKLQDVVNQNAQALNTLVKQLSSNCGAISSVLNDILSRLDKVEAEVQIDRLITCRLQSLQTYVTQQLIRAAEIRASANLAATKMSECVLGQSKRVDFCGKGYHLMSFPQSAPHGVVFLHVTYVPAQEKNFTTAPAICHDGKAHFPREGVFVSNGTHWFVTQRNFYEPQIITTDNTFVSGNCDVVIGIVNNTVYDPLQPELDSFKEELDKYFKNHTSPDVDLGDISGINASVVNIQKEIDRLNEVAKNLNESLIDLQELGKYEQYIKWPWYIWLGFIAGLIAIVMVTIMLCCMTSCCSCLKGCCSCGSCCKFDEDDSEPVLKGVKLHYT

SEQ ID NO: 1050 - protein, 1273 aa, Artificial Sequence
  SARS-CoV-2/SARS-CoV-2/Yunnan-01/human/2020/CHN__MT049951.1 spike protein (1-1273)(F970C_G999C)
MFVFLVLLPLVSSQCVNLTTRTQLPPANTNSFTRGVYYPDKVFRSSVLHSTQDLFLPFFSNVTWFHAIHVSGTNGTKRFDNPVLPFNDGVYFASTEKSNIIRGWIFGTTLDSKTQSLLIVNNATNVVIKVCEFQFCNDPFLGVYYHKNNKSWMESEFRVYSSANNCTFEYVSQPFLMDLEGKQGNFKNLREFVFKNIDGYFKIYSKHTPINLVRDLPQGFSALEPLVDLPIGINITRFQTLLALHRSYLTPGDSSSGWTAGAAAYYVGYLQPRTFLLKYNENGTITDAVDCALDPLSETKCTLKSFTVEKGIYQTSNFRVQPTESIVRFPNITNLCPFGEVFNATRFASVYAWNRKRISNCVADYSVLYNSASFSTFKCYGVSPTKLNDLCFTNVYADSFVIRGDEVRQIAPGQTGKIADYNYKLPDDFTGCVIAWNSNNLDSKVGGNYNYLYRLFRKSNLKPFERDISTEIYQAGSTPCNGVEGFNCYFPLQSYGFQPTNGVGYQPYRVVVLSFELLHAPATVCGPKKSTNLVKNKCVNFNFNGLTGTGVLTESNKKFLPFQQFGRDIADTTDAVRDPQTLEILDITPCSFGGVSVITPGTNTSNQVAVLYQDVNCTEVPVAIHADQLTPTWRVYSTGSNVFQTRAGCLIGAEHVNNSYECDIPIGAGICASYQTQTNSPRRARSVASQSIIAYTMSLGAENSVAYSNNSIAIPTNFTISVTTEILPVSMTKTSVDCTMYICGDSTECSNLLLQYGSFCTQLNRALTGIAVEQDKNTQEVFAQVKQIYKTPPIKDFGGFNFSQILPDPSKPSKRSFIEDLLFNKVTLADAGFIKQYGDCLGDIAARDLICAQKFNGLTVLPPLLTDEMIAQYTSALLAGTITSGWTFGAGAALQIPFAMQMAYRFNGIGVTQNVLYENQKLIANQFNSAIGKIQDSLSSTASALGKLQDVVNQNAQALNTLVKQLSSNCGAISSVLNDILSRLDKVEAEVQIDRLITCRLQSLQTYVTQQLIRAAEIRASANLAATKMSECVLGQSKRVDFCGKGYHLMSFPQSAPHGVVFLHVTYVPAQEKNFTTAPAICHDGKAHFPREGVFVSNGTHWFVTQRNFYEPQIITTDNTFVSGNCDVVIGIVNNTVYDPLQPELDSFKEELDKYFKNHTSPDVDLGDISGINASVVNIQKEIDRLNEVAKNLNESLIDLQELGKYEQYIKWPWYIWLGFIAGLIAIVMVTIMLCCMTSCCSCLKGCCSCGSCCKFDEDDSEPVLKGVKLHYT

SEQ ID NO: 1051 - protein, 1273 aa, Artificial Sequence
  SARS-CoV-2/USA/WA-UW292/2020__EPI_ISL_418077 spike protein (1-1273)(F970C_G999C)
MFVFLVLLPLVSSQCVNLTTRTQLPPAYTNSFTRGVYYPDKVFRSSVLHSTQDLFLPFFSNVTWFHAIHVSGTNGTKRFDNPVLPFNDGVYFASTEKSNIIRGWIFGTTLDSKTQSLLIVNNATNVVIKVCEFQFCNDPFLGVYYHKNNKSWMESEFRVYSSANNCTFEYVSQPFLMDLEGKQGNFKNLREFVFKNIDGYFKIYSKHTPINLVRDLPQGFSALEPLVDLPIGINITRFQTLLALHRSYLTPGDSSSGWTAGAAAYYVGYLQPRTFLLKYNENGTITDAVDCALDPLSETKCTLKSFTVEKGIYQTSNFRVQPTESIVRFPNITNLCPFGEVFNATRFASVYAWNRKRISNCVADYSVLYNSASFSTFKCYGVSPTKLNDLCFTNVYADSFVIRGDEVRQIAPGQTGKIADYNYKLPDDFTGCVIAWNSNNLDSKVGGNYNYLYRLFRKSNLKPFERDISTEIYQASSTPCNGVEGFNCYFPLQSYGFQPTNGVGYQPYRVVVLSFELLHAPATVCGPKKSTNLVKNKCVNFNFNGLTGTGVLTESNKKFLPFQQFGRDIADTTDAVRDPQTLEILDITPCSFGGVSVITPGTNTSNQVAVLYQDVNCTEVPVAIHADQLTPTWRVYSTGSNVFQTRAGCLIGAEHVNNSYECDIPIGAGICASYQTQTNSPRRARSVASQSIIAYTMSLGAENSVAYSNNSIAIPTNFTISVTTEILPVSMTKTSVDCTMYICGDSTECSNLLLQYGSFCTQLNRALTGIAVEQDKNTQEVFAQVKQIYKTPPIKDFGGFNFSQILPDPSKPSKRSFIEDLLFNKVTLADAGFIKQYGDCLGDIAARDLICAQKFNGLTVLPPLLTDEMIAQYTSALLAGTITSGWTFGAGAALQIPFAMQMAYRFNGIGVTQNVLYENQKLIANQFNSAIGKIQDSLSSTASALGKLQDVVNQNAQALNTLVKQLSSNCGAISSVLNDILSRLDKVEAEVQIDRLITCRLQSLQTYVTQQLIRAAEIRASANLAATKMSECVLGQSKRVDFCGKGYHLMSFPQSAPHGVVFLHVTYVPAQEKNFTTAPAICHDGKAHFPREGVFVSNGTHWFVTQRNFYEPQIITTDNTFVSGNCDVVIGIVNNTVYDPLQPELDSFKEELDKYFKNHTSPDVDLGDISGINASVVNIQKEIDRLNEVAKNLNESLIDLQELGKYEQYIKWPWYIWLGFIAGLIAIVMVTIMLCCMTSCCSCLKGCCSCGSCCKFDEDDSEPVLKGVKLHYT

SEQ ID NO: 1052 - protein, 1273 aa, Artificial Sequence
  SARS-CoV-2/Iceland/192/2020__EPI_ISL_417819 spike protein (1-1273)(F970C_G999C)
MFVFFVLLPLVSSQCVNLTTRTQLPPAYTNSFTRGVYYPDKVFRSSVLHSTQDLFLPFFSNVTWFHAIHVSGTNGTKRFDNPVLPFNDGVYFASTEKSNIIRGWIFGTTLDSKTQSLLIVNNATNVVIKVCEFQFCNDPFLGVYYHKNNKSWMESEFRVYSSANNCTFEYVSQPFLMDLEGKQGNFKNLREFVFKNIDGYFKIYSKHTPINLVRDLPQGFSALEPLVDLPIGINITRFQTLLALHRSYLTPGDSSSGWTAGAAAYYVGYLQPRTFLLKYNENGTITDAVDCALDPLSETKCTLKSFTVEKGIYQTSNFRVQPTESIVRFPNITNLCPFGEVFNATRFASVYAWNRKRISNCVADYSVLYNSASFSTFKCYGVSPTKLNDLCFTNVYADSFVIRGDEVRQIAPGQTGKIADYNYKLPDDFTGCVIAWNSNNLDSKVGGNYNYLYRLFRKSNLKPFERDISTEIYQAGSTPCNGVEGFNCYFPLQSYGFQPTNGVGYQPYRVVVLSFELLHAPATVCGPKKSTNLVKNKCVNFNFNGLTGTGVLTESNKKFLPFQQFGRDIADTTDAVRDPQTLEILDITPCSFGGVSVITPGTNTSNQVAVLYQGVNCTEVPVAIHADQLTPTWRVYSTGSNVFQTRAGCLIGAEHVNNSYECDIPIGAGICASYQTQTNSPRRARSVASQSIIAYTMSLGAENSVAYSNNSIAIPTNFTISVTTEILPVSMTKTSVDCTMYICGDSTECSNLLLQYGSFCTQLNRALTGIAVEQDKNTQEVFAQVKQIYKTPPIKDFGGFNFSQILPDPSKPSKRSFIEDLLFNKVTLADAGFIKQYGDCLGDIAARDLICAQKFNGLTVLPPLLTDEMIAQYTSALLAGTITSGWTFGAGAALQIPFAMQMAYRFNGIGVTQNVLYENQKLIANQFNSAIGKIQDSLSSTASALGKLQDVVNQNAQALNTLVKQLSSNCGAISSVLNDILSRLDKVEAEVQIDRLITCRLQSLQTYVTQQLIRAAEIRASANLAATKMSECVLGQSKRVDFCGKGYHLMSFPQSAPHGVVFLHVTYVPAQEKNFTTAPAICHDGKAHFPREGVFVSNGTHWFVTQRNFYEPQIITTDNTFVSGNCDVVIGIVNNTVYDPLQPELDSFKEELDKYFKNHTSPDVDLGDISGINASVVNIQKEIDRLNEVAKNLNESLIDLQELGKYEQYIKWPWYIWLGFIAGLIAIVMVTIMLCCMTSCCSCLKGCCSCGSCCKFDEDDSEPVLKGVKLHYT

SEQ ID NO: 1053 - protein, 1273 aa, Artificial Sequence
  SARS-CoV-2/Belgium/ULG-6939/2020__EPI_ISL_417020 spike protein (1-1273)(F970C_G999C)
MFVFLVLLPLVSSQCVNLTTRTQLPPAYTNSFTRGVYYPDKVFRSSVLHSTQDLFLPFFSNVTWFHAIHVSGTNGTKRFDNPVLPFNDGVYFASTEKSNIIRGWIFGTTLDSKTQSLLIVNNATNVVIKVCEFQFCNDPFLGVYYHKNNKSWMESEFRVYSSANNCTFEYVSQPFLMDLEGKQGNFKNLREFVFKNIDGYFKIYSKHTPINLVRDLPQGFSALEPLVDLPIGINITRFQTLLALHRSYLTPGDSSSGWTAGAAAYYVGYLQPRTFLLKYNENGTITDAVDCALDPLSETKCTLKSFTVEKGIYQTSNFRVQPTESIVRFPNITNLCPFGEVFNATRFASVYAWNRKRISNCVADYSVLYNSASFSTFKCYGVSPTKLNDLCFTNVYADSFVIRGDEVRQIAPGQTGKIADYNYKLPDDFTGCVIAWNSNNLDSKVGGNYNYLYRLFRKSNLKPFERDISTEIYQAGSTPCNGVEGFNCYFPLQSYGFQPTNGVGYQPYRVVVLSFELLHAPATVCGPKKSTNLVKNKCVNFNFNGLTGTGVLTESNKKFLPFQQFGRDIADTTDAVRDPQTLEILDITPCSFGGVSVITPGTNTSNQVAVLYQGVNCTEVPVAIHADQLTPTWRVYSTGSNVFQTRAGCLIGAEHVNNSYECDIPIGAGICASYQTQTNSPRRARSVASQSIIAYTMSLGAENSVVYSNNSIAIPTNFTISVTTEILPVSMTKTSVDCTMYICGDSTECSNLLLQYGSFCTQLNRALTGIAVEQDKNTQEVFAQVKQIYKTPPIKDFGGFNFSQILPDPSKPSKRSFIEDLLFNKVTLADAGFIKQYGDCLGDIAARDLICAQKFNGLTVLPPLLTDEMIAQYTSALLAGTITSGWTFGAGAALQIPFAMQMAYRFNGIGVTQNVLYENQKLIANQFNSAIGKIQDSLSSTASALGKLQDVVNQNAQALNTLVKQLSSNCGAISSVLNDILSRLDKVEAEVQIDRLITCRLQSLQTYVTQQLIRAAEIRASANLAATKMSECVLGQSKRVDFCGKGYHLMSFPQSAPHGVVFLHVTYVPAQEKNFTTAPAICHDGKAHFPREGVFVSNGTHWFVTQRNFYEPQIITTDNTFVSGNCDVVIGIVNNTVYDPLQPELDSFKEELDKYFKNHTSPDVDLGDISGINASVVNIQKEIDRLNEVAKNLNESLIDLQELGKYEQYIKWPWYIWLGFIAGLIAIVMVTIMLCCMTSCCSCLKGCCSCGSCCKFDEDDSEPVLKGVKLHYT

SEQ ID NO: 1054 - protein, 1273 aa, Artificial Sequence
  SARS-CoV-2/France/HF2496/2020__EPI_ISL_418231 spike protein (1-1273)(F970C_G999C)
MFVFLVLLPLVSSQCVNLTTRTQLPPAYTNSFTRGVYYPDKVFRSSVLHSTQDLFLPFFSNVTWFHAIHVSGTNGTKRFDNPVLPFNDGVYFASTEKSNIIRGWIFGTTLDSKTQSLLIVNNATNVVIKVCEFQFCNDPFLGVYYHKNNKSWMESEFRVYSSANNCTFEYVSQPFLMDLEGKQGNFKNLREFVFKNIDGYFKIYSKHTPINLVRDLPQGFSALEPLVDLPIGINITRFQTLLALHRSYLTPGDSSSGWTAGAAAYYVGYLQPRTFLLKYNENGTITDAVDCALDPLSETKCTLKSFTVEKGIYQTSNFRVQPTESIVRFPNITNLCPFGEVFNATRFASVYAWNRKRISNCVADYSVLYNSASFSTFKCYGVSPTKLNDLCFTNVYADSFVIRGDEVRQIAPGQTGKIADYNYKLPDDFTGCVIAWNSNNLDSKVGGNYNYLYRLFRKSNLKPFERDISTEIYQAGSTPCNGVEGFNCYFPLQSYGFQPTNGVGYQPYRVVVLSFELLHAPATVCGPKKSTNLVKNKCVNFNFNGLTGTGVLTESNKKFLPFQQFGRDIADTTDAVRDPQTLEILDITPCSFGGVSVITPGTNTSNQVAVLYQGVNCTEVPVAIHADQLTPTWRVYSTGSNVFQTRAGCLIGAEHVNNSYECDIPIGAGICASYQTQTNSPRRARSVASQSIIAYTMSLGAENSVAYSNNSIAIPTNFTISVTTEILPVSMTKTSVDCTMYICGDSTECSNLLLQYGSFCTQLNRALTGIAVEQDKNTQEVFAQVKQIYKTPPIKDFGGFNFSQILPDPSKPSKRSFIEDLLFNKVTLADAGFIKQYGDCLGDIVARDLICAQKFNGLTVLPPLLTDEMIAQYTSALLAGTITSGWTFGAGAALQIPFAMQMAYRFNGIGVTQNVLYENQKLIANQFNSAIGKIQDSLSSTASALGKLQDVVNQNAQALNTLVKQLSSNCGAISSVLNDILSRLDKVEAEVQIDRLITCRLQSLQTYVTQQLIRAAEIRASANLAATKMSECVLGQSKRVDFCGKGYHLMSFPQSAPHGVVFLHVTYVPAQEKNFTTAPAICHDGKAHFPREGVFVSNGTHWFVTQRNFYEPQIITTDNTFVSGNCDVVIGIVNNTVYDPLQPELDSFKEELDKYFKNHTSPDVDLGDISGINASVVNIQKEIDRLNEVAKNLNESLIDLQELGKYEQYIKWPWYIWLGFIAGLIAIVMVTIMLCCMTSCCSCLKGCCSCGSCCKFDEDDSEPVLKGVKLHYT

SEQ ID NO: 1055 - protein, 1273 aa, Artificial Sequence
  SARS-CoV-2/USA/WA-UW291/2020__EPI_ISL_418076 spike protein (1-1273)(F970C_G999C)
MFVFLVLLPLVSSQCVNLTTRTQLPPAYTNSFTRGVYYPDKVFRSSVLHSTQDLFLPFFSNVTWFHAIHVSGTNGTKRFDNPVLPFNDGVYFASTEKSNIIRGWIFGTTLDSKTQSLLIVNNATNVVIKVCEFQFCNDPFLGVYYHKNNKSWMESEFRVYSSANNCTFEYVSQPFLMDLEGKQGNFKNLREFVFKNIDGYFKIYSKHTPINLVRDLPQGFSALEPLVDLPIGINITRFQTLLALHRSYLTPGDSSSGWTAGAAAYYVGYLQPRTFLLKYNENGTITDAVDCALDPLSETKCTLKSFTVEKGIYQTSNFRVQPTESIVRFPNITNLCPFGEVFNATRFASVYAWNRKRISNCVADYSVLYNSASFSTFKCYGVSPTKLNDLCFTNVYADSFVIRGDEVRQIAPGQTGKIADYNYKLPDDFTGCVIAWNSNNLDSKVGGNYNYLYRLFRKSNLKPFERDISTEIYQAGSTPCNGVEGFNCYFPLQSYGFQPTNGVGYQPYRVVVLSFELLHAPATVCGPKKSTNLVKNKCVNFNFNGLTGTGVLTESNKKFLPFQQFGRDIADTTDAVRDPQTLEILDITPCSFGGVSVITPGTNTSNQVAVLYQGVNCTEVPVAIHADQLTPTWRVYSTGSNVFQTRAGCLIGAEHVNNSYECDIPIGAGICASYQTQTNSPRRARSVASQSIIAYTMSLGAENSVAYSNNSIAIPTNFTISVTTEILPVSMTKTSVDCTMYICGDSTECSNLLLQYGSFCTQLNRALTGIAVEQDKNTQEVFAQVKQIYKTPPIKDFGGFNFSQILPDPSKPSKRSFIEDLLFNKVTLADAGFIKQYGDCLGDIAARDLICAQKFNGLTVLPPLLTDEMIAQYTSALLAGTITSGWTFGAGAALQIPFAMQMAYRFNGIGVTQNVLYENQKLIANQFNSAIGKIQYSLSSTASALGKLQDVVNQNAQALNTLVKQLSSNCGAISSVLNDILSRLDKVEAEVQIDRLITCRLQSLQTYVTQQLIRAAEIRASANLAATKMSECVLGQSKRVDFCGKGYHLMSFPQSAPHGVVFLHVTYVPAQEKNFTTAPAICHDGKAHFPREGVFVSNGTHWFVTQRNFYEPQIITTDNTFVSGNCDVVIGIVNNTVYDPLQPELDSFKEELDKYFKNHTSPDVDLGDISGINASVVNIQKEIDRLNEVAKNLNESLIDLQELGKYEQYIKWPWYIWLGFIAGLIAIVMVTIMLCCMTSCCSCLKGCCSCGSCCKFDEDDSEPVLKGVKLHYT

SEQ ID NO: 1056 - protein, 1273 aa, Artificial Sequence
  SARS-CoV-2/Portugal/PT0034/2020__EPI_ISL_418019 spike protein (1-1273)(F970C_G999C)
MFVFLVLLPLVSSQCVNLTTRTQLPPAYTNSFTRGVYYPDKVFRSSVLHSTQDLFLPFFSNVTWFHAIHVSGTNGTKRFDNPVLPFNDGVYFASTEKSNIIRGWIFGTTLDSKTQSLLIVNNATNVVIKVCEFQFCNDPFLGVYYHKNNKSWMESEFRVYSSANNCTFEYVSQPFLMDLEGKQGNFKNLREFVFKNIDGYFKIYSKHTPINLVRDLPQGFSALEPLVDLPIGINITRFQTLLALHRSYLTPGDSSSGWTAGAAAYYVGYLQPRTFLLKYNENGTITDAVDCALDPLSETKCTLKSFTVEKGIYQTSNFRVQPTESIVRFPNITNLCPFGEVFNATRFASVYAWNRKRISNCVADYSVLYNSASFSTFKCYGVSPTKLNDLCFTNVYADSFVIRGDEVRQIAPGQTGKIADYNYKLPDDFTGCVIAWNSNNLDSKVGGNYNYLYRLFRKSNLKPFERDISTEIYQAGSTPCNGVEGFNCYFPLQSYGFQPTNGVGYQPYRVVVLSFELLHAPATVCGPKKSTNLVKNKCVNFNFNGLTGTGVLTESNKKFLPFQQFGRDIADTTDAVRDPQTLEILDITPCSFGGVSVITPGTNTSNQVAVLYQGVNCTEVPVAIHADQLTPTWRVYSTGSNVFQTRAGCLIGAEHVNNSYECDIPIGAGICASYQTQTNSPRRARSVASQSIIAYTMSLGAENSVAYSNNSIAIPTNFTISVTTEILPVSMTKTSVDCTMYICGDSTECSNLLLQYGSFCTQLNRALTGIAVEQDKNTQEVFAQVKQIYKTPPIKDFGGFNFSQILPDPSKPSKRSFIEDLLFNKVTLADAGFIKQYGDCLGDIAARDLICAQKFNGLTVLPPLLTDEMIAQYTSALLAGTITSGWTFGAGAALQIPFAMQMAYRFNGIGVTQNVLYENQKLIANQFNSAIGKIQDSLSSTASALGKLQDVVNQNAQALNTLVKQLSSNCGAISSVLNDILSRLDKVEAEVQIDRLITCRLQSLQTYVTQQLIRAAEIRASANLAATKMSECVLGQSKRVDFCGKGYHLMSFPQSAPHGVVFLHVTYVPAQEKNFTTAPAICHDGKAHFPREGVFVSNGTHWFVTQRNFYEPQIITTDNTFVSGNCDVVIGIVNNTVYDPLQPELDSFKEELDKYFKNHTSPDVDLGDISGINASVVNIQKEIDRLNEVAKNLNESLIDLQELGKYEQYIKWPWYIWLGFIAGLIAIVMVTIMLCCITSCCSCLKGCCSCGSCCKFDEDDSEPVLKGVKLHYT

SEQ ID NO: 1057 - protein, 1273 aa, Artificial Sequence
  SARS-CoV-2/Iceland/202/2020__EPI_ISL_417750 spike protein (1-1273)(F970C_G999C)
MFVFLVLLPLVSSQCVNLTTRTQLPPAYTNSFTRGVYYPDKVFRSSVLHSTQDLFLPFFSNVTWFHAIHVSGTNGTKRFDNPVLPFNDGVYFASTEKSNIIRGWIFGTTLDSKTQSLLIVNNATNVVIKVCEFQFCNDPFLGVYYHKNNKSWMESEFRVYSSANNCTFEYVSQPFLMDLEGKQGNFKNLREFVFKNIDGYFKIYSKHTPINLVRDLPQGFSALEPLVDLPIGINITRFQTLLALHRSYLTPGDSSSGWTAGAAAYYVGYLQPRTFLLKYNENGTITDAVDCALDPLSETKCTLKSFTVEKGIYQTSNFRVQPTESIVRFPNITNLCPFGEVFNATRFASVYAWNRKRISNCVADYSVLYNSASFSTFKCYGVSPTKLNDLCFTNVYADSFVIRGDEVRQIAPGQTGKIADYNYKLPDDFTGCVIAWNSNNLDSKVGGNYNYLYRLFRKSNLKPFERDISTEIYQAGSTPCNGVEGFNCYFPLQSYGFQPTNGVGYQPYRVVVLSFELLHAPATVCGPKKSTNLVKNKCVNFNFNGLTGTGVLTESNKKFLPFQQFGRDIADTTDAVRDPQTLEILDITPCSFGGVSVITPGTNTSNQVAVLYQDVNCTEVPVAIHADQLTPTWRVYSTGSNVFQTRAGCLIGAEHVNNSYECDIPIGAGICASYQTQTNSPRRARSVASQSIIAYTMSLGAENSVAYSNNSIAIPTNFTISVTTEILPVSMTKTSVDCTMYICGDSTECSNLLLQYGSFCTQLNRALTGIAVEQDKNTQEVFAQVKQIYKTPPIKDFGGFNFSQILPDPSKPSKRSFIEDLLFNKVTLADAGFIKQYGDCLGDIAARDLICAQKFNGLTVLPPLLTDEMIAQYTSALLAGTITSGWTFGAGAALQIPFAMQMAYRFNGIGVTQNVLYENQKLIANQFNSAIGKIQDSLSSTASALGKLQDVVNQNAQALNTLVKQLSSNCGAISSVLNDILSRLDKVEAEVQIDRLITCRLQSLQTYVTQQLIRAAEIRASANLAATKMSECVLGQSKRVDFCGKGYHLMSFPQSAPHGVVFLHVTYVPAQEKNFTTAPAICHDGKAHFPREGVFVSNGTHWFVTQRNFYEPQIITTDNTFVSGNCDVVIGIVNNTVYDPLQPELDSFKEELDKYFKNHTSPDVDLGDIPGINASVVNIQKEIDRLNEVAKNLNESLIDLQELGKYEQYIKWPWYIWLGFIAGLIAIVMVTIMLCCMTSCCSCLKGCCSCGSCCKFDEDDSEPVLKGVKLHYT

SEQ ID NO: 1058 - protein, 1273 aa, Artificial Sequence
  SARS-CoV-2/USA/WA-UW261/2020__EPI_ISL_418046 spike protein (1-1273)(F970C_G999C)
MFVFLVLLPLVSSQCVNLTTRTQLPPAYTNSFTRGVYYPDKVFRSSVLHSTQDLFLPFFSNVTWFHAIHVSGTNGTKRFDNPVLPFNDGVYFASTEKSNIIRGWIFGTTLDSKTQSLLIVNNATNVVIKVCEFQFCNDPFLGVYYHKNNKSWMESEFRVYSSANNCTFEYVSQPFLMDLEGKQGNFKNLREFVFKNIDGYFKIYSKHTPINLVRDLPQGFSALEPLVDLPIGINITRFQTLLALHRSYLTPGDSSSGWTAGAAAYYVGYLQPRTFLLKYNENGTITDAVDCALDPLSETKCTLKSFTVEKGIYQTSNFRVQPTESIVRFPNITNLCPFGEVFNATRFTSVYAWNRKRISNCVADYSVLYNSASFSTFKCYGVSPTKLNDLCFTNVYADSFVIRGDEVRQIAPGQTGKIADYNYKLPDDFTGCVIAWNSNNLDSKVGGNYNYLYRLFRKSNLKPFERDISTEIYQAGSTPCNGVEGFNCYFPLQSYGFQPTNGVGYQPYRVVVLSFELLHAPATVCGPKKSTNLVKNKCVNFNFNGLTGTGVLTESNKKFLPFQQFGRDIADTTDAVRDPQTLEILDITPCSFGGVSVITPGTNTSNQVAVLYQDVNCTEVPVAIHADQLTPTWRVYSTGSNVFQTRAGCLIGAEHVNNSYECDIPIGAGICASYQTQTNSPRRARSVASQSIIAYTMSLGAENSVAYSNNSIAIPTNFTISVTTEILPVSMTKTSVDCTMYICGDSTECSNLLLQYGSFCTQLNRALTGIAVEQDKNTQEVFAQVKQIYKTPPIKDFGGFNFSQILPDPSKPSKRSFIEDLLFNKVTLADAGFIKQYGDCLGDIAARDLICAQKFNGLTVLPPLLTDEMIAQYTSALLAGTITSGWTFGAGAALQIPFAMQMAYRFNGIGVTQNVLYENQKLIANQFNSAIGKIQDSLSSTASALGKLQDVVNQNAQALNTLVKQLSSNCGAISSVLNDILSRLDKVEAEVQIDRLITCRLQSLQTYVTQQLIRAAEIRASANLAATKMSECVLGQSKRVDFCGKGYHLMSFPQSAPHGVVFLHVTYVPAQEKNFTTAPAICHDGKAHFPREGVFVSNGTHWFVTQRNFYEPQIITTDNTFVSGNCDVVIGIVNNTVYDPLQPELDSFKEELDKYFKNHTSPDVDLGDISGINASVVNIQKEIDRLNEVAKNLNESLIDLQELGKYEQYIKWPWYIWLGFIAGLIAIVMVTIMLCCMTSCCSCLKGCCSCGSCCKFDEDDSEPVLKGVKLHYT

SEQ ID NO: 1059 - protein, 1273 aa, Artificial Sequence
  SARS-CoV-2/Portugal/PT0035/2020__EPI_ISL_418020 spike protein (1-1273)(F970C_G999C)
MFVFLVLLPLVSSQCVNLTTRTQLPPAYTNSFTRGVYYPDKVFRSSVLHSTQDLFLPFFSNVTWFHAIHVSGTNGTKRFDNPVLPFNDGVYFASTEKSNIIRGWIFGTTLDSKTQSLLIVNNATNVVIKVCEFQFCNDPFLGVYYHKNNKSWMESEFRVYSSANNCTFEYVSQPFLMDLEGKQGNFKNLREFVFKNIDGYFKIYSKHTPINLVRDLPQGFSALEPLVDLPIGINITRFQTLLALHRSYLTPGDSSSGWTAGAAAYYVGYLQPRTFLLKYNENGTITDAVDCALDPLSETKCTLKSFTVEKGIYQTSNFRVQPTESIVRFPNITNLCPFGEVFNATRFASVYAWNRKRISNCVADYSVLYNSASFSTFKCYGVSPTKLNDLCFTNVYADSFVIRGDEVRQIAPGQTGKIADYNYKLPDDFTGCVIAWNSNNLDSKVGGNYNYLYRLFRKSNLKPFERDISTEIYQAGSTPCNGVEGFNCYFPLQSYGFQPTNGVGYQPYRVVVLSFELLHAPATVCGPKKSTNLVKNKCVNFNFNGLTGTGVLTESNKKFLPFQQFGRDIADTTDAVRDPQTLEILDITPCSFGGVSVITPGTNTSNQVAVLYQDVNCTEVPVAIHADQLTPTWRVYSTGSNVFQTRAGCLIGAEHVNNSYECDIPIGAGICASYQTQTNSPRRARSVASQSIIAYTMSLGAENSVAYSNNSIAIPTNFTISVTTEILPVSMTKTSVDCTMYICGDSTECSNLLLQYGSFCTQLNRALTGIAVEQDKNTQEVFAQVKQIYKTPPIKDFGGFNFSQILPDPSKPSKRSFIEDLLFNKVTLADAGFIKQYGDCLGDISARDLICAQKFNGLTVLPPLLTDEMIAQYTSALLAGTITSGWTFGAGAALQIPFAMQMAYRFNGIGVTQNVLYENQKLIANQFNSAIGKIQDSLSSTASALGKLQDVVNQNAQALNTLVKQLSSNCGAISSVLNDILSRLDKVEAEVQIDRLITCRLQSLQTYVTQQLIRAAEIRASANLAATKMSECVLGQSKRVDFCGKGYHLMSFPQSAPHGVVFLHVTYVPAQEKNFTTAPAICHDGKAHFPREGVFVSNGTHWFVTQRNFYEPQIITTDNTFVSGNCDVVIGIVNNTVYDPLQPELDSFKEELDKYFKNHTSPDVDLGDISGINASVVNIQKEIDRLNEVAKNLNESLIDLQELGKYEQYIKWPWYIWLGFIAGLIAIVMVTIMLCCMTSCCSCLKGCCSCGSCCKFDEDDSEPVLKGVKLHYT

SEQ ID NO: 1060 - protein, 1273 aa, Artificial Sequence
  SARS-CoV-2/USA/NY-NYUMC7/2020__EPI_ISL_418192 spike protein (1-1273)(F970C_G999C)
MFVFLVLLPLVSSQCVNLTTRTQLPPAYTNSFTRGVYYPDKVFRSSVLHSTQDLFLPFFSNVTWFHAIHVSGTNGTKRFDNPVLPFNDGVYFASTEKSNIIRGWIFGTTLDSKTQSLLIVNNATNVVIKVCEFQFCNDPFLGVYHHKNNKSWMESEFRVYSSANNCTFEYVSQPFLMDLEGKQGNFKNLREFVFKNIDGYFKIYSKHTPINLVRDLPQGFSALEPLVDLPIGINITRFQTLLALHRSYLTPGDSSSGWTAGAAAYYVGYLQPRTFLLKYNENGTITDAVDCALDPLSETKCTLKSFTVEKGIYQTSNFRVQPTESIVRFPNITNLCPFGEVFNATRFASVYAWNRKRISNCVADYSVLYNSASFSTFKCYGVSPTKLNDLCFTNVYADSFVIRGDEVRQIAPGQTGKIADYNYKLPDDFTGCVIAWNSNNLDSKVGGNYNYLYRLFRKSNLKPFERDISTEIYQAGSTPCNGVEGFNCYFPLQSYGFQPTNGVGYQPYRVVVLSFELLHAPATVCGPKKSTNLVKNKCVNFNFNGLTGTGVLTESNKKFLPFQQFGRDIADTTDAVRDPQTLEILDITPCSFGGVSVITPGTNTSNQVAVLYQGVNCTEVPVAIHADQLTPTWRVYSTGSNVFQTRAGCLIGAEHVNNSYECDIPIGAGICASYQTQTNSPRRARSVASQSIIAYTMSLGAENSVAYSNNSIAIPTNFTISVTTEILPVSMTKTSVDCTMYICGDSTECSNLLLQYGSFCTQLNRALTGIAVEQDKNTQEVFAQVKQIYKTPPIKDFGGFNFSQILPDPSKPSKRSFIEDLLFNKVTLADAGFIKQYGDCLGDIAARDLICAQKFNGLTVLPPLLTDEMIAQYTSALLAGTITSGWTFGAGAALQIPFAMQMAYRFNGIGVTQNVLYENQKLIANQFNSAIGKIQDSLSSTASALGKLQDVVNQNAQALNTLVKQLSSNCGAISSVLNDILSRLDKVEAEVQIDRLITCRLQSLQTYVTQQLIRAAEIRASANLAATKMSECVLGQSKRVDFCGKGYHLMSFPQSAPHGVVFLHVTYVPAQEKNFTTAPAICHDGKAHFPREGVFVSNGTHWFVTQRNFYEPQIITTDNTFVSGNCDVVIGIVNNTVYDPLQPELDSFKEELDKYFKNHTSPDVDLGDISGINASVVNIQKEIDRLNEVAKNLNESLIDLQELGKYEQYIKWPWYIWLGFIAGLIAIVMVTIMLCCMTSCCSCLKGCCSCGSCCKFDEDDSEPVLKGVKLHYT

SEQ ID NO: 1061 - protein, 1273 aa, Artificial Sequence
  SARS-CoV-2/Iceland/189/2020__EPI_ISL_417709 spike protein (1-1273)(F970C_G999C)
MFVFLVLLPLVSSQCVNLTTRTQLPPAYTNSFTRGVYYPDKVFRSSVLHSTQDLFLPFFSNVTWFHAIHVSGTNGTKRFDNPVLPFNDGVYFASTEKSNIIRGWIFGTTLDSKTQSLLIVNNATNVVIKVCEFQFCNDPFLGVYYHKNNKSWMESEFRVYSSANNCTFEYVSQPFLMDLEGKQGNFKNLREFVFKNIDGYFKIYSKHTPINLVRDLPQGFSALEPLVDLPIGINITRFQTLLALHRSYLTPGDSSSGWTAGAAAYYVGYLQPRTFLLKYNENGTITDAVDCALDPLSETKCTLKSFTVEKGIYQTSNFRVQPTESIVRFPNITNLCPFGEVFNATRFASVYAWNRKRISNCVADYSVLYNSASFSTFKCYGVSPTKLNDLCFTNVYADSFVIRGDEVRQIAPGQTGKIADYNYKLPDDFTGCVIAWNSNNLDSKVGGNYNYLYRLFRKSNLKPFERDISTEIYQAGSTPCNGVEGFNCYFPLQSYGFQPTNGVGYQPYRVVVLSFELLHAPATVCGPKKSTNLVKNKCVNFNFNGLTGTGVLTESNKKFLPFQQFGRDIADTTDAVRDPQTLEILDITPCSFGGVSVITPGTNTSNQVAVLYQGVNCTEVPVAIHADQLTPTWRVYSTGSNVFQTRAGCLIGAEHVNNSYECDIPIGAGICASYQTQTNSPRRARSVASQSIIAYTMSLGAENSVAYSNNSIAIPTNFTISVTTEILPVSMTKTSVDCTMYICGDSTECSNLLLQYGSFCTQLNRALTGIAVEQDKNTQEVFAQVKQIYKTPPIKDFGGFNFSQILPDPSKPSKRSFIEDLLFNKVTLADAGFTKQYGDCLGDIAARDLICAQKFNGLTVLPPLLTDEMIAQYTSALLAGTITSGWTFGAGAALQIPFAMQMAYRFNGIGVTQNVLYENQKLIANQFNSAIGKIQDSLSSTASALGKLQDVVNQNAQALNTLVKQLSSNCGAISSVLNDILSRLDKVEAEVQIDRLITCRLQSLQTYVTQQLIRAAEIRASANLAATKMSECVLGQSKRVDFCGKGYHLMSFPQSAPHGVVFLHVTYVPAQEKNFTTAPAICHDGKAHFPREGVFVSNGTHWFVTQRNFYEPQIITTDNTFVSGNCDVVIGIVNNTVYDPLQPELDSFKEELDKYFKNHTSPDVDLGDISGINASVVNIQKEIDRLNEVAKNLNESLIDLQELGKYEQYIKWPWYIWLGFIAGLIAIVMVTIMLCCMTSCCSCLKGCCSCGSCCKFDEDDSEPVLKGVKLHYT

SEQ ID NO: 1062 - protein, 1273 aa, Artificial Sequence
  SARS-CoV-2/Australia/NSW56/2020__EPI_ISL_417408 spike protein (1-1273)(F970C_G999C)
MFVFLVLLPLVSSQCVNLTTRTQLPPAYTNSFTRGVYYPDKVFRSSVLHSTQDLFLPFFSNVTWFHAIHVSGTNGTKRFDNPVLPFNDGVYFASTEKSNIIRGWIFGTTLDSKTQSLLIVNNATNVVIKVCEFQFCNDPFLGVYYHKNNKSWMESEFRVYSSANNCTFEYVSQPFLMDLEGKQGNFKNLREFVFKNIDGYFKIYSKHTPINLVRDLPQGFSALEPLVDLPIGINITRFQTLLALHRSYLTPGDSSSGWTAGAAAYYVGYLQPRTFLLKYNENGTITDAVDCALDPLSETKCTLKSFTVEKGIYQTSNFRVQPTESIVRFPNITNLCPFGEVFNATRFASVYAWNRKRISNCVADYSVLYNSASFSTFKCYGVSPTKLNDLCFTNVYADSFVIRGDEVRQIAPGQTGKIADYNYKLPDDFTGCVIAWNSNNLDSKVGGNYNYLYRLFRKSNLKPFERDISTEIYQAGSTPCNGVEGFNCYFPLQSYGFQPTNGVGYQPYRVVVLSFELLHAPATVCGPKKSTNLVKNKCVNFNFNGLTGTGVLTESNKKFLPFQQFGRDIADTTDAVRDPQTLEILDITPCSFGGVSVITPGTNTSNQVAVLYQDVNCTEVPVAIHADQLTPTWRVYSTGSNVFQTRAGCLIGAEHVNNSYECDIPIGAGICASYQTQTNSPRRARSVASQSIIAYTMSLGAENSVAYSNNSIAIPTNFTISVTTEILPVSMTKTSVDCTMYICGDSTECSNLLLQYGSFCTQLNRALTGIAVEQDKNTQEVFAQVKQIYKTPPIKDFGGFNFSQILPDSSKPSKRSFIEDLLFNKVTLADAGFIKQYGDCLGDIAARDLICAQKFNGLTVLPPLLTDEMIAQYTSALLAGTITSGWTFGAGAALQIPFAMQMAYRFNGIGVTQNVLYENQKLIANQFNSAIGKIQDSLSSTASALGKLQDVVNQNAQALNTLVKQLSSNCGAISSVLNDILSRLDKVEAEVQIDRLITCRLQSLQTYVTQQLIRAAEIRASANLAATKMSECVLGQSKRVDFCGKGYHLMSFPQSAPHGVVFLHVTYVPAQEKNFTTAPAICHDGKAHFPREGVFVSNGTHWFVTQRNFYEPQIITTDNTFVSGNCDVVIGIVNNTVYDPLQPELDSFKEELDKYFKNHTSPDVDLGDISGINASVVNIQKEIDRLNEVAKNLNESLIDLQELGKYEQYIKWPWYIWLGFIAGLIAIVMVTIMLCCMTSCCSCLKGCCSCGSCCKFDEDDSEPVLKGVKLHYT

SEQ ID NO: 1063 - protein, 1273 aa, Artificial Sequence
  SARS-CoV-2/Iceland/280/2020__EPI_ISL_417608 spike protein (1-1273)(F970C_G999C)
MFVFLVLLPLVSSQCVNLTTRTQLPPAYTNSFTRGVYYPDKVFRSSVLHSTQDLFLPFFSNVTWFHAIHVSGTNGTKRFDNPVLPFNDGVYFASTEKSNIIRGWIFGTTLDSKTQSLLIVNNATNVVIKVCEFQFCNDPFLGVYYHKNNKSWMESEFRVYSSANNCTFEYVSQPFLMDLEGKQGNFKNLREFVFKNIDGYFKIYSKHTPINLVRDLPQGFSALEPLVDLPIGINITRFQTLLALHRSYLTPGDSSSGWTAGAAAYYVGYLQPRTFLLKYNENGTITDAVDCALDPLSETKCTLKSFTVEKGIYQTSNFRVQPTESIVRFPNITNLCPFGEVFNATRFASVYAWNRKRISNCVADYSVLYNSASFSTFKCYGVSPTKLNDLCFTNVYADSFVIRGDEVRQIAPGQTGKIADYNYKLPDDFTGCVIAWNSNNLDSKVGGNYNYLYRLFRKSNLKPFERDISTEIYQAGSTPCNGVEGFNCYFPLQSYGFQPTNGVGYQPYRVVVLSFELLHAPATVCGPKKSTNLVKNKCVNFNFNGLTGTGVLTESNKKFLPFQQFGRDIADTTDAVRDPQTLEILDITPCSFGGVSVITPGTNTSNQVAVLYQGVNCTEVPVAIHADQLTPTWRVYSTGSNVFQTRAGCLIGAEHVNNSYECDIPIGAGICASYHTQTNSPRRARSVASQSIIAYTMSLGAENSVAYSNNSIAIPTNFTISVTTEILPVSMTKTSVDCTMYICGDSTECSNLLLQYGSFCTQLNRALTGIAVEQDKNTQEVFAQVKQIYKTPPIKDFGGFNFSQILPDPSKPSKRSFIEDLLFNKVTLADAGFIKQYGDCLGDIAARDLICAQKFNGLTVLPPLLTDEMIAQYTSALLAGTITSGWTFGAGAALQIPFAMQMAYRFNGIGVTQNVLYENQKLIANQFNSAIGKIQDSLSSTASALGKLQDVVNQNAQALNTLVKQLSSNCGAISSVLNDILSRLDKVEAEVQIDRLITCRLQSLQTYVTQQLIRAAEIRASANLAATKMSECVLGQSKRVDFCGKGYHLMSFPQSAPHGVVFLHVTYVPAQEKNFTTAPAICHDGKAHFPREGVFVSNGTHWFVTQRNFYEPQIITTDNTFVSGNCDVVIGIVNNTVYDPLQPELDSFKEELDKYFKNHTSPDVDLGDISGINASVVNIQKEIDRLNEVAKNLNESLIDLQELGKYEQYIKWPWYIWLGFIAGLIAIVMVTIMLCCMTSCCSCLKGCCSCGSCCKFDEDDSEPVLKGVKLHYT

SEQ ID NO: 1064 - protein, 1273 aa, Artificial Sequence
  SARS-CoV-2/Iceland/247/2020__EPI_ISL_417575 spike protein (1-1273)(F970C_G999C)
MFVFLVLLPLVSSQCVNLTTRTQLPPAYTNSFTRGVYYPDKVFRSSVLHSTQDLFLPFFSNVTWFHAIHVSGTNGTKRFDNPVLPFNDGVYFASTEKSNIIRGWIFGTTLDSKTQSLLIVNNATNVVIKVCEFQFCNDPFLGVYYHKNNKSWMESEFRVYSSANNCTFEYVSQPFLMDLEGKQGNFKNLREFVFKNIDGYFKIYSKHTPINLVRDLPQGFSALEPLVDLPIGINITRFQTLLALHRSYLTPGDSSSGWTAGAAAYYVGYLQPRTFLLKYNENGTITDAVDCALDPLSETKCTLKSFTVEKGIYQTSNFRVQPTESIVRFPNITNLCPFGEVFNATRFASVYAWNRKRISNCVADYSVLYNSASFSTFKCYGVSPTKLNDLCFTNVYADSFVIRGDEVRQIAPGQTGKIADYNYKLPDDFTGCVIAWNSNNLDSKVGGNYNYLYRLFRKSNLKPFERDISTEIYQAGSTPCNGVEGFNCYFPLQSYGFQPTNGVGYQPYRVVVLSFELLHAPATVCGPKKSTNLVKNKCVNFNFNGLTGTGVLTESNKKFLPFQQFGRDIADTTDAVRDPQTLEILDITPCSFGGVSVITPGTNTSNQVAVLYQGVNCTEVPVAIHADQLTPTWRVYSTGSNVFQTRAGCLIGAEHVNNSYECDIPIGAGICASYQTQTNSPRRARSVASQSIIAYTMSLGAENSVAYSNNSIAIPTNFTISVTTEILPVSMTKTSVDCTMYICGDSTECSNLLLQYGSFCTQLNRALTGIAVEQDKNTQEVFAQVKQIYKTPPIKDFGGFNFSQILPDPSKPSKRSFIEDLLFNKVTLADAGFIKQYGDCLGDIAARDLICAQKFNGLTVLPPLLTDEMIAQYTSALLAGTITSGWTFGAGAALQIPFAMQMAYRFNGIGVTQNVLYENQKLIANQFNSAIGKIQDSLSSTASALGKLQDVVNQNAQALNTLVKQLSSNCGAISSVLNDILSRLDKVEAEVQIDRLITCRLQSLQTYVTQQLIRAAEIRASANLAATKMSECVLGQSKRVDFCGKGYHLMSFPQSAPHGVVFLHVTYVPAQEKNFTTAPAICHDGKAHFPREGVFVSNGTHWFVTQRNFYEPQIITTDNTFVSGNCDVVIGIVNNTVYDPLQPELDSFKEELDKYFKNHTSPDVDLGDISGINASVVNIQKEIDRLNEVAKNLNESLIDLQELGKYEQYIKWPWYIWLGFIAGLIAIVIVTIMLCCMTSCCSCLKGCCSCGSCCKFDEDDSEPVLKGVKLHYT

SEQ ID NO: 1065 - protein, 1273 aa, Artificial Sequence
  SARS-CoV-2/Iceland/238/2020__EPI_ISL_417566 spike protein (1-1273)(F970C_G999C)
MFVFLVLLPLVSSQCVNLTTRTQLPPAYTNSFTRGVYYPDKVFRSSVLHSTQDLFLPFFSNVTWFHAIHVSGTNGTKRFDNPVLPFNDGVYFASTEKSNIIRGWIFGTTLDSKTQSLLIVNNATNVVIKVCEFQFCNDPFLGVYYHKNNKSWMESEFRVYSSANNCTFEYVSQPFLMDLEGKQGNFKNLREFVFKNIDGYFKIYSKHTPINLVRDLPQGFSALEPLVDLPIGINITRFQTLLALHRSYLTPGDSSSGWTAGAAAYYVGYLQPRTFLLKYNENGTITDAVDCALDPLSETKCTLKSFTVEKGIYQTSNFRVQPTESIVRFPNITNLCPFGEVFNATRFASVYAWNRKRISNCVADYSVLYNSASFSTFKCYGVSPTKLNDLCFTNVYADSFVIRGDEVRQIAPGQTGKIADYNYKLPDDFTGCVIAWNSNNLDSKVGGNYNYLYRLFRKSNLKPFERDISTEIYQAGSTPCNGVEGFNCYFPLQSYGFQPTNGVGYQPYRVVVLSFELLHAPATVCGPKKSTNLVKNKCVNFNFNGLTGTGVLTESNKKFLPFQQFGRDIADTTDAVRDPQTLEILDITPCSFGGVSVITPGTNTSNQVAVLYQGVNCTEVPVAIHADQLTPTWRVYSTGSNVFQTRAGCLIGAEHVNNSYECDIPIGAGICASYQTQTNSPRRARSVASQSIIAYTMSLGAENSVAYSNNSIAIPTNFTISVTTEILPVSMTKTSVDCTMYICGDSTECSNLLLQYGSFCTQLNRALTGIAVEQDKNTQEVFAQVKQIYKTPPIKDFGGFNFSQILPDPSKPSKRSFIEDLLFNKVTLADVGFIKQYGDCLGDIAARDLICAQKFNGLTVLPPLLTDEMIAQYTSALLAGTITSGWTFGAGAALQIPFAMQMAYRFNGIGVTQNVLYENQKLIANQFNSAIGKIQDSLSSTASALGKLQDVVNQNAQALNTLVKQLSSNCGAISSVLNDILSRLDKVEAEVQIDRLITCRLQSLQTYVTQQLIRAAEIRASANLAATKMSECVLGQSKRVDFCGKGYHLMSFPQSAPHGVVFLHVTYVPAQEKNFTTAPAICHDGKAHFPREGVFVSNGTHWFVTQRNFYEPQIITTDNTFVSGNCDVVIGIVNNTVYDPLQPELDSFKEELDKYFKNHTSPDVDLGDISGINASVVNIQKEIDRLNEVAKNLNESLIDLQELGKYEQYIKWPWYIWLGFIAGLIAIVMVTIMLCCMTSCCSCLKGCCSCGSCCKFDEDDSEPVLKGVKLHYT

SEQ ID NO: 1066 - protein, 1273 aa, Artificial Sequence
  SARS-CoV-2/Greece/16/2020__EPI_ISL_418265 spike protein (1-1273)(F970C_G999C)
MFVFLVLLPLVSSQCVNLTTRTQLPPAYTNSFTRGVYYPDKVFRSSVLHSTQDLFLPFFSNVTWFHAIHVSGTNGTKRFDNPVLPFNDGVYFASTEKSNIIRGWIFGTTLDSKTQSLLIVNNATNVVIKVCEFQFCNDPFLGVYYHKNNKSWMESEFRVYSSANNCTFEYVSQPFLMDLEGKQGNFKNLREFVFKNVDGYFKIYSKHTPINLVRDLPQGFSALEPLVDLPIGINITRFQTLLALHRSYLTPGDSSSGWTAGAAAYYVGYLQPRTFLLKYNENGTITDAVDCALDPLSETKCTLKSFTVEKGIYQTSNFRVQPTESIVRFPNITNLCPFGEVFNATRFASVYAWNRKRISNCVADYSVLYNSASFSTFKCYGVSPTKLNDLCFTNVYADSFVIRGDEVRQIAPGQTGKIADYNYKLPDDFTGCVIAWNSNNLDSKVGGNYNYLYRLFRKSNLKPFERDISTEIYQAGSTPCNGVEGFNCYFPLQSYGFQPTNGVGYQPYRVVVLSFELLHAPATVCGPKKSTNLVKNKCVNFNFNGLTGTGVLTESNKKFLPFQQFGRDIADTTDAVRDPQTLEILDITPCSFGGVSVITPGTNTSNQVAVLYQDVNCTEVPVAIHADQLTPTWRVYSTGSNVFQTRAGCLIGAEHVNNSYECDIPIGAGICASYQTQTNSPRRARSVASQSIIAYTMSLGAENSVAYSNNSIAIPTNFTISVTTEILPVSMTKTSVDCTMYICGDSTECSNLLLQYGSFCTQLNRALTGIAVEQDKNTQEVFAQVKQIYKTPPIKDFGGFNFSQILPDPSKPSKRSFIEDLLFNKVTLADAGFIKQYGDCLGDIAARDLICAQKFNGLTVLPPLLTDEMIAQYTSALLAGTITSGWTFGAGAALQIPFAMQMAYRFNGIGVTQNVLYENQKLIANQFNSAIGKIQDSLSSTASALGKLQDVVNQNAQALNTLVKQLSSNCGAISSVLNDILSRLDKVEAEVQIDRLITCRLQSLQTYVTQQLIRAAEIRASANLAATKMSECVLGQSKRVDFCGKGYHLMSFPQSAPHGVVFLHVTYVPAQEKNFTTAPAICHDGKAHFPREGVFVSNGTHWFVTQRNFYEPQIITTDNTFVSGNCDVVIGIVNNTVYDPLQPELDSFKEELDKYFKNHTSPDVDLGDISGINASVVNIQKEIDRLNEVAKNLNESLIDLQELGKYEQYIKWPWYIWLGFIAGLIAIVMVTIMLCCMTSCCSCLKGCCSCGSCCKFDEDDSEPVLKGVKLHYT

SEQ ID NO: 1067 - protein, 1273 aa, Artificial Sequence
  SARS-CoV-2/Iceland/319/2020__EPI_ISL_417648 spike protein (1-1273)(F970C_G999C)
MFVFLVLLPLVSSQCVNLTTRTQLPPAYTNSFTRGVYYPDKVFRSSVLHSTQDLFLPFFSNVTWFHAIHVSGTNGTKRFDNPVLPFNDGVYFASTEKSNIIRGWIFGTTLDSKTQSLLIVNNATNVVIKVCEFQFCNDPFLGVYYHKNNKSWMESEFRVYSSANNCTFEYVSQPFLIDLEGKQGNFKNLREFVFKNIDGYFKIYSKHTPINLVRDLPQGFSALEPLVDLPIGINITRFQTLLALHRSYLTPGDSSSGWTAGAAAYYVGYLQPRTFLLKYNENGTITDAVDCALDPLSETKCTLKSFTVEKGIYQTSNFRVQPTESIVRFPNITNLCPFGEVFNATRFASVYAWNRKRISNCVADYSVLYNSASFSTFKCYGVSPTKLNDLCFTNVYADSFVIRGDEVRQIAPGQTGKIADYNYKLPDDFTGCVIAWNSNNLDSKVGGNYNYLYRLFRKSNLKPFERDISTEIYQAGSTPCNGVEGFNCYFPLQSYGFQPTNGVGYQPYRVVVLSFELLHAPATVCGPKKSTNLVKNKCVNFNFNGLTGTGVLTESNKKFLPFQQFGRDIADTTDAVRDPQTLEILDITPCSFGGVSVITPGTNTSNQVAVLYQGVNCTEVPVAIHADQLTPTWRVYSTGSNVFQTRAGCLIGAEHVNNSYECDIPIGAGICASYQTQTNSPRRARSVASQSIIAYTMSLGAENSVAYSNNSIAIPTNFTISVTTEILPVSMTKTSVDCTMYICGDSTECSNLLLQYGSFCTQLNRALTGIAVEQDKNTQEVFAQVKQIYKTPPIKDFGGFNFSQILPDPSKPSKRSFIEDLLFNKVTLADAGFIKQYGDCLGDIAARDLICAQKFNGLTVLPPLLTDEMIAQYTSALLAGTITSGWTFGAGAALQIPFAMQMAYRFNGIGVTQNVLYENQKLIANQFNSAIGKIQDSLSSTASALGKLQDVVNQNAQALNTLVKQLSSNCGAISSVLNDILSRLDKVEAEVQIDRLITCRLQSLQTYVTQQLIRAAEIRASANLAATKMSECVLGQSKRVDFCGKGYHLMSFPQSAPHGVVFLHVTYVPAQEKNFTTAPAICHDGKAHFPREGVFVSNGTHWFVTQRNFYEPQIITTDNTFVSGNCDVVIGIVNNTVYDPLQPELDSFKEELDKYFKNHTSPDVDLGDISGINASVVNIQKEIDRLNEVAKNLNESLIDLQELGKYEQYIKWPWYIWLGFIAGLIAIVMVTIMLCCMTSCCSCLKGCCSCGSCCKFDEDDSEPVLKGVKLHYT

SEQ ID NO: 1068 - protein, 1273 aa, Artificial Sequence
  SARS-CoV-2/Congo/94/2020__EPI_ISL_417947 spike protein (1-1273)(F970C_G999C)
MFVFLVLLPLVSSQCVNLTTRTQLPPAYTNSFTRGVYYPDKVFRSSVLHSTQDLFLPFFSNVTWFHAIHVSGTNGTKRFDNPVLPFNDGVYFASTEKSNIIRGWIFGTTLDSKTQSLLIVNNATNVVIKVCEFQFCNDPFLGVYYHKNNKSWMESEFRVYSSANNCTFEYVSQPFLMDLEGKQGNFKNLREFVFKNIDGYFKIYSKHTPINLVRDLPQGFSALEPLVDLPIGINITRFQTLLALHRSYLTPGDSSSGWTAGAAAYYVGYLQPRTFLLKYNENGTITDAVDCALDPLSETKCTLKSFTVEKGIYQTSNFRVQPTESIVRFPNITNLCPFGEVFNATRFASVYAWNRKRISNCVADYSVLYNSASFSTFKCYGVSPTKLNDLCFTNVYADSFVIRGDEVRQIAPGQTGKIADYNYKLPDDFTGCVIAWNSNNLDSKVGGNYNYLYRLFRKSNLKPFERDISTEIYQAGSTPCNGVEGFNCYFPLQSYGFQPTNGVGYQPYRVVVLSFELLHAPATVCGPKKSTNLVKNKCVNFNFNGLTGTGVLTESNKKFLPFQQFGRDIADTTDAVRDPQTLEILDITPCSFGGVSVITPGTNTSNQVAVLYQGVNCTEVPVAIHADQLTPTWRVYSTGSNVFQTRAGCLIGAEHVNNSYECDIPIGAGICASYQTQTNSPRRARSVASQSIIAYTMSLGAENSVAYSNNSIAIPTNFTISVTTEILPVSMTKTSVDCTMYICGDSTECSNLLLQYGSFCTQLNRALTGIAVEQDKNTQEVFAQVKQIYKTPPIKDFGGFNFSQILPDPSKPSKRSFIEDILFNKVTLADAGFIKQYGDCLGDIAARDLICAQKFNGLTVLPPLLTDEMIAQYTSALLAGTITSGWTFGAGAALQIPFAMQMAYRFNGIGVTQNVLYENQKLIANQFNSAIGKIQDSLSSTASALGKLQDVVNQNAQALNTLVKQLSSNCGAISSVLNDILSRLDKVEAEVQIDRLITCRLQSLQTYVTQQLIRAAEIRASANLAATKMSECVLGQSKRVDFCGKGYHLMSFPQSAPHGVVFLHVTYVPAQEKNFTTAPAICHDGKAHFPREGVFVSNGTHWFVTQRNFYEPQIITTDNTFVSGNCDVVIGIVNNTVYDPLQPELDSFKEELDKYFKNHTSPDVDLGDISGINASVVNIQKEIDRLNEVAKNLNESLIDLQELGKYEQYIKWPWYIWLGFIAGLIAIVMVTIMLCCMTSCCSCLKGCCSCGSCCKFDEDDSEPVLKGVKLHYT

SEQ ID NO: 1069 - protein, 1273 aa, Artificial Sequence
  SARS-CoV-2/Congo/158/2020__EPI_ISL_417950 spike protein (1-1273)(F970C_G999C)
MFVFLVLLPLVSSQCVNLTTRTQLPPAYTNSFTRGVYYPDKVFRSSVLHSTQDLFLPFFSNVTWFHAIHVSGTNGTKRFDNPVLPFNDGVYFASTEKSNIIRGWIFGTTLDSKTQSLLIVNNATNVVIKVCEFQFCNDPFLGVYYHKNNKSWMESEFRVYSSANNCTFEYVSQPFLMDLEGKQGNFKNLREFVFKNIDGYFKIYSKHTPINLVRDLPQGFSALEPLVDLPIGINITRFQTLLALHRSYLTPGDSSSGWTAGAAAYYVGYLQPRTFLLKYNENGTITDAVDCALDPLSETKCTLKSFTVEKGIYQTSNFRVQPTESIVRFPNITNLCPFGEVFNATRFASVYAWNRKRISNCVADYSVLYNSASFSTFKCYGVSPTKLNDLCFTNVYADSFVIRGDEVRQIAPGQTGKIADYNYKLPDDFTGCVIAWNSNNLDSKVGGNYNYLYRLFRKSNLKPFERDISTEIYQAGSTPCNGVEGFNCYFPLQSYGFQPTNGVGYQPYRVVVLSFELLHAPATVCGPKKSTNLVKNKCVNFNFNGLTGTGVLTESNKKFLPFQQFGRDIADTTDAVRDPQTLEILDITPCSFGGVSVITPGTNTSNQVAVLYQDVNCTEVPVAIHADQLTPTWRVYSTGSNVFQTRAGCLIGAEHVNNSYECDIPIGAGICASYQTQTNSPRRARSVASQSIIAYTMSLGAENSVAYSNNSIAIPTNFTISVTTEILPVSMTKTSVDCTMYICGDSTECSNLLLQYGSFCTQLNRALTGIAVEQDKNTQEVFAQVKQIYKTPPIKDFGGFNFSQILPDPSKPSKRSFIEDLLFNKVTLADAGFIKQYGDCLGDIAARDLICAQKFNGLTVLPPLLTDEMIAQYTSALLAGTITSGWTFGAGAALQIPFAMQMAYRFNGIGVTQNVLYENQKLIANQFNSAIGKIQDSLSSTASALGKLQDVVNQNAQALNTLVKQLSSNCGAISSVLNDILSRLDKVEAEVQIDRLITCRLQSLQTYVTQQLIRAAEIRASANLAATKMSECVLGQSKRVDFCGKGYHLMSFPQSAPHGVVFLHVTYVPAQEKNFTTAPAICHDGKAHFPREGVFVSNGTHWFVTQRNFYEPQIITTDNTFLSGNCDVVIGIVNNTVYDPLQPELDSFKEELDKYFKNHTSPDVDLGDISGINASVVNIQKEIDRLNEVAKNLNESLIDLQELGKYEQYIKWPWYIWLGFIAGLIAIVMVTIMLCCMTSCCSCLKGCCSCGSCCKFDEDDSEPVLKGVKLHYT

SEQ ID NO: 1070 - protein, 1273 aa, Artificial Sequence
  SARS-CoV-2/USA/UT-00034/2020__EPI_ISL_417977 spike protein (1-1273)(F970C_G999C)
MFVFLVLLPLVSSQCVNLTTRTQLPPAYTNSFTRGVYYPDKVFRSSVLHSTQDLFLPFFSNVTWFHAIHVSGTNGTKRFDNPVLPFNDGVYFASTEKSNIIRGWIFGTTLDSKTQSLLIVNNATNVVIKVCEFQFCNDPFLGVYYYKNNKSWMESEFRVYSSANNCTFEYVSQPFLMDLEGKQGNFKNLREFVFKNIDGYFKIYSKHTPINLVRDLPQGFSALEPLVDLPIGINITRFQTLLALHRSYLTPGDSSSGWTAGAAAYYVGYLQPRTFLLKYNENGTITDAVDCALDPLSETKCTLKSFTVEKGIYQTSNFRVQPTESIVRFPNITNLCPFGEVFNATRFASVYAWNRKRISNCVADYSVLYNSASFSTFKCYGVSPTKLNDLCFTNVYADSFVIRGDEVRQIAPGQTGKIADYNYKLPDDFTGCVIAWNSNNLDSKVGGNYNYLYRLFRKSNLKPFERDISTEIYQAGSTPCNGVEGFNCYFPLQSYGFQPTNGVGYQPYRVVVLSFELLHAPATVCGPKKSTNLVKNKCVNFNFNGLTGTGVLTESNKKFLPFQQFGRDIADTTDAVRDPQTLEILDITPCSFGGVSVITPGTNTSNQVAVLYQGVNCTEVPVAIHADQLTPTWRVYSTGSNVFQTRAGCLIGAEHVNNSYECDIPIGAGICASYQTQTNSPRRARSVASQSIIAYTMSLGAENSVAYSNNSIAIPTNFTISVTTEILPVSMTKTSVDCTMYICGDSTECSNLLLQYGSFCTQLNRALTGIAVEQDKNTQEVFAQVKQIYKTPPIKDFGGFNFSQILPDPSKPSKRSFIEDLLFNKVTLADAGFIKQYGDCLGDIAARDLICAQKFNGLTVLPPLLTDEMIAQYTSALLAGTITSGWTFGAGAALQIPFAMQMAYRFNGIGVTQNVLYENQKLIANQFNSAIGKIQDSLSSTASALGKLQDVVNQNAQALNTLVKQLSSNCGAISSVLNDILSRLDKVEAEVQIDRLITCRLQSLQTYVTQQLIRAAEIRASANLAATKMSECVLGQSKRVDFCGKGYHLMSFPQSAPHGVVFLHVTYVPAQEKNFTTAPAICHDGKAHFPREGVFVSNGTHWFVTQRNFYEPQIITTDNTFVSGNCDVVIGIVNNTVYDPLQPELDSFKEELDKYFKNHTSPDVDLGDISGINASVVNIQKEIDRLNEVAKNLNESLIDLQELGKYEQYIKWPWYIWLGFIAGLIAIVMVTIMLCCMTSCCSCLKGCCSCGSCCKFDEDDSEPVLKGVKLHYT

SEQ ID NO: 1071 - protein, 1273 aa, Artificial Sequence
  SARS-CoV-2/USA/UT-00033/2020__EPI_ISL_417976 spike protein (1-1273)(F970C_G999C)
MFVFLVLLPLVSSQCVNLTTRTQLPPAYTNSFTRGVYYPDKVFRSSVLHSTQDLFLPFFSNVTWFHAIHVSGTNGTKRFDNPVLPFNDGVYFASTEKSNIIRGWIFGTTLDSKTQSLLIVNNATNVVIKVCEFQFCNDPFLGVYYHKNNKSWMESEFRVYSSANNCTFEYVSQPFLMDLEGKQGNFKNLREFVFKNIDGYFKIYSKHTPINLVRDLPQGFSALEPLVDLPIGINITRFQTLLALHRSYLTPGDSSSGLTAGAAAYYVGYLQPRTFLLKYNENGTITDAVDCALDPLSETKCTLKSFTVEKGIYQTSNFRVQPTESIVRFPNITNLCPFGEVFNATRFASVYAWNRKRISNCVADYSVLYNSASFSTFKCYGVSPTKLNDLCFTNVYADSFVIRGDEVRQIAPGQTGKIADYNYKLPDDFTGCVIAWNSNNLDSKVGGNYNYLYRLFRKSNLKPFERDISTEIYQAGSTPCNGVEGFNCYFPLQSYGFQPTNGVGYQPYRVVVLSFELLHAPATVCGPKKSTNLVKNKCVNFNFNGLTGTGVLTESNKKFLPFQQFGRDIADTTDAVRDPQTLEILDITPCSFGGVSVITPGTNTSNQVAVLYQGVNCTEVPVAIHADQLTPTWRVYSTGSNVFQTRAGCLIGAEHVNNSYECDIPIGAGICASYQTQTNSPRRARSVASQSIIAYTMSLGAENSVAYSNNSIAIPTNFTISVTTEILPVSMTKTSVDCTMYICGDSTECSNLLLQYGSFCTQLNRALTGIAVEQDKNTQEVFAQVKQIYKTPPIKDFGGFNFSQILPDPSKPSKRSFIEDLLFNKVTLADAGFIKQYGDCLGDIAARDLICAQKFNGLTVLPPLLTDEMIAQYTSALLAGTITSGWTFGAGAALQIPFAMQMAYRFNGIGVTQNVLYENQKLIANQFNSAIGKIQDSLSSTASALGKLQDVVNQNAQALNTLVKQLSSNCGAISSVLNDILSRLDKVEAEVQIDRLITCRLQSLQTYVTQQLIRAAEIRASANLAATKMSECVLGQSKRVDFCGKGYHLMSFPQSAPHGVVFLHVTYVPAQEKNFTTAPAICHDGKAHFPREGVFVSNGTHWFVTQRNFYEPQIITTDNTFVSGNCDVVIGIVNNTVYDPLQPELDSFKEELDKYFKNHTSPDVDLGDISGINASVVNIQKEIDRLNEVAKNLNESLIDLQELGKYEQYIKWPWYIWLGFIAGLIAIVMVTIMLCCMTSCCSCLKGCCSCGSCCKFDEDDSEPVLKGVKLHYT

SEQ ID NO: 1072 - protein, 1273 aa, Artificial Sequence
  SARS-CoV-2/USA/WI-13/2020__EPI_ISL_417516 spike protein (1-1273)(F970C_G999C)
MFVFLVLLPLVSSQCVNLTTRTQLPPAYTNSFTRGVYYPDKVFRSSVLHSTQDLFLPFFSNVTWFHAIHVSGTNGTKRFDNPVLPFNDGVYFASTEKSNIIRGWIFGTTLDSKTQSLLIVNNATNVVIKVCEFQFCNDPFLGVYYHKNNKSWMESEFRVYSSANNCTFEYVSQPFLMDLEGKQGNFKNLREFVFKNIDGYFKIYSKHTPINLVRDLPQGFSALEPLVDLPIGINITRFQTLLALHRSYLTPGDSSSGWTAGAAAYYVGYLQPRTFLLKYNENGTITDAVDCALDPLSETKCTLKSFTVEKGIYQTSNFRVLPTESIVRFPNITNLCPFGEVFNATRFASVYAWNRKRISNCVADYSVLYNSASFSTFKCYGVSPTKLNDLCFTNVYADSFVIRGDEVRQIAPGQTGKIADYNYKLPDDFTGCVIAWNSNNLDSKVGGNYNYLYRLFRKSNLKPFERDISTEIYQAGSTPCNGVEGFNCYFPLQSYGFQPTNGVGYQPYRVVVLSFELLHAPATVCGPKKSTNLVKNKCVNFNFNGLTGTGVLTESNKKFLPFQQFGRDIADTTDAVRDPQTLEILDITPCSFGGVSVITPGTNTSNQVAVLYQGVNCTEVPVAIHADQLTPTWRVYSTGSNVFQTRAGCLIGAEHVNNSYECDIPIGAGICASYQTQTNSPRRARSVASQSIIAYTMSLGAENSVAYSNNSIAIPTNFTISVTTEILPVSMTKTSVDCTMYICGDSTECSNLLLQYGSFCTQLNRALTGIAVEQDKNTQEVFAQVKQIYKTPPIKDFGGFNFSQILPDPSKPSKRSFIEDLLFNKVTLADAGFIKQYGDCLGDIAARDLICAQKFNGLTVLPPLLTDEMIAQYTSALLAGTITSGWTFGAGAALQIPFAMQMAYRFNGIGVTQNVLYENQKLIANQFNSAIGKIQDSLSSTASALGKLQDVVNQNAQALNTLVKQLSSNCGAISSVLNDILSRLDKVEAEVQIDRLITCRLQSLQTYVTQQLIRAAEIRASANLAATKMSECVLGQSKRVDFCGKGYHLMSFPQSAPHGVVFLHVTYVPAQEKNFTTAPAICHDGKAHFPREGVFVSNGTHWFVTQRNFYEPQIITTDNTFVSGNCDVVIGIVNNTVYDPLQPELDSFKEELDKYFKNHTSPDVDLGDISGINASVVNIQKEIDRLNEVAKNLNESLIDLQELGKYEQYIKWPWYIWLGFIAGLIAIVMVTIMLCCMTSCCSCLKGCCSCGSCCKFDEDDSEPVLKGVKLHYT

SEQ ID NO: 1073 - protein, 1272 aa, Artificial Sequence
  SARS-CoV-2/India/1-27/2020__EPI_ISL_413522 spike protein (1-1272)(F969C_G998C)
MFVFLVLLPLVSSQCVNLTTRTQLPPAYTNSFTRGVYYPDKVFRSSVLHSTQDLFLPFFSNVTWFHAIHVSGTNGTKRFDNPVLPFNDGVYFASTEKSNIIRGWIFGTTLDSKTQSLLIVNNATNVVIKVCEFQFCNDPFLGVYHKNNKSWMESEFRVYSSANNCTFEYVSQPFLMDLEGKQGNFKNLREFVFKNIDGYFKIYSKHTPINLVRDLPQGFSALEPLVDLPIGINITRFQTLLALHRSYLTPGDSSSGWTAGAAAYYVGYLQPRTFLLKYNENGTITDAVDCALDPLSETKCTLKSFTVEKGIYQTSNFRVQPTESIVRFPNITNLCPFGEVFNATRFASVYAWNRKRISNCVADYSVLYNSASFSTFKCYGVSPTKLNDLCFTNVYADSFVIRGDEVIQIAPGQTGKIADYNYKLPDDFTGCVIAWNSNNLDSKVGGNYNYLYRLFRKSNLKPFERDISTEIYQAGSTPCNGVEGFNCYFPLQSYGFQPTNGVGYQPYRVVVLSFELLHAPATVCGPKKSTNLVKNKCVNFNFNGLTGTGVLTESNKKFLPFQQFGRDIADTTDAVRDPQTLEILDITPCSFGGVSVITPGTNTSNQVAVLYQDVNCTEVPVAIHADQLTPTWRVYSTGSNVFQTRAGCLIGAEHVNNSYECDIPIGAGICASYQTQTNSPRRARSVASQSIIAYTMSLGAENSVAYSNNSIAIPTNFTISVTTEILPVSMTKTSVDCTMYICGDSTECSNLLLQYGSFCTQLNRALTGIAVEQDKNTQEVFAQVKQIYKTPPIKDFGGFNFSQILPDPSKPSKRSFIEDLLFNKVTLADAGFIKQYGDCLGDIAARDLICAQKFNGLTVLPPLLTDEMIAQYTSALLAGTITSGWTFGAGAALQIPFAMQMAYRFNGIGVTQNVLYENQKLIANQFNSAIGKIQDSLSSTASALGKLQDVVNQNAQALNTLVKQLSSNCGAISSVLNDILSRLDKVEAEVQIDRLITCRLQSLQTYVTQQLIRAAEIRASANLAATKMSECVLGQSKRVDFCGKGYHLMSFPQSAPHGVVFLHVTYVPAQEKNFTTAPAICHDGKAHFPREGVFVSNGTHWFVTQRNFYEPQIITTDNTFVSGNCDVVIGIVNNTVYDPLQPELDSFKEELDKYFKNHTSPDVDLGDISGINASVVNIQKEIDRLNEVAKNLNESLIDLQELGKYEQYIKWPWYIWLGFIAGLIAIVMVTIMLCCMTSCCSCLKGCCSCGSCCKFDEDDSEPVLKGVKLHYT

SEQ ID NO: 1074 - protein, 1267 aa, Artificial Sequence
  SARS-CoV-2/pangolin/Guangxi/P4L/2017__EPI_ISL_410538 spike protein (1-1267)(F964C_G993C)
MFVFLFVLPLVSSQCVNLTTRTGIPPGYTNSSTRGVYYPDKVFRSSILHLTQDLFLPFFSNVTWFNTINYQGGFKKFDNPVLPFNDGVYFASTEKSNIIRGWIFGTTLDARTQSLLIVNNATNVVIKVCEFQFCTDPFLGVYYHNNNKTWVENEFRVYSSANNCTFEYISQPFLMDLEGKQGNFKNLREFVFKNVDGYFKIYSKHTPIDLVRDLPRGFAALEPLVDLPIGINITRFQTLLALHRSYLTPGNLESGWTTGAAAYYVGYLQQRTFLLSYNQNGTITDAVDCSLDPLSETKCTLKSLTVEKGIYQTSNFRVQPTISIVRFPNITNLCPFGEVFNASKFASVYAWNRKRISNCVADYSVLYNSTSFSTFKCYGVSPTKLNDLCFTNVYADSFVVKGDEVRQIAPGQTGVIADYNYKLPDDFTGCVIAWNSVKQDALTGGNYGYLYRLFRKSKLKPFERDISTEIYQAGSTPCNGQVGLNCYYPLERYGFHPTTGVNYQPFRVVVLSFELLNGPATVCGPKLSTTLVKDKCVNFNFNGLTGTGVLTTSKKQFLPFQQFGRDISDTTDAVRDPQTLEILDITPCSFGGVSVITPGTNTSNQVAVLYQDVNCTEVPMAIHAEQLTPAWRVYSAGANVFQTRAGCLVGAEHVNNSYECDIPVGAGICASYHSMSSLRSVNQRSIIAYTMSLGAENSVAYSNNSIAIPTNFTISVTTEILPVSMTKTSVDCTMYICGDSIECSNLLLQYGSFCTQLNRALTGIAVEQDKNTQEVFAQVKQIYKTPPIKDFGGFNFSQILPDPSKPSKRSFIEDLLFNKVTLADAGFIKQYGDCLGDIAARDLICAQKFNGLTVLPPLLTDEMIAQYTSALLAGTITSGWTFGAGAALQIPFAMQMAYRFNGIGVTQNVLYENQKLIANQFNSAIGKIQDSLSSTASALGKLQDVVNQNAQALNTLVKQLSSNCGAISSVLNDILSRLDKVEAEVQIDRLITCRLQSLQTYVTQQLIRAAEIRASANLAATKMSECVLGQSKRVDFCGKGYHLMSFPQSAPHGVVFLHVTYVPAQEKNFTTAPAICHEGKAHFPREGVFVSNGTHWFITQRNFYEPQIITTDNTFVSGSCDVVIGIVNNTVYDPLQPELDSFKEELDKYFKNHTSPDVDLGDISGINASVVNIQKEIDRLNEVAKNLNESPIDLQELGKYEQYIKWPWYIWLGFIAGLIAIIMVTIMLCCMTSCCSCLKGCCSCGSCCKFDEDDSEPVLKGVKLHYT

SEQ ID NO: 1075 - protein, 1267 aa, Artificial Sequence
  SARS-CoV-2/pangolin/Guangxi/P5L/2017__EPI_ISL_410540 spike protein (1-1267)(F964C_G993C)
MFVFLFVLPLVSSQCVNLTTRTGIPPGYTNSSTRGVYYPDKVFRSSILHLTQDLFLPFFSNVTWFNTINYQGGFKKFDNPVLPFNDGVYFASTEKSNIIRGWIFGTTLDARTQSLLIVNNATNVVIKVCEFQFCTDPFLGVYYHNNNKTWVENEFRVYSSANNCTFEYISQPFLMDLEGKQGNFKNLREFVFKNVDGYFKIYSKHTPIDLVRDLPRGFAALEPLVDLPIGINITRFQTLLALHRSYLTPGKLESGWTTGAAAYYVGYLQQRTFLLSYNQNGTITDAVDCSLDPLSETKCTLKSLTVEKGIYQTSNFRVQPTISIVRFPNITNLCPFGEVFNASKFASVYAWNRKRISNCVADYSVLYNSTSFSTFKCYGVSPTKLNDLCFTNVYADSFVVKGDEVRQIAPGQTGVIADYNYKLPDDFTGCVIAWNSVKQDALTGGNYGYLYRLFRKSKLKPFERDISTEIYQAGSTPCNGQVGLNCYYPLERYGFHPTTGVNYQPFRVVVLSFELLNGPATVCGPKLSTTLVKDKCVNFNFNGLTGTGVLTTSKKQFLPFQQFGRDISDTTDAVRDPQTLEILDITPCSFGGVSVITPGTNTSNQVAVLYQDVNCTEVPMAIHAEQLTPAWRVYSAGANVFQTRAGCLVGAEHVNNSYECDIPVGAGICASYHSMSSFRSVNQRSIIAYTMSLGAENSVAYSNNSIAIPTNFTISVTTEILPVSMTKTSVDCTMYICGDSIECSNLLLQYGSFCTQLNRALTGIAVEQDKNTQEVFAQVKQIYKTPPIKDFGGFNFSQILPDPSKPSKRSFIEDLLFNKVTLADAGFIKQYGDCLGDIAARDLICAQKFNGLTVLPPLLTDEMIAQYTSALLAGTITSGWTFGAGAALQIPFAMQMAYRFNGIGVTQNVLYENQKLIANQFNSAIGKIQDSLSSTASALGKLQDVVNQNAQALNTLVKQLSSNCGAISSVLNDILSRLDKVEAEVQIDRLITCRLQSLQTYVTQQLIRAAEIRASANLAATKMSECVLGQSKRVDFCGKGYHLMSFPQSAPHGVVFLHVTYVPAQEKNFTTAPAICHEGKAHFPREGVFVSNGTHWFITQRNFYEPQIITTDNTFVSGSCDVVIGIVNNTVYDPLQPELDSFKEELDKYFKNHTSPDVDLGDISGINASVVNIQKEIDRLNEVAKNLNESLIDLQELGKYEQYIKWPWYIWLGFIAGLIAIIMVTIMLCCMTSCCSCLKGCCSCGSCCKFDEDDSEPVLKGVKLHYT

SEQ ID NO: 1076 - protein, 1267 aa, Artificial Sequence
  SARS-CoV-2/pangolin/Guangxi/P5E/2017__EPI_ISL_410541 spike protein (1-1267)(F964C_G993C)
MFVFLFVLPLVSSQCVNLTTRTGIPPGYTNSSTRGVYYPDKVFRSSILHLTQDLFLPFFSNVTWFNTITYQGGSKKFDNPVLPFNDGVYFASTEKSNIIRGWIFGTTLDARTQSLLIVNNATNVVIKVCEFQFCTDPFLGVYYHNNNKTWVENEFRVYSSANNCTFEYISQPFLMDLEGKQGNFKNLREFVFKNVDGYFKIYSKHTPIDLVRDLPRGFAALEPLVDLPIGINITRFQTLLALHRSYLTPGKLESGWTTGAAAYYVGYLQQRTFLLSYNQNGTITDAVDCSLDPLSETKCTLKSLTVEKGIYQTSNFRVQPTISIVRFPNITNLCPFGEVFNASKFASVYAWNRKRISNCVADYSVLYNSTSFSTFKCYGVSPTKLNDLCFTNVYADSFVVKGDEVRQIAPGQTGVIADYNYKLPDDFTGCVIAWNSVKQDALTGDNYGYLYRLFRKSKLKPFERDISTEIYQAGSTPCNGQVGLNCYYPLERYGFHPTTGVNYQPFRVVVLSFELLNGPATVCGPKLSTTLVKDKCVNFNFNGLTGTGVLTTSKKQFLPFQQFGRDISDTTDAVRDPQTLEILDITPCSFGGVSVITPGTNTSNQVAVLYQDVNCTEVPMAIHAEQLTPAWRVYSAGANVFQTRAGCLVGAEHVNNSYECDIPVGAGICASYHSMSSFRSVNQRSIIAYTMSLGAENSVAYSNNSIAIPTNFTISVTTEILPVSMTKTSVDCTMYICGDSIECSNLLLQYGSFCTQLNRALTGIAVEQDKNTQEVFAQVKQIYKTPPIKDFGGFNFSQILPDPSKPSKRSFIEDLLFNKVTLADAGFIKQYGDCLGDIAARDLICAQKFNGLTVLPPLLTDEMIAQYTSALLAGTITSGWTFGAGAALQIPFAMQMAYRFNGIGVTQNVLYENQKLIANQFNSAIGKIQDSLSSTASALGKLQDVVNQNAQALNTLVKQLSSNCGAISSVLNDILSRLDKVEAEVQIDRLITCRLQSLQTYVTQQLIRAAEIRASANLAATKMSECVLGQSKRVDFCGKGYHLMSFPQSAPHGVVFLHVTYVPAQEKNFTTAPAICHEGKAHFPREGVFVSNGTHWFITQRNFYEPQIITTDNTFVSGSCDVVIGIVNNTVYDPLQPELDSFKEELDKYFKNHTSPDVDLGDISGINASVVNIQKEIDRLNEVAKNLNESLIDLQELGKYEQYIKWPWYIWLGFIAGLIAIIMVTIMLCCMTSCCSCLKGCCSCGSCCKFDEDDSEPVLKGVKLHYT

SEQ ID NO: 1077 - protein, 1265 aa, Artificial Sequence
  SARS-CoV-2/pangolin/Guangxi/P1E/2017__EPI_ISL_410539 spike protein (1-1265)(F962C_G991C)
MFVFLFVLPLVSSQCVNLTTRTGIQPGYTNSSTRGVYYPDKVFRSSILHLTQDLFLPFFSNVTWFNTINYQGGFKKFDNPVLPFNDGVYFASTEKSNIIRGWIFGTTLDARTQSLLIVNNATNVVIKVCEFQFCTDPFLGVYYHNNNKTWVENEFRVYSSANNCTFEYISQPFLMDLEGKQGNFKNLREFVFKNVDGYFKIYSKHTPIDLVRDLPRGFAALEPLVDLPIGINITRFQTLLALHRSYLTPGKLESGWTTGAAAYYVGYLQQRTFLLSYNQNGTITDAVDCSLDPLSETKCTLKSLTVEKGIYQTSNFRVQPTISIVRFPNITNLCPFGEVFNASKFASVYAWNRKRISNCVADYSVLYNSTSFSTFKCYGVSPTKLNDLCFTNVYADSFVVKGDEVRQIAPGQTGVIADYNYKLPDDFTGCVIAWNSVKQDALTGGNYLYRLFRKSKLKPFERDISTEIYQAGSTPCNGQVGLNCYYPLERYGFHPTTGVNYQPFRVVVLSFELLNGPATVCGPKLSTTLVKDKCVNFNFNGLTGTGVLTTSKKQFLPFQQFGRDISDTTDAVRDPQTLEILDITPCSFGGVSVITPGTNTSNQVAVLYQDVNCTEVPMAIHAEQLTPAWRVYSAGANVFQTRAGCLVGAEHVNNSYECDIPVGAGICASYHSMSSLRSVNQRSIIAYTMSLGAENSVAYSNNSIAIPTNFTISVTTEILPVSMTKTSVDCTMYICGDSIECSNLLLQYGSFCTQLNRALTGIAVEQDKNTQEVFAQVKQIYKTPPIKDFGGFNFSQILPDPSKPSKRSFIEDLLFNKVTLADAGFIKQYGDCLGDIAARDLICAQKFNGLTVLPPLLTDEMIAQYTSALLAGTITSGWTFGAGAALQIPFAMQMAYRFNGIGVTQNVLYENQKLIANQFNSAIGKIQDSLSSTASALGKLQDVVNQNAQALNTLVKQLSSNCGAISSVLNDILSRLDKVEAEVQIDRLITCRLQSLQTYVTQQLIRAAEIRASANLAATKMSECVLGQSKRVDFCGKGYHLMSFPQSAPHGVVFLHVTYVPAQEKNFTTAPAICHEGKAHFPREGVFVSNGTHWFITQRNFYEPQIITTDNTFVSGSCDVVIGIVNNTVYDPLQPELDSFKEELDKYFKNHTSPDVDLGDISGINASVVNIQKEIDRLNEVAKNLNESLIDLQELGKYEQYIKWPWYIWLGFIAGLIAIIMVTIMLCCMTSCCSCLKGCCSCGSCCKFDEDDSEPVLKGVKLHYT

SEQ ID NO: 1078 - protein, 1273 aa, Artificial Sequence; identical to SEQ ID NO: 26
  SARS-CoV-2/Wuhan/WIV05/2019__EPI_ISL_402128 spike protein (1-1273)(A972C_R995C)

SEQ ID NO: 1079 - protein, 1269 aa, Artificial Sequence
  SARS-CoV-2/bat/Yunnan/RaTG13/2013__EPI_ISL_402131 spike protein (1-1269)(A968C_R991C)
MFVFLVLLPLVSSQCVNLTTRTQLPPAYTNSSTRGVYYPDKVFRSSVLHLTQDLFLPFFSNVTWFHAIHVSGTNGIKRFDNPVLPFNDGVYFASTEKSNIIRGWIFGTTLDSKTQSLLIVNNATNVVIKVCEFQFCNDPFLGVYYHKNNKSWMESEFRVYSSANNCTFEYVSQPFLMDLEGKQGNFKNLREFVFKNIDGYFKIYSKHTPINLVRDLPPGFSALEPLVDLPIGINITRFQTLLALHRSYLTPGDSSSGWTAGAAAYYVGYLQPRTFLLKYNENGTITDAVDCALDPLSETKCTLKSFTVEKGIYQTSNFRVQPTDSIVRFPNITNLCPFGEVFNATTFASVYAWNRKRISNCVADYSVLYNSTSFSTFKCYGVSPTKLNDLCFTNVYADSFVITGDEVRQIAPGQTGKIADYNYKLPDDFTGCVIAWNSKHIDAKEGGNFNYLYRLFRKANLKPFERDISTEIYQAGSKPCNGQTGLNCYYPLYRYGFYPTDGVGHQPYRVVVLSFELLNAPATVCGPKKSTNLVKNKCVNFNFNGLTGTGVLTESNKKFLPFQQFGRDIADTTDAVRDPQTLEILDITPCSFGGVSVITPGTNASNQVAVLYQDVNCTEVPVAIHADQLTPTWRVYSTGSNVFQTRAGCLIGAEHVNNSYECDIPIGAGICASYQTQTNSRSVASQSIIAYTMSLGAENSVAYSNNSIAIPTNFTISVTTEILPVSMTKTSVDCTMYICGDSTECSNLLLQYGSFCTQLNRALTGIAVEQDKNTQEVFAQVKQIYKTPPIKDFGGFNFSQILPDPSKPSKRSFIEDLLFNKVTLADAGFIKQYGDCLGDIAARDLICAQKFNGLTVLPPLLTDEMIAQYTSALLAGTITSGWTFGAGAALQIPFAMQMAYRFNGIGVTQNVLYENQKLIANQFNSAIGKIQDSLSSTASALGKLQDVVNQNAQALNTLVKQLSSNFGCISSVLNDILSRLDKVEAEVQIDCLITGRLQSLQTYVTQQLIRAAEIRASANLAATKMSECVLGQSKRVDFCGKGYHLMSFPQSAPHGVVFLHVTYVPAQEKNFTTAPAICHDGKAHFPREGVFVSNGTHWFVTQRNFYEPQIITTDNTFVSGSCDVVIGIVNNTVYDPLQPELDSFKEELDKYFKNHTSPDVDLGDISGINASVVNIQKEIDRLNEVAKNLNESLIDLQELGKYEQYIKWPWYIWLGFIAGLIAIIMVTIMLCCMTSCCSCLKGCCSCGSCCKFDEDDSEPVLKGVKLHYT

SEQ ID NO: 1080 - protein, 1273 aa, Artificial Sequence
  SARS-CoV-2/Wuhan/HBCDC-HB-01/2019__EPI_ISL_402132 spike protein (1-1273)(A972C_R995C)
MFVFLVLLPLVSSQCVNLTTRTQLPPAYTNSITRGVYYPDKVFRSSVLHSTQDLFLPFFSNVTWFHAIHVSGTNGTKRFDNPVLPFNDGVYFASTEKSNIIRGWIFGTTLDSKTQSLLIVNNATNVVIKVCEFQFCNDPFLGVYYHKNNKSWMESEFRVYSSANNCTFEYVSQPFLMDLEGKQGNFKNLREFVFKNIDGYFKIYSKHTPINLVRDLPQGFSALEPLVDLPIGINITRFQTLLALHRSYLTPGDSSSGWTAGAAAYYVGYLQPRTFLLKYNENGTITDAVDCALDPLSETKCTLKSFTVEKGIYQTSNFRVQPTESIVRFPNITNLCPFGEVFNATRFASVYAWNRKRISNCVADYSVLYNSASFSTFKCYGVSPTKLNDLCFTNVYADSFVIRGDEVRQIAPGQTGKIADYNYKLPDDFTGCVIAWNSNNLDSKVGGNYNYLYRLFRKSNLKPFERDISTEIYQAGSTPCNGVEGFNCYFPLQSYGFQPTNGVGYQPYRVVVLSFELLHAPATVCGPKKSTNLVKNKCVNFNFNGLTGTGVLTESNKKFLPFQQFGRDIADTTDAVRDPQTLEILDITPCSFGGVSVITPGTNTSNQVAVLYQDVNCTEVPVAIHADQLTPTWRVYSTGSNVFQTRAGCLIGAEHVNNSYECDIPIGAGICASYQTQTNSPRRARSVASQSIIAYTMSLGAENSVAYSNNSIAIPTNFTISVTTEILPVSMTKTSVDCTMYICGDSTECSNLLLQYGSFCTQLNRALTGIAVEQDKNTQEVFAQVKQIYKTPPIKDFGGFNFSQILPDPSKPSKRSFIEDLLFNKVTLADAGFIKQYGDCLGDIAARDLICAQKFNGLTVLPPLLTDEMIAQYTSALLAGTITSGWTFGAGAALQIPFAMQMAYRFNGIGVTQNVLYENQKLIANQFNSAIGKIQDSLSSTASALGKLQDVVNQNAQALNTLVKQLSSNFGCISSVLNDILSRLDKVEAEVQIDCLITGRLQSLQTYVTQQLIRAAEIRASANLAATKMSECVLGQSKRVDFCGKGYHLMSFPQSAPHGVVFLHVTYVPAQEKNFTTAPAICHDGKAHFPREGVFVSNGTHWFVTQRNFYEPQIITTDNTFVSGNCDVVIGIVNNTVYDPLQPELDSFKEELDKYFKNHTSPDVDLGDISGINASVVNIQKEIDRLNEVAKNLNESLIDLQELGKYEQYIKWPWYIWLGFIAGLIAIVMVTIMLCCMTSCCSCLKGCCSCGSCCKFDEDDSEPVLKGVKLHYT

SEQ ID NO: 1081 - protein, 1273 aa, Artificial Sequence
  SARS-CoV-2/Guangdong/20SF028/2020__EPI_ISL_403936 spike protein (1-1273)(A972C_R995C)
MFVFLVLLPLVSSQCVNLTTRTQLPPAYTNSFTRGVYYPDKVFRSSVLYSTQDLFLPFFSNVTWFHAIHVSGTNGTKRFDNPVLPFNDGVYFASTEKSNIIRGWIFGTTLDSKTQSLLIVNNATNVVIKVCEFQFCNDPFLGVYYHKNNKSWMESEFRVYSSANNCTFEYVSQPFLMDLEGKQGNFKNLREFVFKNIDGYFKIYSKHTPINLVRDLPQGFSALEPLVDLPIGINITRFQTLLALHRSYLTPGDSSSGWTAGAAAYYVGYLQPRTFLLKYNENGTITDAVDCALDPLSETKCTLKSFTVEKGIYQTSNFRVQPTESIVRFPNITNLCPFGEVFNATRFASVYAWNRKRISNCVADYSVLYNSASFSTFKCYGVSPTKLNDLCFTNVYADSFVIRGDEVRQIAPGQTGKIADYNYKLPDDFTGCVIAWNSNNLDSKVGGNYNYLYRLFRKSNLKPFERDISTEIYQAGSTPCNGVEGFNCYFPLQSYGFQPTNGVGYQPYRVVVLSFELLHAPATVCGPKKSTNLVKNKCVNFNFNGLTGTGVLTESNKKFLPFQQFGRDIADTTDAVRDPQTLEILDITPCSFGGVSVITPGTNTSNQVAVLYQDVNCTEVPVAIHADQLTPTWRVYSTGSNVFQTRAGCLIGAEHVNNSYECDIPIGAGICASYQTQTNSPRRARSVASQSIIAYTMSLGAENSVAYSNNSIAIPTNFTISVTTEILPVSMTKTSVDCTMYICGDSTECSNLLLQYGSFCTQLNRALTGIAVEQDKNTQEVFAQVKQIYKTPPIKDFGGFNFSQILPDPSKPSKRSFIEDLLFNKVTLADAGFIKQYGDCLGDIAARDLICAQKFNGLTVLPPLLTDEMIAQYTSALLAGTITSGWTFGAGAALQIPFAMQMAYRFNGIGVTQNVLYENQKLIANQFNSAIGKIQDSLSSTASALGKLQDVVNQNAQALNTLVKQLSSNFGCISSVLNDILSRLDKVEAEVQIDCLITGRLQSLQTYVTQQLIRAAEIRASANLAATKMSECVLGQSKRVDFCGKGYHLMSFPQSAPHGVVFLHVTYVPAQEKNFTTAPAICHDGKAHFPREGVFVSNGTHWFVTQRNFYEPQIITTDNTFVSGNCDVVIGIVNNTVYDPLQPELDSFKEELDKYFKNHTSPDVDLGDISGINASVVNIQKEIDRLNEVAKNLNESLIDLQELGKYEQYIKWPWYIWLGFIAGLIAIVMVTIMLCCMTSCCSCLKGCCSCGSCCKFDEDDSEPVLKGVKLHYT

SEQ ID NO: 1082 - protein, 1273 aa, Artificial Sequence
  SARS-CoV-2/Shenzhen/SZTH-001/2020__EPI_ISL_406592 spike protein (1-1273)(A972C_R995C)
MFVFLVLLPLVSSQCVNLTTRTQLPPAYTNSFTRGVYYPDKVFRSSVLHSTQDLFLPFFSNVTWFHAIHVSGTNGTKRFDNPVLPFNDGVYFASTEKSNIIRGWIFGTTLDSKTQSLLIVNNATNVVIKVCEFQFCNDPFLGVYYHKNNKSWMESEFRVYSSANNCTFEYVSQPFLMDLEGKQGNFKNLREFVFKNIDGYFKIYSKHTPINLVRDLPQGFSALEPLVDLPIGINITRFQTLLALHRSYLTPGDSSSGWTAGAAAYYVGYLQPRTFLLKYNENGTITDAVDCALDPLSETKCTLKSFTVEKGIYQTSNFRVQPTESIVRFPNITNLCPFGEVFNATRFASVYAWNRKRISNCVADYSVLYNSASFSTFKCYGVSPTKLNDLCFTNVYADSFVIRGDEVRQIAPGQTGKIADYNYKLPDDFTGCVIAWNSNNLDSKVGGNYNYLYRLFRKSNLKPFERDISTEIYQAGSTPCNGVEGFNCYFPLQSYGFQPTNGVGYQPYRVVVLSFELLHAPATVCGPKKSTNLVKNKCVNFNFNGLTGTGVLTESNKKFLPFQQFGRDIADTTDAVRDPQTLEILDITPCSFGGVSVITPGTNTSNQVAVLYQDVNCTEVPVAIHADQLTPTWRVYSTGSNVFQTRAGCLIGAEHVNNSYECDIPIGAGICASYQTQTNSPRRARSVASQSIIAYTMSLGAENSVAYSNNSIAIPTNFTISVTTEILPVSMTKTSVDCTMYICGDSTECSNLLLQYGSFCTQLNRALTGIAVEQDKNTQEVFAQVKQIYKTPPIKDFGGFNFSQILPDPSKPSKRSFIEDLLFNKVTLADAGFIKQYGDCLGDIAARDLICAQKFNGLTVLPPLLTDEMIAQYTSALLAGTITSGWTFGAGAALQIPFAMQMAYRFNGIGVTQNVLYENQKLIANQFNSAIGKIQDSLSSTASALGKLQDVVNQNAQALNTLVKQLSSNFGCISSVLNDILSRLDKVEAEVQIDCLITGRLQSLQTYVTQQLIRAAEIRASANLAATKMSECVLGQSKRVDFCGKGYHLMSFPQSAPHGVVFLHVTYVPAQEKNFTTAPAICHDGKAHFPREGVFVSNGTHWFVTQRNFYEPQIITTDNTFVSGNCDVLIGIVNNTVYDPLQPELDSFKEELDKYFKNHTSPDVDLGDISGINASVVNIQKEIDRLNEVAKNLNESLIDLQELGKYEQYIKWPWYIWLGFIAGLIAIVMVTIMLCCMTSCCSCLKGCCSCGSCCKFDEDDSGPVLKGVKLHYT

SEQ ID NO: 1083 - protein, 1273 aa, Artificial Sequence
  SARS-CoV-2/Shenzhen/SZTH-004/2020__EPI_ISL_406595 spike protein (1-1273)(A972C_R995C)
MFVFLVLLPLVSSQCVNLTTRTQLPPAYTNSFTRGVYYPDKVFRSSVLHSTQDLFLPFFSNVTWFHAIHVSGTNGTKRFDNPVLPFNDGVYFASTEKSNIIRGWIFGTTLDSKTQSLLIVNNATNVVIKVCEFQFCNDPFLGVYYHKNNKSWMESEFRVYSSANNCTFEYVSQPFLMDLEGKQGNFKNLREFVFKNIDGYFKIYSKHTPINLVRDLPQGFSALEPLVDLPIGINITRFQTLLALHRSYLTPGDSSSGWTAGAAAYYVGYLQPRTFLLKYNENGTITDAVDCALDPLSETKCTLKSFTVEKGIYQTSNFRVQPTESIVRFPNITNLCPFGEVFNATRFASVYAWDRKRISNCVAYYSVLYNSASFSTFKCYGVSPTKLNDLCFTNVYADSFVIRGDEVRQIAPGQTGKIADYNYKLPDDFTGCVIAWNSNNLDSKVGGNYNYLYRLFRKSNLKPFERDISTEIYQAGSTPCNGVEGFNCYFPLQSYGFQPTNGVGYQPYRVVVLSFELLHAPATVCGPKKSTNLVKNKCVNFNFNGLTGTGVLTESNKKFLPFQQFGRDIADTTDAVRDPQTLEILDITPCSFGGVSVITPGTNTSNQVAVLYQDVNCTEVPVAIHADQLTPTWRVYSTGSNVFQTRAGCLIGAEHVNNSYECDIPIGAGICASYQTQTNSPRRARSVASQSIIAYTMSLGAENSVAYSNNSIAIPTNFTISVTTEILPVSMTKTSVDCTMYICGDSTECSNLLLQYGSFCTQLNRALTGIAVEQDKNTQEVFAQVKQIYKTPPIKDFGGFNFSQILPDPSKPSKRSFIEDLLFNKVTLADAGFIKQYGDCLGDIAARDLICAQKFNGLTVLPPLLTDEMIAQYTSALLAGTITSGWTFGAGAALQIPFAMQMAYRFNGIGVTQNVLYENQKLIANQFNSAIGKIQDSLSSTASALGKLQDVVNQNAQALNTLVKQLSSNFGCISSVLNDILSRLDKVEAEVQIDCLITGRLQSLQTYVTQQLIRAAEIRASANLAATKMSECVLGQSKRVDFCGKGYHLMSFPQSAPHGVVFLHVTYVPAQEKNFTTAPAICHDGKAHFPREGVFVSNGTHWFVTQRNFYEPQIITTDNTFVSGNCDVVIGIVNNTVYDPLQPELDSFKEELDKYFKNHTSPDVDLGDISGINASVVNIQKEIDRLNEVAKNLNESLIDLQELGKYEQYIKWPWYIWLGFIAGLIAIVMVTIMLCCMTSCCSCLKGCCSCGSCCKFDEDDSEPVLKGVKLHYT

SEQ ID NO: 1084 - protein, 1273 aa, Artificial Sequence
  SARS-CoV-2/France/IDF0372/2020__EPI_ISL_406596 spike protein (1-1273)(A972C_R995C)
MFVFLVLLPLVSSQCVNLTTRTQLPPAYTNSFTRGVYYPDKVFRSSVLHSTQDLFLPFFSNVTWFHAIHVSGTNGTKRFDNPVLPFNDGVYFASTEKSNIIRGWIFGTTLDSKTQSLLIVNNATNVVIKVCEFQFCNDPFLGVYYHKNNKSWMESEFRVYSSANNCTFEYVSQPFLMDLEGKQGNFKNLREFVFKNIDGYFKIYSKHTPINLVRDLPQGFSALEPLVDLPIGINITRFQTLLALHRSYLTPGDSSSGWTAGAAAYYVGYLQPRTFLLKYNENGTITDAVDCALDPLSETKCTLKSFTVEKGIYQTSNFRVQPTESIVRFPNITNLCPFGEVFNATRFASVYAWNRKRISNCVADYSFLYNSASFSTFKCYGVSPTKLNDLCFTNVYADSFVIRGDEVRQIAPGQTGKIADYNYKLPDDFTGCVIAWNSNNLDSKVGGNYNYLYRLFRKSNLKPFERDISTEIYQAGSTPCNGVEGFNCYFPLQSYGFQPTNGVGYQPYRVVVLSFELLHAPATVCGPKKSTNLVKNKCVNFNFNGLTGTGVLTESNKKFLPFQQFGRDIADTTDAVRDPQTLEILDITPCSFGGVSVITPGTNTSNQVAVLYQDVNCTEVPVAIHADQLTPTWRVYSTGSNVFQTRAGCLIGAEHVNNSYECDIPIGAGICASYQTQTNSPRRARSVASQSIIAYTMSLGAENSVAYSNNSIAIPTNFTISVTTEILPVSMTKTSVDCTMYICGDSTECSNLLLQYGSFCTQLNRALTGIAVEQDKNTQEVFAQVKQIYKTPPIKDFGGFNFSQILPDPSKPSKRSFIEDLLFNKVTLADAGFIKQYGDCLGDIAARDLICAQKFNGLTVLPPLLTDEMIAQYTSALLAGTITSGWTFGAGAALQIPFAMQMAYRFNGIGVTQNVLYENQKLIANQFNSAIGKIQDSLSSTASALGKLQDVVNQNAQALNTLVKQLSSNFGCISSVLNDILSRLDKVEAEVQIDCLITGRLQSLQTYVTQQLIRAAEIRASANLAATKMSECVLGQSKRVDFCGKGYHLMSFPQSAPHGVVFLHVTYVPAQEKNFTTAPAICHDGKAHFPREGVFVSNGTHWFVTQRNFYEPQIITTDNTFVSGNCDVVIGIVNNTVYDPLQPELDSFKEELDKYFKNHTSPDVDLGDISGINASVVNIQKEIDRLNEVAKNLNESLIDLQELGKYEQYIKWPWYIWLGFIAGLIAIVMVTIMLCCMTSCCSCLKGCCSCGSCCKFDEDDSEPVLKGVKLHYT

SEQ ID NO: 1085 - protein, 1273 aa, Artificial Sequence
  SARS-CoV-2/Australia/VIC01/2020__EPI_ISL_406844 spike protein (1-1273)(A972C_R995C)
MFVFLVLLPLVSSQCVNLTTRTQLPPAYTNSFTRGVYYPDKVFRSSVLHSTQDLFLPFFSNVTWFHAIHVSGTNGTKRFDNPVLPFNDGVYFASTEKSNIIRGWIFGTTLDSKTQSLLIVNNATNVVIKVCEFQFCNDPFLGVYYHKNNKSWMESEFRVYSSANNCTFEYVSQPFLMDLEGKQGNFKNLREFVFKNIDGYFKIYSKHTPINLVRDLPQGFSALEPLVDLPIGINITRFQTLLALHRRYLTPGDSSSGWTAGAAAYYVGYLQPRTFLLKYNENGTITDAVDCALDPLSETKCTLKSFTVEKGIYQTSNFRVQPTESIVRFPNITNLCPFGEVFNATRFASVYAWNRKRISNCVADYSVLYNSASFSTFKCYGVSPTKLNDLCFTNVYADSFVIRGDEVRQIAPGQTGKIADYNYKLPDDFTGCVIAWNSNNLDSKVGGNYNYLYRLFRKSNLKPFERDISTEIYQAGSTPCNGVEGFNCYFPLQSYGFQPTNGVGYQPYRVVVLSFELLHAPATVCGPKKSTNLVKNKCVNFNFNGLTGTGVLTESNKKFLPFQQFGRDIADTTDAVRDPQTLEILDITPCSFGGVSVITPGTNTSNQVAVLYQDVNCTEVPVAIHADQLTPTWRVYSTGSNVFQTRAGCLIGAEHVNNSYECDIPIGAGICASYQTQTNSPRRARSVASQSIIAYTMSLGAENSVAYSNNSIAIPTNFTISVTTEILPVSMTKTSVDCTMYICGDSTECSNLLLQYGSFCTQLNRALTGIAVEQDKNTQEVFAQVKQIYKTPPIKDFGGFNFSQILPDPSKPSKRSFIEDLLFNKVTLADAGFIKQYGDCLGDIAARDLICAQKFNGLTVLPPLLTDEMIAQYTSALLAGTITSGWTFGAGAALQIPFAMQMAYRFNGIGVTQNVLYENQKLIANQFNSAIGKIQDSLSSTASALGKLQDVVNQNAQALNTLVKQLSSNFGCISSVLNDILSRLDKVEAEVQIDCLITGRLQSLQTYVTQQLIRAAEIRASANLAATKMSECVLGQSKRVDFCGKGYHLMSFPQSAPHGVVFLHVTYVPAQEKNFTTAPAICHDGKAHFPREGVFVSNGTHWFVTQRNFYEPQIITTDNTFVSGNCDVVIGIVNNTVYDPLQPELDSFKEELDKYFKNHTSPDVDLGDISGINASVVNIQKEIDRLNEVAKNLNESLIDLQELGKYEQYIKWPWYIWLGFIAGLIAIVMVTIMLCCMTSCCSCLKGCCSCGSCCKFDEDDSEPVLKGVKLHYT

SEQ ID NO: 1086 - protein, 1273 aa, Artificial Sequence
  SARS-CoV-2/Germany/BavPat1/2020__EPI_ISL_406862 spike protein (1-1273)(A972C_R995C)
MFVFLVLLPLVSSQCVNLTTRTQLPPAYTNSFTRGVYYPDKVFRSSVLHSTQDLFLPFFSNVTWFHAIHVSGTNGTKRFDNPVLPFNDGVYFASTEKSNIIRGWIFGTTLDSKTQSLLIVNNATNVVIKVCEFQFCNDPFLGVYYHKNNKSWMESEFRVYSSANNCTFEYVSQPFLMDLEGKQGNFKNLREFVFKNIDGYFKIYSKHTPINLVRDLPQGFSALEPLVDLPIGINITRFQTLLALHRSYLTPGDSSSGWTAGAAAYYVGYLQPRTFLLKYNENGTITDAVDCALDPLSETKCTLKSFTVEKGIYQTSNFRVQPTESIVRFPNITNLCPFGEVFNATRFASVYAWNRKRISNCVADYSVLYNSASFSTFKCYGVSPTKLNDLCFTNVYADSFVIRGDEVRQIAPGQTGKIADYNYKLPDDFTGCVIAWNSNNLDSKVGGNYNYLYRLFRKSNLKPFERDISTEIYQAGSTPCNGVEGFNCYFPLQSYGFQPTNGVGYQPYRVVVLSFELLHAPATVCGPKKSTNLVKNKCVNFNFNGLTGTGVLTESNKKFLPFQQFGRDIADTTDAVRDPQTLEILDITPCSFGGVSVITPGTNTSNQVAVLYQGVNCTEVPVAIHADQLTPTWRVYSTGSNVFQTRAGCLIGAEHVNNSYECDIPIGAGICASYQTQTNSPRRARSVASQSIIAYTMSLGAENSVAYSNNSIAIPTNFTISVTTEILPVSMTKTSVDCTMYICGDSTECSNLLLQYGSFCTQLNRALTGIAVEQDKNTQEVFAQVKQIYKTPPIKDFGGFNFSQILPDPSKPSKRSFIEDLLFNKVTLADAGFIKQYGDCLGDIAARDLICAQKFNGLTVLPPLLTDEMIAQYTSALLAGTITSGWTFGAGAALQIPFAMQMAYRFNGIGVTQNVLYENQKLIANQFNSAIGKIQDSLSSTASALGKLQDVVNQNAQALNTLVKQLSSNFGCISSVLNDILSRLDKVEAEVQIDCLITGRLQSLQTYVTQQLIRAAEIRASANLAATKMSECVLGQSKRVDFCGKGYHLMSFPQSAPHGVVFLHVTYVPAQEKNFTTAPAICHDGKAHFPREGVFVSNGTHWFVTQRNFYEPQIITTDNTFVSGNCDVVIGIVNNTVYDPLQPELDSFKEELDKYFKNHTSPDVDLGDISGINASVVNIQKEIDRLNEVAKNLNESLIDLQELGKYEQYIKWPWYIWLGFIAGLIAIVMVTIMLCCMTSCCSCLKGCCSCGSCCKFDEDDSEPVLKGVKLHYT

SEQ ID NO: 1087 - protein, 1273 aa, Artificial Sequence
  SARS-CoV-2/Wuhan/HBCDC-HB-02/2020__EPI_ISL_412978 spike protein (1-1273)(A972C_R995C)
MFVFLVLLPLVSSQCVNLTTRTQLPPAYTNSFTRGVYYPDKVFRSSVLHSTQDLFLPFFSNVTWFHAIHVSGTNGTKRFDNPVLPFNDGVYFASTEKSNIIRGWIFGTTLDSKTQSLLIVNNATNVVIKVCEFQFCNDPFLGVYYHKNNKSWMESEFRVYSSANNCTFEYVSQPFLMDLEGKQGNFKNLREFVFKNIDGYFKIYSKHTPINLVRDLPQGFSALEPLVDLPIGINITRFQTLLALHRSYLTPGDSSSGWTAGAAAYYVGYLQPRTFLLKYNENGTITDAVDCALDPLSETKCTLKSFTVEKGIYQTSNFRVQPTESIVRFPNITNLCPFGEVFNATRFASVYAWNRKRISNCVADYSVLYNSASFSTFKCYGVSPTKLNDLCFTNVYADSFVIRGDEVRQIAPGQTGKIADYNYKLPDDFTGCVIAWNSNNLDSKVGGNYNYLYRLFRKSNLKPFERDISTEIYQAGSTPCNGVEGFNCYFPLQSYGFQPTNGVGYQPYRVVVLSFELLHAPATVCGPKKSTNLVKNKCVNFNFNGLTGTGVLTESNKKFLPFQQFGRDIADTTDAVRDPQTLEILDITPCSFGGVSVITPGTNTSNQVAVLYQDVNCTEVPVAIHADQLTPTWRVYSTGSNVFQTRAGCLIGAEHVNNSYECDIPIGAGICASYQTQTNSPRRARSVASQSIIAYTMSLGAENSVAYSNNSIAIPTNFTISVTTEILPVSMTKTSVDCTMYICGDSTECSNFLLQYGSFCTQLNRALTGIAVEQDKNTQEVFAQVKQIYKTPPIKDFGGFNFSQILPDPSKPSKRSFIEDLLFNKVTLADAGFIKQYGDCLGDIAARDLICAQKFNGLTVLPPLLTDEMIAQYTSALLAGTITSGWTFGAGAALQIPFAMQMAYRFNGIGVTQNVLYENQKLIANQFNSAIGKIQDSLSSTASALGKLQDVVNQNAQALNTLVKQLSSNFGCISSVLNDILSRLDKVEAEVQIDCLITGRLQSLQTYVTQQLIRAAEIRASANLAATKMSECVLGQSKRVDFCGKGYHLMSFPQSAPHGVVFLHVTYVPAQEKNFTTAPAICHDGKAHFPREGVFVSNGTHWFVTQRNFYEPQIITTDNTFVSGNCDVVIGIVNNTVYDPLQPELDSFKEELDKYFKNHTSPDVDLGDISGINASVVNIQKEIDRLNEVAKNLNESLIDLQELGKYEQYIKWPWYIWLGFIAGLIAIVMVTIMLCCMTSCCSCLKGCCSCGSCCKFDEDDSEPVLKGVKLHYT

SEQ ID NO: 1088 - protein, 1273 aa, Artificial Sequence
  SARS-CoV-2/Australia/QLD02/2020__EPI_ISL_407896 spike protein (1-1273)(A972C_R995C)
MFVFLVLLPLVSSQCVNLTTRTQLPPAYTNSFTRGVYYPDKVFRSSVLHSTQDLFLPFFSNVTWFHAIHVSGTNGTKRFDNPVLPFNDGVYFASTEKSNIIRGWIFGTTLDSKTQSLLIVNNATNVVIKVCEFQFCNDPFLGVYYHKNNKSWMESEFRVYSSANNCTFEYVSQPFLMDLEGKQGNFKNLREFVFKNIDGYFKIYSKHTPINLVRDLPQGFSALEPLVDLPIGINITRFQTLLALHRSYLTPGDSSSGWTAGAAAYYVGYLQPRTFLLKYNENGTITDAVDCALDPLSETKCTLKSFTVEKGIYQTSNFRVQPTESIVRFPNITNLCPFGEVFNATRFASVYAWNRKRISNCVADYSVLYNSASFSTFKCYGVSPTKLNDLCFTNVYADSFVIRGDEVRQIAPGQTGKIADYNYKLPDDFTGCVIAWNSNNLDSKVGGNYNYLYRLFRKSNLKPFERDISTEIYQAGSTPCNGVEGFNCYFPLQSYGFQPTNGVGYQPYRVVVLSFELLHAPATVCGPKKSTNLVKNKCVNFNFNGLTGTGVLTESNKKFLPFQQFGRDIADTTDAVRDPQTLEILDITPCSFGGVSVITPGTNTSNQVAVLYQDVNCTEVPVAIHADQLTPTWRVYSTGSNVFQTRAGCLIGAEHVNNSYECDIPIGAGICASYQTQTNSPRRARSVASQSIIAYTMSLGAENSVAYSNNSIAIPTNFTISVTTEILPVSMTKTSVDCTMYICGDSTECSNLLLQYGSFCTQLNRALTGIAVEQDKNTQEVFAQVKQIYKTPPIKDFGGFNFSQILPDPSKPSKRSFIEDLLFNKVTLADAGFIKQYGDCLGDIAARDLICAQKFNGLTVLPPLLTDEMIAQYTSALLAGTITSGWTFGAGAALQIPFAMQMAYRFNGIGVTQNVLYENQKLIANQFNSAIGKIQDSLSSTASALGKLQDVVNQNAQALNTLVKQLSSNFGCISSVLNDILSRLDKVEAEVQIDCLITGRLQSLQTYVTQQLIRAAEIRASANLAATKMSECVLGQSKRVDFCGKGYHLMSFPQSAPHGVVFLHVTYVPAQEKNFTTAPAICHDGKAHFPREGVFVSNGTHWFVTQRNFYEPQIITTDNTFVSGNCDVVIGIVNNTVYDPLQLELDSFKEELDKYFKNHTSPDVDLGDISGINASVVNIQKEIDRLNEVAKNLNESLIDLQELGKYEQYIKWPWYIWLGFIAGLIAIVMVTIMLCCMTSCCSCLKGCCSCGSCCKFDEDDSEPVLKGVKLHYT

SEQ ID NO: 1089 - protein, 1273 aa, Artificial Sequence
  SARS-CoV-2/India/1-31/2020__EPI_ISL_413523 spike protein (1-1273)(A972C_R995C)
MFVFLVLLPLVSSQCVNLTTRTQLPPAYTNSFTRGVYYPDKVFRSSVLHSTQDLFLPFFSNVTWFHAIHVSGTNGTKRFDNPVLPFNDGVYFASTEKSNIIRGWIFGTTLDSKTQSLLIVNNATNVVIKVCEFQFCNDPFLGVYYHKNNKSWMESEFRVYSSANNCTFEYVSQPFLMDLEGKQGNFKNLREFVFKNIDGYFKIYSKHTPINLVRDLPQGFSALEPLVDLPIGINITRFQTLLALHRSYLTPGDSSSGWTAGAAAYYVGYLQPRTFLLKYNENGTITDAVDCALDPLSETKCTLKSFTVEKGIYQTSNFRVQPTESIVRFPNITNLCPFGEVFNATRFASVYAWNRKRISNCVADYSVLYNSASFSTFKCYGVSPTKLNDLCFTNVYADSFVIRGDEVRQIAPGQTGKIADYNYKLPDDFTGCVIAWNSNNLDSKVGGNYNYLYRLFRKSNLKPFERDISTEIYQAGSTPCNGVEGFNCYFPLQSYGFQPTNGVGYQPYRVVVLSFELLHAPATVCGPKKSTNLVKNKCVNFNFNGLTGTGVLTESNKKFLPFQQFGRDIADTTDAVRDPQTLEILDITPCSFGGVSVITPGTNTSNQVAVLYQDVNCTEVPVAIHADQLTPTWRVYSTGSNVFQTRAGCLIGAEHVNNSYECDIPIGAGICASYQTQTNSPRRARSVASQSIIAYTMSLGAENSVAYSNNSIAIPTNFTISVTTEILPVSMTKTSVDCTMYICGDSTECSNLLLQYGSFCTQLNRALTGIAVEQDKNTQEVFAQVKQIYKTPPIKDFGGFNFSQILPDPSKPSKRSFIEDLLFNKVTLADAGFIKQYGDCLGDIAARDLICAQKFNGLTVLPPLLTDEMIAQYTSALLAGTITSGWTFGAGAALQIPFAMQMAYRFNGIGVTQNVLYENQKLIANQFNSVIGKIQDSLSSTASALGKLQDVVNQNAQALNTLVKQLSSNFGCISSVLNDILSRLDKVEAEVQIDCLITGRLQSLQTYVTQQLIRAAEIRASANLAATKMSECVLGQSKRVDFCGKGYHLMSFPQSAPHGVVFLHVTYVPAQEKNFTTAPAICHDGKAHFPREGVFVSNGTHWFVTQRNFYEPQIITTDNTFVSGNCDVVIGIVNNTVYDPLQPELDSFKEELDKYFKNHTSPDVDLGDISGINASVVNIQKEIDRLNEVAKNLNESLIDLQELGKYEQYIKWPWYIWLGFIAGLIAIVMVTIMLCCMTSCCSCLKGCCSCGSCCKFDEDDSEPVLKGVKLHYT

SEQ ID NO: 1090 - protein, 1273 aa, Artificial Sequence
  SARS-CoV-2/Guangdong/GD2020087-P0008/2020__EPI_ISL_413863 spike protein (1-1273)(A972C_R995C)
MFVFLVLLPLVSSQCVNLTTRTQLPPAYTNSFTRGVYYPDKVFRSSVLHSTQDLFLPFFSNVTWFHAIHVSGTNGTKRFDNPVLPFNDGVYFASTEKSNIIRGWIFGTTLDSKTQSLLIVNNATNVVIKVCEFQFCNDPFLGVYYHKNNKSWMESEFRVYSSANNCTFEYVSQPFLMDLEGKQGNFKNLREFVFKNIDGYFKIYSKHTPINLVRDLPQGFSALEPLVDLPIGINITRFQTLLALHRSYLTPGDSSSGWTAGAAAYYVGYLQPRTFLLKYNENGTITDAVDCALDPLSETKCTLKSFTVEKGIYQTSNFRVQPTESIVRFPNITNLCPFGEVFNATRFASVYAWNRKRISNCVADYSVLYNSASFSTFKCYGVSPTKLNDLCFTNVYADSFVIRGDEVREIAPGQTGKIADYNYKLPDDFTGCVIAWNSNNLDSKVGGNYNYLYRLFRKSNLKPFERDISTEIYQAGSTPCNGVEGFNCYFPLQSYGFQPTNGVGYQPYRVVVLSFELLHAPATVCGPKKSTNLVKNKCVNFNFNGLTGTGVLTESNKKFLPFQQFGRDIADTTDAVRDPQTLEILDITPCSFGGVSVITPGTNTSNQVAVLYQDVNCTEVPVAIHADQLTPTWRVYSTGSNVFQTRAGCLIGAEHVNNSYECDIPIGAGICASYQTQTNSPRRARSVASQSIIAYTMSLGAENSVAYSNNSIAIPTNFTISVTTEILPVSMTKTSVDCTMYICGDSTECSNLLLQYGSFCTQLNRALTGIAVEQDKNTQEVFAQVKQIYKTPPIKDFGGFNFSQILPDPSKPSKRSFIEDLLFNKVTLADAGFIKQYGDCLGDIAARDLICAQKFNGLTVLPPLLTDEMIAQYTSALLAGTITSGWTFGAGAALQIPFAMQMAYRFNGIGVTQNVLYENQKLIANQFNSAIGKIQDSLSSTASALGKLQDVVNQNAQALNTLVKQLSSNFGCISSVLNDILSRLDKVEAEVQIDCLITGRLQSLQTYVTQQLIRAAEIRASANLAATKMSECVLGQSKRVDFCGKGYHLMSFPQSAPHGVVFLHVTYVPAQEKNFTTAPAICHDGKAHFPREGVFVSNGTHWFVTQRNFYEPQIITTDNTFVSGNCDVVIGIVNNTVYDPLQPELDSFKEELDKYFKNHTSPDVDLGDISGINASVVNIQKEIDRLNEVAKNLNESLIDLQELGKYEQYIKWPWYIWLGFIAGLIAIVMVTIMLCCMTSCCSCLKGCCSCGSCCKFDEDDSEPVLKGVKLHYT

SEQ ID NO: 1091 - protein, 1273 aa, Artificial Sequence
  SARS-CoV-2/Sweden/01/2020__EPI_ISL_411951 spike protein (1-1273)(A972C_R995C)
MFVFLVLLPLVSSQCVNLTTRTQLPPAYTNSFTRGVYYPDKVFRSSVLHSTQDLFLPFFSNVTWFHAIHVSGTNGTKRFDNPVLPFNDGVYFASTEKSNIIRGWIFGTTLDSKTQSLLIVNNATNVVIKVCEFQFCNDPFLGVYYHKNNKSWMESEFRVYSSANNCTFEYVSQPFLMDLEGKQGNFKNLREFVFKNIDGYFKIYSKHTPINLVRDLPQGFSALEPLVDLPIGINITRFQTLLALHRSYLTPGDSSSGWTAGAAAYYVGYLQPRTFLLKYNENGTITDAVDCALDPLSETKCTLKSFTVEKGIYQTSNFRVQPTESIVRFPNITNLCPFGEVFNATRFASVYAWNRKRISNCVADYSVLYNSASFSTFKCYGVSPTKLNDLCFTNVYADSFVIRGDEVRQIAPGQTGKIADYNYKLPDDFTGCVIAWNSNNLDSKVGGNYNYLYRLFRKSNLKPFERDISTEIYQAGSTPCNGVEGFNCYFPLQSYGFQPTNGVGYQPYRVVVLSFELLHAPATVCGPKKSTNLVKNKCVNFNFNGLTGTGVLTESNKKFLPFQQFGRDIADTTDAVRDPQTLEILDITPCSFGGVSVITPGTNTSNQVAVLYQDVNCTEVPVAIHADQLTPTWRVYSTGSNVFQTRAGCLIGAEHVNNSYECDIPIGAGICASYQTQTNSPRRARSVASQSIIAYTMSLGAENSVAYSNNSIAIPTNFTISVTTEILPVSMTKTSVDCTMYICGDSTECSNLLLQYGSFCTQLNRALTGIAVEQDKNTQEVFAQVKQIYKTPPIKDCGGFNFSQILPDPSKPSKRSFIEDLLFNKVTLADAGFIKQYGDCLGDIAARDLICAQKFNGLTVLPPLLTDEMIAQYTSALLAGTITSGWTFGAGAALQIPFAMQMAYRFNGIGVTQNVLYENQKLIANQFNSAIGKIQDSLSSTASALGKLQDVVNQNAQALNTLVKQLSSNFGCISSVLNDILSRLDKVEAEVQIDCLITGRLQSLQTYVTQQLIRAAEIRASANLAATKMSECVLGQSKRVDFCGKGYHLMSFPQSAPHGVVFLHVTYVPAQEKNFTTAPAICHDGKAHFPREGVFVSNGTHWFVTQRNFYEPQIITTDNTFVSGNCDVVIGIVNNTVYDPLQPELDSFKEELDKYFKNHTSPDVDLGDISGINASVVNIQKEIDRLNEVAKNLNESLIDLQELGKYEQYIKWPWYIWLGFIAGLIAIVMVTIMLCCMTSCCSCLKGCCSCGSCCKFDEDDSEPVLKGVKLHYT

SEQ ID NO: 1092 - protein, 1273 aa, Artificial Sequence
  SARS-CoV-2/Tianmen/HBCDC-HB-07/2020__EPI_ISL_412983 spike protein (1-1273)(A972C_R995C)
MFVFLVLLPLVSSQCVNLTTRTQLPPAYTNSFTRGVYYPDKVFRSSVLHSTQDLFLPFFSNVTWFHAIHVSGTNGTKRFDNPVLPFNDGVYFASTEKSNIIRGWIFGTTLDSKTQSLLIVNNATNVVIKVCEFQFCNDPFLGVYYHKNNKSWMESEFRVYSSANNCTFEYVSQPFLMDLEGKQGNFKNLREFVFKNIDGYFKIYSKHTPINLVRDLPQGFSALEPLVDLPIGINITRFQTLLALHRSYLTPGDSSSGWTAGAAAYYVGYLQPRTFLLKYNENGTITDAVDCALDPLSETKCTLKSFTVEKGIYQTSNFRVQPTESIVRFPNITNLCPFGEVFNATRFASVYAWNRKRISNCVADYSVLYNSASFSTFKCYGVSPTKLNDLCFTNVYADSFVIRGDEVRQIAPGQTGKIADYNYKLPDDFTGCVIAWNSNNLDSKVGGNYNYLYRLFRKSNLKPFERDISTEIYQAGSTPCNGVEGFNCYFPLQSYGFQPTNGVGYQPYRVVVLSFELLHAPATVCGPKKSTNLVKNKCVNFNFNGLTGTGVLTESNKKFLPFQQFGRDIADTTDAVRDPQTLEILDITPCSFGGVSVITPGTNTSNQVAVLYQDLNCTEVPVAIHADQLTPTWRVYSTGSNVFQTRAGCLIGAEHVNNSYECDIPIGAGICASYQTQTNSPRRARSVASQSIIAYTMSLGAENSVAYSNNSIAIPTNFTISVTTEILPVSMTKTSVDCTMYICGDSTECSNLLLQYGSFCTQLNRALTGIAVEQDKNTQEVFAQVKQIYKTPPIKDFGGFNFSQILPDPSKPSKRSFIEDLLFNKVTLADAGFIKQYGDCLGDIAARDLICAQKFNGLTVLPPLLTDEMIAQYTSALLAGTITSGWTFGAGAALQIPFAMQMAYRFNGIGVTQNVLYENQKLIANQFNSAIGKIQDSLSSTASALGKLQDVVNQNAQALNTLVKQLSSNFGCISSVLNDILSRLDKVEAEVQIDCLITGRLQSLQTYVTQQLIRAAEIRASANLAATKMSECVLGQSKRVDFCGKGYHLMSFPQSAPHGVVFLHVTYVPAQEKNFTTAPAICHDGKAHFPREGVFVSNGTHWFVTQRNFYEPQIITTDNTFVSGNCDVVIGIVNNTVYDPLQPELDSFKEELDKYFKNHTSPDVDLGDISGINASVVNIQKEIDRLNEVAKNLNESLIDLQELGKYEQYIKWPWYIWLGFIAGLIAIVMVTIMLCCMTSCCSCLKGCCSCGSCCKFDEDDSEPVLKGVKLHYT

SEQ ID NO: 1093 - protein, 1273 aa, Artificial Sequence
  SARS-CoV-2/Hong Kong/case42_VM20002493/2020__EPI_ISL_414527 spike protein (1-1273)(A972C_R995C)
MFVFLVLLPLVSSQCVNLTTRTQLPPAYTNSFTRGVYYPDKVFRSSVLHSTQDLFLPFFSNVTWFHAIHVSGTNGTKRFDNPVLPFNDGVYFASTEKSNIIRGWIFGTTLDSKTQSLLIVNNATNVVIKVCEFQFCNDPFLGVYYHKNNKSWMESEFRVYSSANNCTFEYVSQPFLMDLEGKQGNFKNLREFVFKNIDGYFKIYSKHTPINLVRDLPQGFSALEPLVDLPIGINITRFQTLLALHRSYLTPGDSSSGWTAGAAAYYVGYLQPRTFLLKYNENGTITDAVDCALDPLSETKCTLKSFTVEKGIYQTSNFRVQPTESIVRFPNITNLCPFGEVFNATRFASVYAWNRKRISNCVADYSVLYNSASFSTFKCYGVSPTKLNDLCFTNVYADSFVIRGDEVRQIAPGQTGKIADYNYKLPDDFTGCVIAWNSNNLDSKVGGNYNYLYRLFRKSNLKPFERDISTEIYQAGSTPCNGVEGFNCYFPLQSYGFQPTNGVGYQPYRVVVLSFELLHAPATVCGPKKSTNLVKNKCVNFNFNGLTGTGVLTESNKKFLPFQQFGRDIADTTDAVRDPQTLEILDITPCSFGGVSVITPGTNTSNQVAVLYQDVNCTEVPVAIHADQLTPTWRVYSTGSNVFQTRAGCLIGAEHVNNSYECDIPIGAGICASYQTQTNSPRRARSVASQSIIAYTMSLGAENSVAYSNNSIAIPTNFAISVTTEILPVSMTKTSVDCTMYICGDSTECSNLLLQYGSFCTQLNRALTGIAVEQDKNTQEVFAQVKQIYKTPPIKDFGGFNFSQILPDPSKPSKRSFIEDLLFNKVTLADAGFIKQYGDCLGDIAARDLICAQKFNGLTVLPPLLTDEMIAQYTSALLAGTITSGWTFGAGAALQIPFAMQMAYRFNGIGVTQNVLYENQKLIANQFNSAIGKIQDSLSSTASALGKLQDVVNQNAQALNTLVKQLSSNFGCISSVLNDILSRLDKVEAEVQIDCLITGRLQSLQTYVTQQLIRAAEIRASANLAATKMSECVLGQSKRVDFCGKGYHLMSFPQSAPHGVVFLHVTYVPAQEKNFTTAPAICHDGKAHFPREGVFVSNGTHWFVTQRNFYEPQIITTDNTFVSGNCDVVIGIVNNTVYDPLQPELDSFKEELDKYFKNHTSPDVDLGDISGINASVVNIQKEIDRLNEVAKNLNESLIDLQELGKYEQYIKWPWYIWLGFIAGLIAIVMVTIMLCCMTSCCSCLKGCCSCGSCCKFDEDDSEPVLKGVKLHYT

SEQ ID NO: 1094 - protein, 1273 aa, Artificial Sequence
  SARS-CoV-2/USA/CruiseA-23/2020__EPI_ISL_414482 spike protein (1-1273)(A972C_R995C)
MFVFLVLLPLVSSQCVNLTTRTQLPPAYTNSFTRGVYYPDKVFRSSVLHSTQDLFLPFFSNVTWFHAIHVSGTNGTKRFDNPVLPFNDGVYFASTEKSNIIRGWIFGTTLDSKTQSLLIVNNATNVVIKVCEFQFCNDPFLGVYYHKNNKSWMESEFRVYSSANNCTFEYVSQPFLMDLEVKQGNFKNLREFVFKNIDGYFKIYSKHTPINLVRDLPQGFSALEPLVDLPIGINITRFQTLLALHRSYLTPGDSSSGWTAGAAAYYVGYLQPRTFLLKYNENGTITDAVDCALDPLSETKCTLKSFTVEKGIYQTSNFRVQPTESIVRFPNITNLCPFGEVFNATRFASVYAWNRKRISNCVADYSVLYNSASFSTFKCYGVSPTKLNDLCFTNVYADSFVIRGDEVRQIAPGQTGKIADYNYKLPDDFTGCVIAWNSNNLDSKVGGNYNYLYRLFRKSNLKPFERDISTEIYQAGSTPCNGVEGFNCYFPLQSYGFQPTNGVGYQPYRVVVLSFELLHAPATVCGPKKSTNLVKNKCVNFNFNGLTGTGVLTESNKKFLPFQQFGRDIADTTDAVRDPQTLEILDITPCSFGGVSVITPGTNTSNQVAVLYQDVNCTEVPVAIHADQLTPTWRVYSTGSNVFQTRAGCLIGAEHVNNSYECDIPIGAGICASYQTQTNSPRRARSVASQSIIAYTMSLGAENSVAYSNNSIAIPTNFTISVTTEILPVSMTKTSVDCTMYICGDSTECSNLLLQYGSFCTQLNRALTGIAVEQDKNTQEVFAQVKQIYKTPPIKDFGGFNFSQILPDPSKPSKRSFIEDLLFNKVTLADAGFIKQYGDCLGDIAARDLICAQKFNGLTVLPPLLTDEMIAQYTSALLAGTITSGWTFGAGAALQIPFAMQMAYRFNGIGVTQNVLYENQKLIANQFNSAIGKIQDSLSSTASALGKLQDVVNQNAQALNTLVKQLSSNFGCISSVLNDILSRLDKVEAEVQIDCLITGRLQSLQTYVTQQLIRAAEIRASANLAATKMSECVLGQSKRVDFCGKGYHLMSFPQSAPHGVVFLHVTYVPAQEKNFTTAPAICHDGKAHFPREGVFVSNGTHWFVTQRNFYEPQIITTDNTFVSGNCDVVIGIVNNTVYDPLQPELDSFKEELDKYFKNHTSPDVDLGDISGINASVVNIQKEIDRLNEVAKNLNESLIDLQELGKYEQYIKWPWYIWLGFIAGLIAIVMVTIMLCCMTSCCSCLKGCCSCGSCCKFDEDDSEPVLKGVKLHYT

SEQ ID NO: 1095 - protein, 1273 aa, Artificial Sequence
  SARS-CoV-2/Hong Kong/case85_VM20002868/2020__EPI_ISL_414519 spike protein (1-1273)(A972C_R995C)
MFVFLVLVPLVSSQCVNLTTRTQLPPAYTNSFTRGVYYPDKVFRSSVLHSTQDLFLPFFSNVTWFHAIHVSGTNGTKRFDNPVLPFNDGVYFASTEKSNIIRGWIFGTTLDSKTQSLLIVNNATNVVIKVCEFQFCNDPFLGVYYHKNNKSWMESEFRVYSSANNCTFEYVSQPFLMDLEGKQGNFKNLREFVFKNIDGYFKIYSKHTPINLVRDLPQGFSALEPLVDLPIGINITRFQTLLALHRSYLTPGDSSSGWTAGAAAYYVGYLQPRTFLLKYNENGTITDAVDCALDPLSETKCTLKSFTVEKGIYQTSNFRVQPTESIVRFPNITNLCPFGEVFNATRFASVYAWNRKRISNCVADYSVLYNSASFSTFKCYGVSPTKLNDLCFTNVYADSFVIRGDEVRQIAPGQTGKIADYNYKLPDDFTGCVIAWNSNNLDSKVGGNYNYLYRLFRKSNLKPFERDISTEIYQAGSTPCNGVEGFNCYFPLQSYGFQPTNGVGYQPYRVVVLSFELLHAPATVCGPKKSTNLVKNKCVNFNFNGLTGTGVLTESNKKFLPFQQFGRDIADTTDAVRDPQTLEILDITPCSFGGVSVITPGTNTSNQVAVLYQDVNCTEVPVAIHADQLTPTWRVYSTGSNVFQTRAGCLIGAEHVNNSYECDIPIGAGICASYQTQTNSPRRARSVASQSIIAYTMSLGAENSVAYSNNSIAIPTNFTISVTTEILPVSMTKTSVDCTMYICGDSTECSNLLLQYGSFCTQLNRALTGIAVEQDKNTQEVFAQVKQIYKTPPIKDFGGFNFSQILPDPSKPSKRSFIEDLLFNKVTLADAGFIKQYGDCLGDIAARDLICAQKFNGLTVLPPLLTDEMIAQYTSALLAGTITSGWTFGAGAALQIPFAMQMAYRFNGIGVTQNVLYENQKLIANQFNSAIGKIQDSLSSTASALGKLQDVVNQNAQALNTLVKQLSSNFGCISSVLNDILSRLDKVEAEVQIDCLITGRLQSLQTYVTQQLIRAAEIRASANLAATKMSECVLGQSKRVDFCGKGYHLMSFPQSAPHGVVFLHVTYVPAQEKNFTTAPAICHDGKAHFPREGVFVSNGTHWFVTQRNFYEPQIITTDNTFVSGNCDVVIGIVNNTVYDPLQPELDSFKEELDKYFKNHTSPDVDLGDISGINASVVNIQKEIDRLNEVAKNLNESLIDLQELGKYEQYIKWPWYIWLGFIAGLIAIVMVTIMLCCMTSCCSCLKGCCSCGSCCKFDEDDSEPVLKGVKLHYT

SEQ ID NO: 1096 - protein, 1273 aa, Artificial Sequence
  SARS-CoV-2/England/200990660/2020__EPI_ISL_414523 spike protein (1-1273)(A972C_R995C)
MFVFLVLLPLVSSQCVNLTTRTQLPPAYTNSFTRGVYYPDKVFRSSVLHSTQDLFLPFFSNVTWFHAIHVSGTNGTKRFDNPVLPFNDGVYFASTEKSNIIRGWIFGTTLDSKTQSLLIVNNATNVVIKVCEFQFCNDPFLGVYYHKNNKSWMESEFRVYSSANNCTFEYVSQPFLMDLEGKQGNFKNLREFVFKNIDGYFKIYSKHTPINLVRDLPQGFSALEPLVDLPIGINITRFQTLLALHRSYLTPGDSSSGWTAGAAAYYVGYLQPRTFLLKYNENGTITDAVDCALDPLSETKCTLKSFTVEKGIYQTSNFRVQPTESIVRFPNITNLCPFGEVFNATRFASVYAWNRKRISNCVADYSVLYNSASFSTFKCYGVSPTKLNDLCFTNVYADSFVIRGDEVRQIAPGQTGKIADYNYKLPDDFTGCVIAWNSNNLDSKVGGNYNYLYRLFRKSNLKPFERDISTEIYQAGSTPCNGVEGFNCYFPLQSYGFQPTNGVGYQPYRVVVLSFELLHAPATVCGPKKSTNLVKNKCVNFNFNGLTGTGVLTESNKKFLPFQQFGRDIADTTDAVRDPQTLEILDITPCSFGGVSVITPGTNTSNQVAVLYQGVNCTEVPVAIHADQLTPTWRVYSTGSNVFQTRAGCLIGAEHVNNSYECDIPIGAGICASYQTQTNSPRRARSVASQSIIAYTMSLGAENSVAYSNNSIAIPTNFTISVTTEILPVSMTKTSVDCTMYICGDSTECSNLLLQYGSFCTQLNRALTGIAVEQDKNTQEVFAQVKQIYKTPPIKDFGGFNFSQILPDPSKPSKRSFIEDLLFNKVTLADAGFIKQYGDCLGDIAARDLICAQKFNGLTVLPPLLTDEMIAQYTSALLAGTITSGWTFGAGAALQIPFAMQMAYRFNGIGVTQNVLYENQKLIANQFNSAIGKIQDSLSSTASALGKLQDVVNQNAQALNTLVKQLSSNFGCISSVLNDILSRLDKVEAEVQIDCLITGRLQSLQTYVTQQLIRAAEIRASANLAATKMSECVLGQSKRVDFCGKGYHLMSFPQSAPHGVVFLHVTYVPAQEKNFTTAPAICHDGKAHFPREGVFVSNGTHWFVTQRNFYEPQIITTDNTFVSGNCDVVIGIVNNTVYDPLQPELDSFKEELDKYFKNHTSPDVDLGDISGINASVVNIQKEIDRLNEVAKNLNESLIDLQELGKYEQYIKWPWYIWLGFIAGLIAIVMVTIMLCCMTSCCSCLKGCCSCGSCCKFDEDDSELVLKGVKLHYT

SEQ ID NO: 1097 - protein, 1273 aa, Artificial Sequence
  SARS-CoV-2/Australia/NSW09/2020__EPI_ISL_413595 spike protein (1-1273)(A972C_R995C)
MFVFLVLLPLVSSQCVNLTTRTQLPPAYTNSFTRGVYYPDKVFRSSVLHSTQDLFLPFFSNVTWFHAIHVSGTNGTKRFDNPVLPFNDGVYFASTEKSNIIRGWIFGTTLDSKTQSLLIVNNATNVVIKVCEFQFCNDPFLGVYYHKNNKSWMESEFRVYSSANNCTFEYVSQPFLMDLEGKQGNFKNLREFVFKNIDGYFKIYSKHTPINLVRDLPQGFSALEPLVDLPIGINITRFQTLLALHRSYLTPGDSSSGWTAGAAAYYVGYLQPRTFLLKYNENGTITDAVDCALDPLSETKCTLKSFTVEKGIYQTSNFRVQPTESIVRFPNITNLCPFGEVFNATRFASVYAWNRKRISNCVADYSVLYNSASFSTFKCYGVSPTKLNDLCFTNVYADSFVIRGDEVRQIAPGQTGKIADYNYKLPDDFTGCVIAWNSNNLDSKVGGNYNYLYRLFRKSNLKPFERDISTEIYQAGSTPCNGVEGFNCYFPLQSYGFQPTNGVGYQPYRVVVLSFELLHAPATVCGPKKSTNLVKNKCVNFNFNGLTGTGVLTESNKKFLPFQQFGRDIADTTDAVRDPQTLEILDITPCSFGGVSVITPGTNTSNQVAVLYQDVNCTEVPVAIHADQLTPTWRVYSTGSNVFQTRAGCLIGAEHVNNSYECDIPIGAGICASYQTQTNSPRRARSVASQSIIAYTMSLGAENSVAYSNNSIAIPTNFTISVTTEILPVSMTKTSVDCTMYICGDSTECSNLLLQYGSFCTQLNRALTGIAVEQDKNTQEVFAQVKQIYKTPPIKDFGGFNFSQILPDPSKPSKRSFIEDLLFNKVTLADAGFIKQYGDCLGDIAARDLICAQKFNGLTVLPPLLTDEMIAQYTSALLAGTITSGWTFGAGAALQIPFAMQMAYRFNGIGVTQNVLYENQKLIANQFNSAIGKIQDSLSFTASALGKLQDVVNQNAQALNTLVKQLSSNFGCISSVLNDILSRLDKVEAEVQIDCLITGRLQSLQTYVTQQLIRAAEIRASANLAATKMSECVLGQSKRVDFCGKGYHLMSFPQSAPHGVVFLHVTYVPAQEKNFTTAPAICHDGKAHFPREGVFVSNGTHWFVTQRNFYEPQIITTDNTFVSGNCDVVIGIVNNTVYDPLQPELDSFKEELDKYFKNHTSPDVDLGDISGINASVVNIQKEIDRLNEVAKNLNESLIDLQELGKYEQYIKWPWYIWLGFIAGLIAIVMVTIMLCCMTSCCSCLKGCCSCGSCCKFDEDDSEPVLKGVKLHYT

SEQ ID NO: 1098 - protein, 1273 aa, Artificial Sequence
  SARS-CoV-2/Australia/NSW10/2020__EPI_ISL_413596 spike protein (1-1273)(A972C_R995C)
MFVFLVLLPLVSSQCVNLTTRTQLPPAYTNSFTRGVYYPDKVFRSSVLHSTQDLFLPFFSNVTWFHAIHVSGTNGTKRFDNPVLPFNDGVYFASTEKSNIIRGWIFGTTLDSKTQSLLIVNNATNVVIKVCEFQFCNDPFLGVYYHKNNKSWMESEFRVYSSANNCTFEYVSQPFLMDLEGKQGNFKNLREFVFKNIDGYFKIYSKHTPINLVRDLPQGFSALEPLVDLPIGINITRFQTLLALHRSYLTPGDSSSGWTAGAAAYYVGYLQPRTFLLKYNENGTITDAVDCALDPLSETKCTLKSFTVEKGIYQTSNFRVQPTESIVRFPNITNLCPFGEVFNATRFASVYAWNRKRISNCVADYSVLYNSASFSTFKCYGVSPTKLNDLCFTNVYADSFVIRGDEVRQIAPGQTGKIADYNYKLPDDFTGCVIAWNSNNLDSKVGGNYNYLYRLFRKSNLKPFERDISTEIYQAGSTPCNGVEGFNCYFPLQSYGFQPTNGVGYQPYRVVVLSFELLHAPATVCGPKKSTNLVKNKCVNFNFNGLTGTGVLTESNKKFLPFQQFGRDIADTTDAVRDPQTLEILDITPCSFGGVSVITPGTNTSNQVAVLYQDVNCTEVPVAIHADQLTPTWRVYSTGSNVFQTRAGCLIGAEHVNNSYECDIPIGAGICASYQTQTNSPRRARSVASQSIIAYTMSLGAENSVAYSNNSIAIPTNFTISVTTEILPVSMTKTSVDCTMYICGDSTECSNLLLQYGSFCTQLNRALTGIAVEQDKNTQEVFAQVKQIYKTPPIKDFGGFNFSQILPDPSKPSKRSFIEDLLFNKVTLADAGFIKQYGDCLGDIAARDLICAQKFNGLTVLPPLLTDEMIAQYTSALLAGTITSGWTFGAGAALQIPFAMQMAYRFNGIGVTQNVLYENQKLIANQFNSAIGKIQDSLSSTASALGKLQDVVNQNAQALNTLVKQLSSNFGCISSVLNDILSRLDKVEAEVQIDCLITGRLQSLQTYVTQQLIRAAEIRASANLAATKMSECVLGQSKRVDFCGKGYHLMSFPQSAPHGVVFLHVTYVPAQEKNFTTAPAICHDGKAHFPREGVFVSNGTHWFVTQRNFYEPQIITTDNTFVSGNCDVVIGIVNNTVYDPLQPELDSFKEELDKYFKNHTSPDVDLGDISGINASVVNIQKEIDRLNEVAKNLNESLIDLQELGKYEQYIKWPWYIWLGFIAGLIAIVMVTIMLCCMTSCCSCLKGCCSCGSCFKFDEDDSEPVLKGVKLHYT

SEQ ID NO: 1099 - protein, 1273 aa, Artificial Sequence
  SARS-CoV-2/Switzerland/1000477797/2020__EPI_ISL_413023 spike protein (1-1273)(A972C_R995C)
MFVFLVLLPLVSSQCVNLTTRTQLPPAYTNSFTRGVYYPDKVFRSSVLHSTQDLFLPFFSNVTWFHAIHVSGTNGTKRFDNPVLPFNDGVYFASTEKSNIIRGWIFGTTLDSKTQSLLIVNNATNVVIKVCEFQFCNDPFLGVYYHKNNKSWMESEFRVYSSANNCTFEYVSQPFLMDLEGKQGNFKNLREFVFKNIDGYFNIYSKHTPINLVRDLPQGFSALEPLVDLPIGINITRFQTLLALHRSYLTPGDSSSGWTAGAAAYYVGYLQPRTFLLKYNENGTITDAVDCALDPLSETKCTLKSFTVEKGIYQTSNFRVQPTESIVRFPNITNLCPFGEVFNATRFASVYAWNRKRISNCVADYSVLYNSASFSTFKCYGVSPTKLNDLCFTNVYADSFVIRGDEVRQIAPGQTGKIADYNYKLPDDFTGCVIAWNSNNLDSKVGGNYNYLYRLFRKSNLKPFERDISTEIYQAGSTPCNGVEGFNCYFPLQSYGFQPTNGVGYQPYRVVVLSFELLHAPATVCGPKKSTNLVKNKCVNFNFNGLTGTGVLTESNKKFLPFQQFGRDIADTTDAVRDPQTLEILDITPCSFGGVSVITPGTNTSNQVAVLYQGVNCTEVPVAIHADQLTPTWRVYSTGSNVFQTRAGCLIGAEHVNNSYECDIPIGAGICASYQTQTNSPRRARSVASQSIIAYTMSLGAENSVAYSNNSIAIPTNFTISVTTEILPVSMTKTSVDCTMYICGDSTECSNLLLQYGSFCTQLNRALTGIAVEQDKNTQEVFAQVKQIYKTPPIKDFGGFNFSQILPDPSKPSKRSFIEDLLFNKVTLADAGFIKQYGDCLGDIAARDLICAQKFNGLTVLPPLLTDEMIAQYTSALLAGTITSGWTFGAGAALQIPFAMQMAYRFNGIGVTQNVLYENQKLIANQFNSAIGKIQDSLSSTASALGKLQDVVNQNAQALNTLVKQLSSNFGCISSVLNDILSRLDKVEAEVQIDCLITGRLQSLQTYVTQQLIRAAEIRASANLAATKMSECVLGQSKRVDFCGKGYHLMSFPQSAPHGVVFLHVTYVPAQEKNFTTAPAICHDGKAHFPREGVFVSNGTHWFVTQRNFYEPQIITTDNTFVSGNCDVVIGIVNNTVYDPLQPELDSFKEELDKYFKNHTSPDVDLGDISGINASVVNIQKEIDRLNEVAKNLNESLIDLQELGKYEQYIKWPWYIWLGFIAGLIAIVMVTIMLCCMTSCCSCLKGCCSCGSCCKFDEDDSEPVLKGVKLHYT

SEQ ID NO: 1100 - protein, 1273 aa, Artificial Sequence
  SARS-CoV-2/Belgium/BA-02291/2020__EPI_ISL_415159 spike protein (1-1273)(A972C_R995C)
MFVFLVLLPLVSSQCVNLTTRTQLPPAYTNSFTRGVYYPDKVFRSSVLHSTQDLFLPFFSNVTWFHAIHVSGTNGTKRFDNPVLPFNDGVYFASTEKSNIIRGWIFGTTLDSKTQSLLIVNNATNVVIKVCEFQFCNDPFLGVYYHKNNKSWMESEFRVYSSANNCTFEYVSQPFLMDLEGKQGNFKNLREFVFKNIDGYFKIYSKHTPINLVRDLPQGFSALEPLVDLPIGINITRFQTLLALHRSYLTPGDSSSGWTAGAAAYYVGYLQPRTFLLKYNENGTITDAVDCALDPLSETKCTLKSFTVEKGIYQTSNFRVQPTESIVRFPNITNLCPFGEVFNATRFASVYAWNRKRISNCVADYSVLYNSASFSTFKCYGVSPTKLNDLCFTNVYADSFVIRGDEVRQIAPGQTGKIADYNYKLPDDFTGCVIAWNSNNLDSKVGGNYNYLYRLFRRSNLKPFERDISTEIYQAGSTPCNGVEGFNCYFPLQSYGFQPTNGVGYQPYRVVVLSFELLPAPATVCGPKKSTNLVKNKCVNFNFNGLTGTGVLTESNKKFLPFQQFGRDIADTTDAVRDPQTLEILDITPCSFGGVSVITPGTNTSNQVAVLYQGVNCTEVPVAIHADQLTPTWRVYSTGSNVFQTRAGCLIGAEHVNNSYECDIPIGAGICASYQTQTNSPRRARSVASQSIIAYTMSLGAENSVAYSNNSIAIPTNFTISVTTEILPVSMTKTSVDCTMYICGDSTECSNLLLQYGSFCTQLNRALTGIAVEQDKNTQEVFAQVKQIYKTPPIKDFGGFNFSQILPDPSKPSKRSFIEDLLFNKVTLADAGFIKQYGDCLGDIAARDLICAQKFNGLTVLPPLLTDEMIAQYTSALLAGTITSGWTFGAGAALQIPFAMQMAYRFNGIGVTQNVLYENQKLIANQFNSAIGKIQDSLSSAAPALGKLQDVVNQNAQALNTLVKQLSSNFGCISSVLNDILSRLDKVEAEVQIDCLITGRLQSLQTYVTQQLIRAAEIRASANLAATKMSECVLGQSKRVDFCGKGYHLMSFPQSAPHGVVFLHVTYVPAQEKNFTTAPAICHDGKAHFPREGVFVSNGTHWFVTQRNFYEPQIITTDNTFVSGNCDVVIGIVNNTVYDPLQPELDSFKEELDKYFKNHTSPDVDLGDISGINASVVNIQKEIDRLNEVAKNLNESLIDLQELGKYEQYIKWPWYIWLGFIAGLIAIVMVTIMLCCMTSCCSCLKGCCSCGSCCKFDEDDSEPVLKGVKLHYT

SEQ ID NO: 1101 - protein, 1273 aa, Artificial Sequence
  SARS-CoV-2/USA/WA8-UW5/2020__EPI_ISL_413486 spike protein (1-1273)(A972C_R995C)
MFVFLVLLPLVSSQCVNLTTRTQLPPAYTNSFTRGVYYPDKVFRSSVLHSTQDLFLPFFSNVTWFHAIHVSGTNGTKRFDNPVLPFNDGVYFASTEKSNIIRGWIFGTTLDSKTQSLLIVNNATNVVIKVCEFQFCNDPFLGVYYHKNNKSWMESEFRVYSSANNCTFEYVSQPFLMDLEGKQGNFKNLREFVFKNIDGYFKIYSKHTPINLVRDLPQGFSALEPLVDLPIGINITRFQTLLALHRSYLTPGDSSSGWTAGAAAYYVGYLQPRTFLLKYNENGTITDAVDCALDPLSETKCTLKSFTVEKGIYQTSNFRVQPTESIVRFPNITNLCPFGEVFNATRFASVYAWNRKRISNCVADYSVLYNSASFSTFKCYGVSPTKLNDLCFTNVYADSFVIRGDEVRQIAPGQTGKIADYNYKLPDDFTGCVIAWNSNNLDSKVGGNYNYLYRLFRKSNLKPFERDISTEIYQAGSTPCNGVEGFNCYFPLQSYGFQPTNGVGYQPYRVVVLSFELLHAPATVCGPKKSTNLVKNKCVNFNFNGLTGTGVLTESNKKFLPFQQFGRDIADTTDAVRDPQTLEILDITPCSFGGVSVITPGTNTSNQVAVLYQDVNCTEVPVAIHADQLTPTWRVYSTGSNVFQTRAGCLIGAEYVNNSYECDIPIGAGICASYQTQTNSPRRARSVASQSIIAYTMSLGAENSVAYSNNSIAIPTNFTISVTTEILPVSMTKTSVDCTMYICGDSTECSNLLLQYGSFCTQLNRALTGIAVEQDKNTQEVFAQVKQIYKTPPIKDFGGFNFSQILPDPSKPSKRSFIEDLLFNKVTLADAGFIKQYGDCLGDIAARDLICAQKFNGLTVLPPLLTDEMIAQYTSALLAGTITSGWTFGAGAALQIPFAMQMAYRFNGIGVTQNVLYENQKLIANQFNSAIGKIQDSLSSTASALGKLQDVVNQNAQALNTLVKQLSSNFGCISSVLNDILSRLDKVEAEVQIDCLITGRLQSLQTYVTQQLIRAAEIRASANLAATKMSECVLGQSKRVDFCGKGYHLMSFPQSAPHGVVFLHVTYVPAQEKNFTTAPAICHDGKAHFPREGVFVSNGTHWFVTQRNFYEPQIITTDNTFVSGNCDVVIGIVNNTVYDPLQPELDSFKEELDKYFKNHTSPDVDLGDISGINASVVNIQKEIDRLNEVAKNLNESLIDLQELGKYEQYIKWPWYIWLGFIAGLIAIVMVTIMLCCMTSCCSCLKGCCSCGSCCKFDEDDSEPVLKGVKLHYT

SEQ ID NO: 1102 - protein, 1273 aa, Artificial Sequence
  SARS-CoV-2/England/20102000506/2020__EPI_ISL_415147 spike protein (1-1273)(A972C_R995C)
MFVFLVLLPLVSSQCVNLTTRTQLPPAYTNSFTRGVYYPDKVFRSSVLHSTQDLFLPFFSNVTWFHAIHVSGTNGTKRFDNPVLPFNDGVYFASTEKSNIIRGWIFGTTLDSKTQSLLIVNNATNVVIKVCEFQFCNDPFLGVYYHKNNKSWMESEFRVYSSANNCTFEYVSQPFLMDLEGKQGNFKNLREFVFKNIDGYFKIYSKHTPINLVRDLPQGFSALEPLVDLPIGINITRFQTLLALHRSYLTPGDSSSGWTAGAAAYYVGYLQPRTFLLKYNENGTITDAVDCALDPLSETKCTLKSFTVEKGIYQTSNFRVQPTESIVRFPNITNLCPFGEVFNATRFASVYAWNRKRISNCVADYSVLYNSASFSTFKCYGVSPTKLNDLCFTNVYADSFVIRGDEVRQIAPGQTGKIADYNYKLPDDFTGCVIAWNSNNLDSKVGGNYNYLYRLFRKSNLKPFERDISTEIYQAGSTPCNGVEGFNCYFPLQSYGFQPTNGVGYQPYRVVVLSFELLHAPATVCGPKKSTNLVKNKCVNFNFNGLTGTGVLTESNKKFLPFQQFGRDIADTTDAVRDPQTLEILDITPCSFGGVSVITPGTNTSNQVAVLYQGVNCTEVPVAIHADQLTPTWRVYSTGSNVFQTRAGCLIGAEHVNNSYECDIPIGAGICASYQTQTNSPRRARSVASQSIIAYTMSLGAENSVAYSNNSIAIPTNFTISVTTEILPVSMTKTSVDCTMYICGDSTECSNLLLQYGSFCTQLNRALTGIAVEQDKNTQEVFAQVKQIYKTPPIKDFGGFNFSQILPDPSKPSKRSFIEDLLFNKVTLADAGFIKQYGYCLGDIAARDLICAQKFNGLTVLPPLLTDEMIAQYTSALLAGTITSGWTFGAGAALQIPFAMQMAYRFNGIGVTQNVLYENQKLIANQFNSAIGKIQDSLSSTASALGKLQDVVNQNAQALNTLVKQLSSNFGCISSVLNDILSRLDKVEAEVQIDCLITGRLQSLQTYVTQQLIRAAEIRASANLAATKMSECVLGQSKRVDFCGKGYHLMSFPQSAPHGVVFLHVTYVPAQEKNFTTAPAICHDGKAHFPREGVFVSNGTHWFVTQRNFYEPQIITTDNTFVSGNCDVVIGIVNNTVYDPLQPELDSFKEELDKYFKNHTSPDVDLGDISGINASVVNIQKEIDRLNEVAKNLNESLIDLQELGKYEQYIKWPWYIWLGFIAGLIAIVMVTIMLCCMTSCCSCLKGCCSCGSCCKFDEDDSEPVLKGVKLHYT

SEQ ID NO: 1103 - protein, 1273 aa, Artificial Sequence
  SARS-CoV-2/Belgium/VAG-03013/2020__EPI_ISL_415155 spike protein (1-1273)(A972C_R995C)
MFVFLVLLPLVSSQCVNLTTRTQLPPAYTNSFTRGVYYPDKVFRSSVLHSTQDLFLPFFSNVTWFHAIHVSGTNGTKRFDNPVLPFNDGVYFASTEKSNIIRGWIFGTTLDSKTQSLLIVNNATNVVIKVCEFQFCNDPFLGVYYHKNNKSWMESEFRVYSSANNCTFEYVSQPFLMDLEGKQGNFKNLREFVFKNIDGYFKIYSKHTPINLVRDLPQGFSALEPLVDLPIGINITRFQTLLALHRSYLTPGDSSSGWTAGAAAYYVGYLQPRTFLLKYNENGTITDAVDCALDPLSETKCTLKSFTVEKGIYQTSNFRVQPTESIVRFPNITNLCPFGEVFNATRFASVYAWNRKRISNCVADYSVLYNSASFSTFKCYGVSPTKLNDLCFTNVYADSFVIRGDEVRQIAPGQTGKIADYNYKLPDDFTGCVIAWNSNNLDSKVGGNYNYLYRLFRKSNLKPFERDISTEIYQAGSTPCNGVEGFNCYFPLQSYGFQPTNGVGYQPYRVVVLSFELLHAPATVCGPKKSTNLVKNKCVNFNFNGLTGTGVLTESNKKFLPFQQFGRDIADTTDAVRDPQTLEILDITPCSFGGVSVITPGTNTSNQVAVLYQGVNCTEVPVAIHADQLTPTWRVYSTGSNVFQTRAGCLIGAEHVNNSYECDIPIGAGICASYQTQTNSPRRARSVASQSIIAYTMSLGAENSVAYSNNSIAIPTNFTISVTTEILPVSMTKTSVDCTMYICGDSTECSNLLLQYGSFCTQLNRALTGIAVEQDKNTQEVFAQVKQIYKTPPIKDFGGFNFSQILPDPSKPSKRSFIEDLLFNKVTLADAGFIKQYGDCLGDIAARDLICAQKFNGLTVLPPLLTDEMIAQYTSALLAGTITSGWTFGAGAALQIPFAMQMAYRFNGIGVTQNVLYENQKLIANQFNSAIGKIQDSLSSTATALGKLQDVVNQNAQALNTLVKQLSSNFGCISSVLNDILSRLDKVEAEVQIDCLITGRLQSLQTYVTQQLIRAAEIRASANLAATKMSECVLGQSKRVDFCGKGYHLMSFPQSAPHGVVFLHVTYVPAQEKNFTTAPAICHDGKAHFPREGVFVSNGTHWFVTQRNFYEPQIITTDNTFVSGNCDVVIGIVNNTVYDPLQPELDSFKEELDKYFKNHTSPDVDLGDISGINASVVNIQKEIDRLNEVAKNLNESLIDLQELGKYEQYIKWPWYIWLGFIAGLIAIVMVTIMLCCMTSCCSCLKGCCSCGSCCKFDEDDSEPVLKGVKLHYT

SEQ ID NO: 1104 - protein, 1273 aa, Artificial Sequence
  SARS-CoV-2/Belgium/BC-03016/2020__EPI_ISL_415157 spike protein (1-1273)(A972C_R995C)
MFVFLVLLPLVSSQCVNLTTRTQLPPAYTNSFTRGVYYPDKVFRSSVLHSTQDLFLPFFSNVTWFHAIHVSGTNGTKRFDNPVLPFNDGVYFASTEKSNIIRGWIFGTTLDSKTQSLLIVNNATNVVIKVCEFQFCNDPFLGVYYHKNNKSWMESEFRVYSSANNCTFEYVSQPFLMDLEGKQGNFKNLREFVFKNIDGYFKIYSKHTPINLVRDLPQGFSALEPLVDLPIGINITRFQTLLALHRSYLTPGDSSSGWTAGAAAYYVGYLQPRTFLLKYNENGTITDAVDCALDPLSETKCTLKSFTVEKGIYQTSNFRVQPTESIVRFPNITNLCPFGEVFNATRFASVYAWNRKRISNCVADYSVLYNSASFSTFKCYGVSPTKLNDLCFTNVYADSFVIRGDEVRQIAPGQTGKIADYNYKLPDDFTGCVIAWNSNNLDSKVGGNYNYLYRLFRKSNLKPFERDISTEIYQAGSTPCNGVEGFNCYFPLQSYGFQPTNGVGYQPYRVVVLSFELLHAPATVCGPKKSTNLVKNKCVNFNFNGLTGTGVLTESNKKFLPFQQFGRDIADTTDAVRDPQTLEILDITPCSFGGVSVITPGTNTSNQVAVLYQGVNCTEVPVAIHADQLTPTWRVYSTGSNVFQTRAGCLIGAEHVNNSYECDIPIGAGICASYQTQTNSPRRARSVASQSIIAYTMSLGAENSVAYSNNSIAIPTNFTISVTTEILPVSMTKTSVDCTMYICGDSTECSNLLLQYGSFCTQLNRALTGIAVEQDKNTQEVFAQVKQIYKTPPIKDFGGFNFSQILPDPSKPSKRSFIEDLLFNKVTLADAGFIKQYGDCLGDIAARDLICAQKFNGLTVLPPLLTDEMIAQYTSALLAGTITSGWTFGAGAALQIPFAMQMAYRFNGIGVTQNVLYENQKLIANQFNSAIGKIQDSLSSTAPALGKLQDVVNQNAQALNTLVKQLSSNFGCISSVLNDILSRLDKVEAEVQIDCLITGRLQSLQTYVTQQLIRAAEIRASANLAATKMSECVLGQSKRVDFCGKGYHLMSFPQSAPHGVVFLHVTYVPAQEKNFTTAPAICHDGKAHFPREGVFVSNGTHWFVTQRNFYEPQIITTDNTFVSGNCDVVIGIVNNTVYDPLQPELDSFKEELDKYFKNHTSPDVDLGDISGINASVVNIQKEIDRLNEVAKNLNESLIDLQELGKYEQYIKWPWYIWLGFIAGLIAIVMVTIMLCCMTSCCSCLKGCCSCGSCCKFDEDDSEPVLKGVKLHYT

SEQ ID NO: 1105 - protein, 1273 aa, Artificial Sequence
  SARS-CoV-2/Germany/BavPat3/2020__EPI_ISL_414521 spike protein (1-1273)(A972C_R995C)
MFVFLVLLPLVSSQCVNLTTRTQLPPAYTNSFTRGVYYPDKVFRSSVLHSTQDLFLPFFSNVTWFHAIHVSGTNGTKRFDNPVLPFNDGVYFASTEKSNIIRGWIFGTTLDSKTQSLLIVNNATNVVIKVCEFQFCNDPFLGVYYHKNNKSWMESEFRVYSSANNCTFEYVSQPFLMDLEGKQGNFKNLREFVFKNIDGYFKIYSKHTPINLVRDLPQGFSALEPLVDLPIGINITRFQTLLALHRSYLTPGDSSSGWTAGAAAYYVGYLQPRTFLLKYNENGTITDAVDCALDPLSETKCTLKSFTVEKGIYQTSNFRVQPTESIVRFPNITNLCPFGEVFNATRFASVYAWNRKRISNCVADYSVLYNSASFSTFKCYGVSPTKLNDLCFTNVYADSFVIRGDEVRQIAPGQTGKIADYNYKLPDDFTGCVIAWNSNNLDSKVGGNYNYLYRLFRKSNLKPFERDISTEIYQAGSTPCNGVEGFNCYFPLQSYGFQPTNGVGYQPYRVVVLSFELLHAPATVCGPKKSTNLVKNKCVNFNFNGLTGTGVLTESNKKFLPFQQFGRDIADTTDAVRDPQTLEILDITPCSFGGVSVITPGTNTSNQVAVLYQDVNCTEVPVAIHADQLTPTWRVYSTGSNVFQTRAGCLIGAEHVNNSYECDIPIGAGICASYQTQTNSPRRARSVASQSIIAYTMSLGAENSVAYSNNSIAIPTNFTISVTTEILPVSMTKTSVDCTMYICGDSTECSNLLLQYGSFCTQLNRALTGIAVEQDKNTQQVFAQVKQIYKTPPIKDFGGFNFSQILPDPSKPSKRSFIEDLLFNKVTLADAGFIKQYGDCLGDIAARDLICAQKFNGLTVLPPLLTDEMIAQYTSALLAGTITSGWTFGAGAALQIPFAMQMAYRFNGIGVTQNVLYENQKLIANQFNSAIGKIQDSLSSTASALGKLQDVVNQNAQALNTLVKQLSSNFGCISSVLNDILSRLDKVEAEVQIDCLITGRLQSLQTYVTQQLIRAAEIRASANLAATKMSECVLGQSKRVDFCGKGYHLMSFPQSAPHGVVFLHVTYVPAQEKNFTTAPAICHDGKAHFPREGVFVSNGTHWFVTQRNFYEPQIITTDNTFVSGNCDVVIGIVNNTVYDPLQPELDSFKEELDKYFKNHTSPDVDLGDISGINASVVNIQKEIDRLNEVAKNLNESLIDLQELGKYEQYIKWPWYIWLGFIAGLIAIVMVTIMLCCMTSCCSCLKGCCSCGSCCKFDEDDSEPVLKGVKLHYT

SEQ ID NO: 1106 - protein, 1273 aa, Artificial Sequence
  SARS-CoV-2/France/HF1805/2020__EPI_ISL_414628 spike protein (1-1273)(A972C_R995C)
MFVFLVLLPLVSSQCVNLTTRTQLPPAYTNSFTRGVYYPDKVFRSSVLHSTQDLFLPFFSNVTWFHAIHVSGTNGTKRFDNPVLPFNDGVYFASTEKSNIIRGWIFGTTLDSKTQSLLIVNNATNVVIKVCEFQFCNDPFLGVYYHKNNKSWMESEFRVYSSANNCTFEYVSQPFLMDLEGKQGNFKNLREFVFKNIDGYFKIYSKHTPINLVRDLPQGFSALEPLVDLPIGINITRFQTLLALHRSYLTPGDSSSGWTAGAAAYYVGYLQPRTFLLKYNENGTITDAVDCALDPLSETKCTLKSFTVEKGIYQTSNFRVQPTESIVRFPNITNLCPFGEVFNATRFASVYAWNRKRISNCVADYSVLYNSASFSTFKCYGVSPTKLNDLCFTNVYADSFVIRGDEVRQIAPGQTGKIADYNYKLPDDFTGCVIAWNSNNLDSKVGGNYNYLYRLFRKSNLKPFERDISTEIYQAGSTPCNGVEGFNCYFPLQSYGFQPTNGVGYQPYRVVVLSFELLHAPATVCGPKKSTNLVKNKCVNFNFNGLTGTGVLTESNKKFLPFQQFGRDIADTTDAVRDPQTLEILDITPCSFGGVSVITPGTNTSNQVAVLYQGVNCTEVPVAIHADQLTPTWRVYSTGSNVFQTRAGCLIGAEHVNNSYECDIPIGAGICASYQTQTNSPRRARSVASQSIIAYTMSLGAENSVAYSNNSIAIPTNFTISVTTEILPVSMTKTSVDCTMYICGDSTECSNLLLQYGSFCTQLNRALTGIAVEQDKNTQEVFAQVKQIYKTPPIKDFGGFNFSQILPDPSKPSKRSFIEDLLFNKVTLADAGFIKQYGDCLGDIAARDLICAQKFNGLTVLPPLLTDEMIAQYTSALLAGTITSGWTFGAGAALQIPFAMQMAYRFNGIGVTQNVLYENQKLIANQFNSAIGKIQDSLSSTASALGKLQDVVNQNAQALNTLVKQLSSNFGCISSVLNDILSRLDKVEAEVQIDCLITGRLQSLQTYVTQQLIRAAEIRASANLAATKMSECVLGQSKRVDFCGKGYHLMSFPQSAPHGVVFLHVTYVPAQEKNFTTAPAICHDGKAHFPREGVFVSNGTHWFVTQRNFYEPQIITTDNTFVSGNCDVVIGVVNNTVYDPLQPELDSFKEELDKYFKNHTSPDVDLGDISGINASVVNIQKEIDRLNEVAKNLNESLIDLQELGKYEQYIKWPWYIWLGFIAGLIAIVMVTIMLCCMTSCCSCLKGCCSCGSCCKFDEDDSEPVLKGVKLHYT

SEQ ID NO: 1107 - protein, 1273 aa, Artificial Sequence
  SARS-CoV-2/Netherlands/ZuidHolland_9/2020__EPI_ISL_414445 spike protein (1-1273)(A972C_R995C)
MFVFLVLLPLVSSQCVNLTTRTQLPPAYTNSFTRGVYYPDKVFRSSVLHSTQDLFLPFFSNVTWFHAIHVSGTNGTKRFDNPVLPFNDGVYFASTEKSNIIRGWIFGTTLDSKTQSLLIVNNATNVVIKVCEFQFCNDPFLGVYYHKNNKSWMESEFRVYSSANNCTFEYVSQPFLMDLEGKQGNFKNLREFVFKNIDGYFKIYSKHTPINLVRDLPQGFSALEPLVDLPIGINITRFQTLLALHRSYLTPGDSSSGWTAGAAAYYVGYLQPRTFLLKYNENGTITDAVDCALDPLSETKCTLKSFTVEKGIYQTSNFRVQPTESIVRFPNITNLCPFGEVFNATRFASVYAWNRKRISNCVADYSVLYNSASFSTFKCYGVSPTKLNDLCFTNVYADSFVIRGDEVRQIAPGQTGKIADYNYKLPDDFTGCVIAWNSNNLDSKVGGNYNYLYRLFRKSNLKPFERDISTEIYQAGSTPCNGVEGFNCYFPLQSYGFQPTNGVGYQPYRVVVLSFELLHAPATVCGPKKSTNLVKNKCVNFNFNGLTGTGVLTESNKKFLPFQQFGRDIADTTDAVRDPQTLEILDITPCSFGGVSVITPGTNTSNQVAVLYQGVNCTEVPVAIHADQLTPTWRVYSTGSNVFQTRAGCLIGAEHVNNSYECDIPIGAGICASYQTQTNSPRRARSVASQSIIAYTMSLGAENSVAYSNNSIAIPTNFTISVTTEILPVSMTKTSVDCTMYICGDSTECSNLLLQYGSFCTQLNRALTGIAVEQDKNTQEVFAQVKQIYKTPPIKDFGGFNFSQILPDPSKPSKRSFIEDLLFNKVTLADAGFIKQYGDCLGDIAARDLICVQKFNGLTVLPPLLTDEMIAQYTSALLAGTITSGWTFGAGAALQIPFAMQMAYRFNGIGVTQNVLYENQKLIANQFNSAIGKIQDSLSSTASALGKLQDVVNQNAQALNTLVKQLSSNFGCISSVLNDILSRLDKVEAEVQIDCLITGRLQSLQTYVTQQLIRAAEIRASANLAATKMSECVLGQSKRVDFCGKGYHLMSFPQSAPHGVVFLHVTYVPAQEKNFTTAPAICHDGKAHFPREGVFVSNGTHWFVTQRNFYEPQIITTDNTFVSGNCDVVIGIVNNTVYDPLQPELDSFKEELDKYFKNHTSPDVDLGDISGINASVVNIQKEIDRLNEVAKNLNESLIDLQELGKYEQYIKWPWYIWLGFIAGLIAIVMVTIMLCCMTSCCSCLKGCCSCGSCCKFDEDDSEPVLKGVKLHYT

SEQ ID NO: 1108 - protein, 1273 aa, Artificial Sequence
  SARS-CoV-2/Finland/FIN03032020A/2020__EPI_ISL_413602 spike protein (1-1273)(A972C_R995C)
MFVFLVLLPLVSSQCVNLTTRTQLPPAYTNSFTRGVYYPDKVFRSSVLHSTQDLFLPFFSNVTWFHAIHVSGTNGTKRFDNPVLPFNDGVYFASTEKSNIIRGWIFGTTLDSKTQSLLIVNNATNVVIKVCEFQFCNDPFLGVYYHKNNKSWMESEFRVYSSANNCTFEYVSQPFLMDLEGKQGNFKNLREFVFKNIDGYFKIYSKHTPINLVRDLPQGFSALEPLVDLPIGINITRFQTLLALHRSYLTPGDSSSGWTAGAAAYYVGYLQPRTFLLKYNENGTITDAVDCALDPLSETKCTLKSFTVEKGIYQTSNFRVQPTESIVRFPNITNLCPFGEVFNATRFASVYAWNRKRISNCVADYSVLYNSASFSTFKCYGVSPTKLNDLCFTNVYADSFVIRGDEVRQIAPGQTGKIADYNYKLPDDFTGCVISWNSNNLDSKVGGNYNYLYRLFRKSNLKPFERDISTEIYQAGSTPCNGVEGFNCYFPLQSYGFQPTNGVGYQPYRVVVLSFELLHAPATVCGPKKSTNLVKNKCVNFNFNGLTGTGVLTESNKKFLPFQQFGRDIADTTDAVRDPQTLEILDITPCSFGGVSVITPGTNTSNQVAVLYQGVNCTEVPVAIHADQLTPTWRVYSTGSNVFQTRAGCLIGAEHVNNSYECDIPIGAGICASYQTQTNSPRRARSVASQSIIAYTMSLGAENSVAYSNNSIAIPTNFTISVTTEILPVSMTKTSVDCTMYICGDSTECSNLLLQYGSFCTQLNRALTGIAVEQDKNTQEVFAQVKQIYKTPPIKDFGGFNFSQILPDPSKPSKRSFIEDLLFNKVTLADAGFIKQYGDCLGDIAARDLICAQKFNGLTVLPPLLTDEMIAQYTSALLAGTITSGWTFGAGAALQIPFAMQMAYRFNGIGVTQNVLYENQKLIANQFNSAIGKIQDSLSSTASALGKLQDVVNQNAQALNTLVKQLSSNFGCISSVLNDILSRLDKVEAEVQIDCLITGRLQSLQTYVTQQLIRAAEIRASANLAATKMSECVLGQSKRVDFCGKGYHLMSFPQSAPHGVVFLHVTYVPAQEKNFTTAPAICHDGKAHFPREGVFVSNGTHWFVTQRNFYEPQIITTDNTFVSGNCDVVIGIVNNTVYDPLQPELDSFKEELDKYFKNHTSPDVDLGDISGINASVVNIQKEIDRLNEVAKNLNESLIDLQELGKYEQYIKWPWYIWLGFIAGLIAIVMVTIMLCCMTSCCSCLKGCCSCGSCCKFDEDDSEPVLKGVKLHYT

SEQ ID NO: 1109 - protein, 1273 aa, Artificial Sequence
  SARS-CoV-2/France/GE1977/2020__EPI_ISL_414632 spike protein (1-1273)(A972C_R995C)
MFVFLVLLPLVSSQCVNLTTRTQLPPAYTNSFTRGVYYPDKVFRSSVLHSTQDLFLPFFSNVTWFHAIHVSGTNGTKRFDNPVLPFNDGVYFASTEKSNIIRGWIFGTTLDSKTQSLLIVNNATNVVIKVCEFQFCNDPFLGVYYHKNNKSWMESEFRVYSSANNCTFEYVSQPFLMDLEGKQGNFKNLREFVFKNIDGYFKIYSKHTPINLVRDLPQGFSALEPLVDLPIGINITRFQTLLALHRSYLTPGDSSSGWTAGAAAYYVGYLQPRTFLLKYNENGTITDAVDCALDPLSETKCTLKSFTVEKGIYQTSNFRVQPTESIVRFPNITNLCPFGEVFNATRFASVYAWNRKRISNCVADYSVLYNSASFSTFKCYGVSPTKLNDLCFTNVYADSFVIRGDEVRQIAPGQTGKIADYNYKLPDDFTGCVIAWNSNNLDSKVGGNYNYLYRLFRKSNLKPFERDISTEIYQAGSTPCNGVEGFNCYFPLQSYGFQPTNGVGYQPYRVVVLSFELLHAPATVCGPKKSTNLVKNKCVNFNFNGLTGTGVLTESNKKFLPFQQFGRDIADTTDAVRDPQTLEILDITPCSFGGVSVITPGTNTSNQVAVLYQGVNCTEVPVAIHADQLTPTWRVYSTGSNVFQTRAGCLIGAEHVNNSYECDIPIGAGICASYQTQTNSPRRARSVASQSIIAYTMSLGAENSVAYSNNSIAIPTNFTISVTTEILPVSMTKTSVDCTMYICGDSTECSNLLLQYGSFCTQLNRALTGIAVEQDKNTQEVFAQVKQIYKTPPIKDFGGFNFSQILPDPSKPSKRSFIEDLLFNKVTLADAGFIKQYGDCLGDIAARDLICAQKFNGLTVLPPLLTDEMIAQYTSALLAGTITSGWTFGAGAALQIPFAMQMAYRFNGIGVTQNVLYENQKLIANQFNSAIGKIQDSLFSTASALGKLQDVVNQNAQALNTLVKQLSSNFGCISSVLNDILSRLDKVEAEVQIDCLITGRLQSLQTYVTQQLIRAAEIRASANLAATKMSECVLGQSKRVDFCGKGYHLMSFPQSAPHGVVFLHVTYVPAQEKNFTTAPAICHDGKAHFPREGVFVSNGTHWFVTQRNFYEPQIITTDNTFVSGNCDVVIGIVNNTVYDPLQPELDSFKEELDKYFKNHTSPDVDLGDISGINASVVNIQKEIDRLNEVAKNLNESLIDLQELGKYEQYIKWPWYIWLGFIAGLIAIVMVTIMLCCMTSCCSCLKGCCSCGSCCKFDEDDSEPVLKGVKLHYT

SEQ ID NO: 1110 - protein, 1273 aa, Artificial Sequence
  SARS-CoV-2/Finland/FIN-313/2020__EPI_ISL_414641 spike protein (1-1273)(A972C_R995C)
MFVFLVLLPLVSSQCVNLTTRTQLPPAYTNSFTRGVYYPDKVFRSSVLHSTQDLFLPFFSNVTWFHAIHVSGTNGTKRFDNPVLPFNDGVYFASTEKSNIIRGWIFGTTLDSKTQSLLIVNNATNVVIKVCEFQFCNDPFLGVYYHKNNKSWMESEFRVYSSANNCTFEYVSQPFLMDLEGKQGNFKNLREFVFKNIDGYFKIYSKHTPINLVRDLPQGFSALEPLVDLPIGINITRFKTLLALHRSYLTPGDSSSGWTAGAAAYYVGYLQPRTFLLKYNENGTITDAVDCALDPLSETKCTLKSFTVEKGIYQTSNFRVQPTESIVRFPNITNLCPFGEVFNATRFASVYAWNRKRISNCVADYSVLYNSASFSTFKCYGVSPTKLNDLCFTNVYADSFVIRGDEVRQIAPGQTGKIADYNYKLPDDFTGCVIAWNSNNLDSKVGGNYNYLYRLFRKSNLKPFERDISTEIYQAGSTPCNGVEGFNCYFPLQSYGFQPTNGVGYQPYRVVVLSFELLHAPATVCGPKKSTNLVKNKCVNFNFNGLTGTGVLTESNKKFLPFQQFGRDIADTTDAVRDPQTLEILDITPCSFGGVSVITPGTNTSNQVAVLYQGVNCTEVPVAIHADQLTPTWRVYSTGSNVFQTRAGCLIGAEHVNNSYECDIPIGAGICASYQTQTNSPRRARSVASQSIIAYTMSLGAENSVAYSNNSIAIPTNFTISVTTEILPVSMTKTSVDCTMYICGDSTECSNLLLQYGSFCTQLNRALTGIAVEQDKNTQEVFAQVKQIYKTPPIKDFGGFNFSQILPDPSKPSKRSFIEDLLFNKVTLADAGFIKQYGDCLGDIAARDLICAQKFNGLTVLPPLLTDEMIAQYTSALLAGTITSGWTFGAGAALQIPFAMQMAYRFNGIGVTQNVLYENQKLIANQFNSAIGKIQDSLSSTASALGKLQDVVNQNAQALNTLVKQLSSNFGCISSVLNDILSRLDKVEAEVQIDCLITGRLQSLQTYVTQQLIRAAEIRASANLAATKMSECVLGQSKRVDFCGKGYHLMSFPQSAPHGVVFLHVTYVPAQEKNFTTAPAICHDGKAHFPREGVFVSNGTHWFVTQRNFYEPQIITTDNTFVSGNCDVVIGIVNNTVYDPLQPELDSFKEELDKYFKNHTSPDVDLGDISGINASVVNIQKEIDRLNEVAKNLNESLIDLQELGKYEQYIKWPWYIWLGFIAGLIAIVMVTIMLCCMTSCCSCLKGCCSCGSCCKFDEDDSEPVLKGVKLHYT

SEQ ID NO: 1111 - protein, 1273 aa, Artificial Sequence
  SARS-CoV-2/Netherlands/ZuidHolland_2/2020__EPI_ISL_414556 spike protein (1-1273)(A972C_R995C)
MFVFLVLLPLVSSQCVNLTTRTQLPPAYTNSFTRGVYYPDKVFRSSVLHSTQDLFLPFFSNVTWFHAIHVSGTNGTKRFDNPVLPFNDGVYFASTEKSNIIRGWIFGTTLDSKTQSLLIVNNATNVVIKVCEFQFCNDPFLGVYYHKNNKSWMESEFRVYSSANNCTFEYVSQPFLMDLEGKQGNFKNLREFVFKNIDGYFKIYSKHTPINLVRDLPQGFSALEPLVDLPIGINITRFQTLLALHRSYLTPGDSSSGWTAGAAAYYVGYLQPRTFLLKYNENGTITDAVDCALDPLSETKCTLKSFTVEKGIYQTSNFRVQPTESIVRFPNITNLCPFGEVFNATRFASVYAWNRKRISNCVADYSVLYNSASFSTFKCYGVSPTKLNDLCFTNVYADSFVIRGDEVRQIAPGQTGKIADYNYKLPDDFTGCVIAWNSNNLDSKVGGNYNYLYRLFRKSNLKPFERDISTEIYQAGSTPCNGVEGFNCYFPLQSYGFQPTNGVGYQPYRVVVLSFELLHAPATVCGPKKSTNLVKNKCVNFNFNGLTGTGVLTESNKKFLPFQQFGRDIADTTDAVRDPQTLEILDITPCSFGGVSVITPGTNTSNQVAVLYQGVNCTEVPVAIHADQLTPTWRVYSTGSNVFQTRAGCLIGAEHVNNSYECDIPIGAGICASYQTQTNSPRRARSVASQSIIAYTMSLGAENSVAYSNNSIAIPTNFTISVTTEILPVSMTKTSVDCTMYICGDSTECSNLLLQYGSFCTQLNRALTGIALEQDKNTQEVFAQVKQIYKTPPIKDFGGFNFSQILPDPSKPSKRSFIEDLLFNKVTLADAGFIKQYGDCLGDIAARDLICAQKFNGLTVLPPLLTDEMIAQYTSALLAGTITSGWTFGAGAALQIPFAMQMAYRFNGIGVTQNVLYENQKLIANQFNSAIGKIQDSLSSTASALGKLQDVVNQNAQALNTLVKQLSSNFGCISSVLNDILSRLDKVEAEVQIDCLITGRLQSLQTYVTQQLIRAAEIRASANLAATKMSECVLGQSKRVDFCGKGYHLMSFPQSAPHGVVFLHVTYVPAQEKNFTTAPAICHDGKAHFPREGVFVSNGTHWFVTQRNFYEPQIITTDNTFVSGNCDVVIGIVNNTVYDPLQPELDSFKEELDKYFKNHTSPDVDLGDISGINASVVNIQKEIDRLNEVAKNLNESLIDLQELGKYEQYIKWPWYIWLGFIAGLIAIVMVTIMLCCMTSCCSCLKGCCSCGSCCKFDEDDSEPVLKGVKLHYT

SEQ ID NO: 1112 - protein, 1273 aa, Artificial Sequence
  SARS-CoV-2/USA/WA-UW31/2020__EPI_ISL_414618 spike protein (1-1273)(A972C_R995C)
MFVFLVLLPLVSSQCVNLTTRTQLPPAYTNSFTRGVYYPDKVFRSSVLHSTQDLFLPFFSNVTWFHAIHVSGTNGTKRFDNPVLPFNDGVYFASTEKSNIIRGWIFGTTLDSKTQSLLIVNNATNVVIKVCEFQFCNDPFLGVYYHKNNKSWMESEFRVYSSANNCTFEYVSQPFLMDLEGKQGNFKNLREFVFKNIDGYFKIYSKHTPINLVRDLPQGFSALEPLVDLPIGINITRFQTLLALHRSYLTPGDSSSGWTAGAAAYYVGYLQPRTFLLKYNENGTITDAVDCALDPLSETKCTLKSFTVEKGIYQTSNFRVQPTESIVRFPNITNLCPFGEVFNATRFASVYAWNRKRISNCVADYSVLYNSASFSTFKCYGVSPTKLNDLCFTNVYADSFVIRGDEVRQIAPGQTGKIADYNYKLPDDFTGCVIAWNSNNLDSKVGGNYNYLYRLFRKSNLKPFERDISTEIYQAGSTPCNGAEGFNCYFPLQSYGFQPTNGVGYQPYRVVVLSFELLHAPATVCGPKKSTNLVKNKCVNFNFNGLTGTGVLTESNKKFLPFQQFGRDIADTTDAVRDPQTLEILDITPCSFGGVSVITPGTNTSNQVAVLYQDVNCTEVPVAIHADQLTPTWRVYSTGSNVFQTRAGCLIGAEHVNNSYECDIPIGAGICASYQTQTNSPRRARSVASQSIIAYTMSLGAENSVAYSNNSIAIPTNFTISVTTEILPVSMTKTSVDCTMYICGDSTECSNLLLQYGSFCTQLNRALTGIAVEQDKNTQEVFAQVKQIYKTPPIKDFGGFNFSQILPDPSKPSKRSFIEDLLFNKVTLADAGFIKQYGDCLGDIAARDLICAQKFNGLTVLPPLLTDEMIAQYTSALLAGTITSGWTFGAGAALQIPFAMQMAYRFNGIGVTQNVLYENQKLIANQFNSAIGKIQDSLSSTASALGKLQDVVNQNAQALNTLVKQLSSNFGCISSVLNDILSRLDKVEAEVQIDCLITGRLQSLQTYVTQQLIRAAEIRASANLAATKMSECVLGQSKRVDFCGKGYHLMSFPQSAPHGVVFLHVTYVPAQEKNFTTAPAICHDGKAHFPREGVFVSNGTHWFVTQRNFYEPQIITTDNTFVSGNCDVVIGIVNNTVYDPLQPELDSFKEELDKYFKNHTSPDVDLGDISGINASVVNIQKEIDRLNEVAKNLNESLIDLQELGKYEQYIKWPWYIWLGFIAGLIAIVMVTIMLCCMTSCCSCLKGCCSCGSCCKFDEDDSEPVLKGVKLHYT

SEQ ID NO: 1113 - protein, 1273 aa, Artificial Sequence
  SARS-CoV-2/South Korea/SNU01/2020__EPI_ISL_411929 spike protein (1-1273)(A972C_R995C)
MFVFLVLLPLVSSQCVNLTTRTQLPPAYTNSFTRGVYYPDKVFRSSVLHSTQDLFLPFFSNVTWFHAIHVSGTNGTKRFDNPVLPFNDGVYFASTEKSNIIRGWIFGTTLDSKTQSLLIVNNATNVVIKVCEFQFCNDPFLGVYYHKNNKSWMESEFRVYSSANNCTFEYVSQPFLMDLEGKQGNFKNLREFVFKNIDGYFKIYSKHTPINLVRDLPQGFWALEPLVDLPIGINITRFQTLLALHRSYLTPGDSSSGWTAGAAAYYVGYLQPRTFLLKYNENGTITDAVDCALDPLSETKCTLKSFTVEKGIYQTSNFRVQPTESIVRFPNITNLCPFGEVFNATRFASVYAWNRKRISNCVADYSVLYNSASFSTFKCYGVSPTKLNDLCFTNVYADSFVIRGDEVRQIAPGQTGKIADYNYKLPDDFTGCVIAWNSNNLDSKVGGNYNYLYRLFRKSNLKPFERDISTEIYQAGSTPCNGVEGFNCYFPLQSYGFQPTNGVGYQPYRVVVLSFELLHAPATVCGPKKSTNLVKNKCVNFNFNGLTGTGVLTESNKKFLPFQQFGRDIADTTDAVRDPQTLEILDITPCSFGGVSVITPGTNTSNQVAVLYQDVNCTEVPVAIHADQLTPTWRVYSTGSNVFQTRAGCLIGAEHVNNSYECDIPIGAGICASYQTQTNSPRRARSVASQSIIAYTMSLGAENSVAYSNNSIAIPTNFTISVTTEILPVSMTKTSVDCTMYICGDSTECSNLLLQYGSFCTQLNRALTGIAVEQDKNTQEVFAQVKQIYKTPPIKDFGGFNFSQILPDPSKPSKRSFIEDLLFNKVTLADAGFIKQYGDCLGDIAARDLICAQKFNGLTVLPPLLTDEMIAQYTSALLAGTITSGWTFGAGAALQIPFAMQMAYRFNGIGVTQNVLYENQKLIANQFNSAIGKIQDSLSSTASALGKLQDVVNQNAQALNTLVKQLSSNFGCISSVLNDILSRLDKVEAEVQIDCLITGRLQSLQTYVTQQLIRAAEIRASANLAATKMSECVLGQSKRVDFCGKGYHLMSFPQSAPHGVVFLHVTYVPAQEKNFTTAPAICHDGKAHFPREGVFVSNGTHWFVTQRNFYEPQIITTDNTFVSGNCDVVIGIVNNTVYDPLQPELDSFKEELDKYFKNHTSPDVDLGDISGINASVVNIQKEIDRLNEVAKNLNESLIDLQELGKYEQYIKWPWYIWLGFIAGLIAIVMVTIMLCCMTSCCSCLKGCCSCGSCCKFDEDDSEPVLKGVKLHYT

SEQ ID NO: 1114 - protein, 1273 aa, Artificial Sequence
  SARS-CoV-2/China/WF0004/2020__EPI_ISL_413694 spike protein (1-1273)(A972C_R995C)
MFVFLVLLPLVSSQCVNLTTRTQLPPAYTNSFTRGVYYPDKVFRSSVLHSTQDLFLPFFSNVTWFHAIHVSGTNGTKRFDNPVLPFNDGVYFASTEKSNIIRGWIFGTTLDSKTQSLLIVNNATNVVIKVCEFQFCNDPFLGVYYHKNNKSWTESEFRVYSSANNCTFEYVSQPFLMDLEGKQGNFKNLREFVFKNIDGYFKIYSKHTPINLVRDLPQGFSALEPLVDLPIGINITRFQTLLALHRSYLTPGDSSSGWTAGAAAYYVGYLQPRTFLLKYNENGTITDAVDCALDPLSETKCTLKSFTVEKGIYQTSNFRVQPTESIVRFPNITNLCPFGEVFNATRFASVYAWNRKRISNCVADYSVLYNSASFSTFKCYGVSPTKLNDLCFTNVYADSFVIRGDEVRQIAPGQTGKIADYNYKLPDDFTGCVIAWNSNNLDSKVGGNYNYLYRLFRKSNLKPFERDISTEIYQAGSTPCNGVEGFNCYFPLQSYGFQPTNGVGYQPYRVVVLSFELLHAPATVCGPKKSTNLVKNKCVNFNFNGLTGTGVLTESNKKFLPFQQFGRDIADTTDAVRDPQTLEILDITPCSFGGVSVITPGTNTSNQVAVLYQDVNCTEVPVAIHADQLTPTWRVYSTGSNVFQTRAGCLIGAEHVNNSYECDIPIGAGICASYQTQTNSPRRARSVASQSIIAYTMSLGAENSVAYSNNSIAIPTNFTISVTTEILPVSMTKTSVDCTMYICGDSTECSNLLLQYGSFCTQLNRALTGIAVEQDKNTQEVFAQVKQIYKTPPIKDFGGFNFSQILPDPSKPSKRSFIEDLLFNKVTLADAGFIKQYGDCLGDIAARDLICAQKFNGLTVLPPLLTDEMIAQYTSALLAGTITSGWTFGAGAALQIPFAMQMAYRFNGIGVTQNVLYENQKLIANQFNSAIGKIQDSLSSTASALGKLQDVVNQNAQALNTLVKQLSSNFGCISSVLNDILSRLDKVEAEVQIDCLITGRLQSLQTYVTQQLIRAAEIRASANLAATKMSECVLGQSKRFDFCGKGYHLMSFPQSAPHGVVFLHVTYVPAQEKNFTTAPAICHDGKAHFPREGVFVSNGTHWFVTQRNFYEPQIITTDNTFVSGNCDVVIGIVNNTVYDPLQPELDSFKEELDKYFKNHTSPDVDLGDISGINASVVNIQKEIDRLNEVAKNLNESLIDLQELGKYEQYIKWPWYIWLGFIAGLIAIVMVTIMLCCMTSCCSCLKGCCSCGSCCKFDEDDSEPVLKGVKLHYT

SEQ ID NO: 1115 - protein, 1273 aa, Artificial Sequence
  SARS-CoV-2/China/WF0028/2020__EPI_ISL_413791 spike protein (1-1273)(A972C_R995C)
MFVFLVLLPLVSSQCVNLTTRTQLPPAYTNSFTRGVYYPDKVFRSSVLHSTQDLFLPFFSNVTWFHAIHVSGTNGTKRFDNPVLPFNDGVYFASTEKSNIIRGWIFGTTLDSKTQSLLIVNNATNVVIKVCEFQFCNDPFLGVYYHKNNKSWMESEFRVYSSANNCTFEYVSQPFLMDLEGKQGNFKNLREFVFKNIDGYFKIYSKHTPINLVRDLPQGFSALEPLVDLPIGINITRFQTLLALHRSYLTPGDSSSGWTAGAAAYYVGYLQPRTFLLKYNENGTITDAVDCALDPLSETKCTLKSFTVEKGIYQTSNFRVQPTESIVRFPNITNLCPFGEVFNATRFASVYAWNRKRISNCVADYSVLYNSASFSTFKCYGVSPTKLNDLCFTNVYADSFVIRGDEVRQIAPGQTGKIADYNYKLPDDFTGCVIAWNSNNLDSKVGGNYNYLYRLFRKSNLKPFERDISTEIYQAGSTPCNGVEGFNCYFPLQSYGFQPTNGVGYQPYRVVVLSFELLHAPATVCGPKKSTNLVKNKCVNFNFNGLTGTGVLTESNKKFLPFQQFGRDIADTTDAVRDPQTLEILDITPCSFGGVSVITPGTNTSNQVAVLYQDVNCTEVPVAIHADQLTPTWRVYSTGSNVFQTRAGCLIGAEHVNNSYECDIPIGAGICASYQTQTNSPRRARSVASQSIIAYTMSLGAENSVAYSNNSIAIPTNFTISVTTEILPVSMTKTSVDCTMYICGDSTECSNLLLQYGSFCTQLNRALTGIAVEQDKNTQEVFAQVKQIYKTPPIKDFGGFNFSQILPDPSKPSKRSFIEDLLFNKVTLADAGFIKQYGDCLGDIAARDLICAQKFNGLTVLPPLLTDEMIAQYTSALLAGTITSGWTFGAGAALQIPFAMQMAYRFNGIGVTQNVLYENQKLIANQFNSAIGKIQDSLSSTASALGKLQDVVNQNAQALNTLVKQLSSNFGCISSVLNDILSRLDKVEAEVQIDCLITGRLQSLQTYVTQQLIRAAEIRASANLAATKMSECVLGQSKRVDFCGKGYHLMSFPQSAPHGVVFLHVTYVPAQEKNFTTAPAICHDGKAHFPREGVFVSNGTHWFVTQRNFYEPQIITTDNTFVSGNCDVVIGIVNNTVYDPLQPELESFKEELDKYFKNHTSPDVDLGDISGINASVVNIQKEIDRLNEVAKNLNESLIDLQELGKYEQYIKWPWYIWLGFIAGLIAIVMVTIMLCCMTSCCSCLKGCCSCGSCCKFDEDDSEPVLKGVKLHYT

SEQ ID NO: 1116 - protein, 1273 aa, Artificial Sequence
  SARS-CoV-2/2019-nCoV/USA-CruiseA-18/2020__MT159716.1 spike protein (1-1273)(A972C_R995C)
MFVFLVLLPLVSSQCVNLTTRTQLPPAYTNSFTRGVYYPDKVFRSSVLHSTQDLFLPFFSNVTWFHAIHVSGTNGTKRFDNPVLPFNDGVYFASTEKSNIIRGWIFGTTLDSKTQSLLIVNNATNVVIKVCEFQFCNDPFLGVYYHKNNKSWMESELRVYSSANNCTFEYVSQPFLMDLEGKQGNFKNLREFVFKNIDGYFKIYSKHTPINLVRDLPQGFSALEPLVDLPIGINITRFQTLLALHRSYLTPGDSSSGWTAGAAAYYVGYLQPRTFLLKYNENGTITDAVDCALDPLSETKCTLKSFTVEKGIYQTSNFRVQPTESIVRFPNITNLCPFGEVFNATRFASVYAWNRKRISNCVADYSVLYNSASFSTFKCYGVSPTKLNDLCFTNVYADSFVIRGDEVRQIAPGQTGKIADYNYKLPDDFTGCVIAWNSNNLDSKVGGNYNYLYRLFRKSNLKPFERDISTEIYQAGSTPCNGVEGFNCYFPLQSYGFQPTNGVGYQPYRVVVLSFELLHAPATVCGPKKSTNLVKNKCVNFNFNGLTGTGVLTESNKKFLPFQQFGRDIADTTDAVRDPQTLEILDITPCSFGGVSVITPGTNTSNQVAVLYQDVNCTEVPVAIHADQLTPTWRVYSTGSNVFQTRAGCLIGAEHVNNSYECDIPIGAGICASYQTQTNSPRRARSVASQSIIAYTMSLGAENSVAYSNNSIAIPTNFTISVTTEILPVSMTKTSVDCTMYICGDSTECSNLLLQYGSFCTQLNRALTGIAVEQDKNTQEVFAQVKQIYKTPPIKDFGGFNFSQILPDPSKPSKRSFIEDLLFNKVTLADAGFIKQYGDCLGDIAARDLICAQKFNGLTVLPPLLTDEMIAQYTSALLAGTITSGWTFGAGAALQIPFAMQMAYRFNGIGVTQNVLYENQKLIANQFNSAIGKIQDSLSSTASALGKLQDVVNQNAQALNTLVKQLSSNFGCISSVLNDILSRLDKVEAEVQIDCLITGRLQSLQTYVTQQLIRAAEIRASANLAATKMSECVLGQSKRVDFCGKGYHLMSFPQSAPHGVVFLHVTYVPAQEKNFTTAPAICHDGKAHFPREGVFVSNGTHWFVTQRNFYEPQIITTDNTFVSGNCDVVIGIVNNTVYDPLQPELDSFKEELDKYFKNHTSPDVDLGDISGINASVVNIQKEIDRLNEVAKNLNESLIDLQELGKYEQYIKWPWYIWLGFIAGLIAIVMVTIMLCCMTSCCSCLKGCCSCGSCCKFDEDDSEPVLKGVKLHYT

SEQ ID NO: 1117 - protein, 1273 aa, Artificial Sequence
  SARS-CoV-2/SARS-CoV-2/Yunnan-01/human/2020/CHN__MT049951.1 spike protein (1-1273)(A972C_R995C)
MFVFLVLLPLVSSQCVNLTTRTQLPPANTNSFTRGVYYPDKVFRSSVLHSTQDLFLPFFSNVTWFHAIHVSGTNGTKRFDNPVLPFNDGVYFASTEKSNIIRGWIFGTTLDSKTQSLLIVNNATNVVIKVCEFQFCNDPFLGVYYHKNNKSWMESEFRVYSSANNCTFEYVSQPFLMDLEGKQGNFKNLREFVFKNIDGYFKIYSKHTPINLVRDLPQGFSALEPLVDLPIGINITRFQTLLALHRSYLTPGDSSSGWTAGAAAYYVGYLQPRTFLLKYNENGTITDAVDCALDPLSETKCTLKSFTVEKGIYQTSNFRVQPTESIVRFPNITNLCPFGEVFNATRFASVYAWNRKRISNCVADYSVLYNSASFSTFKCYGVSPTKLNDLCFTNVYADSFVIRGDEVRQIAPGQTGKIADYNYKLPDDFTGCVIAWNSNNLDSKVGGNYNYLYRLFRKSNLKPFERDISTEIYQAGSTPCNGVEGFNCYFPLQSYGFQPTNGVGYQPYRVVVLSFELLHAPATVCGPKKSTNLVKNKCVNFNFNGLTGTGVLTESNKKFLPFQQFGRDIADTTDAVRDPQTLEILDITPCSFGGVSVITPGTNTSNQVAVLYQDVNCTEVPVAIHADQLTPTWRVYSTGSNVFQTRAGCLIGAEHVNNSYECDIPIGAGICASYQTQTNSPRRARSVASQSIIAYTMSLGAENSVAYSNNSIAIPTNFTISVTTEILPVSMTKTSVDCTMYICGDSTECSNLLLQYGSFCTQLNRALTGIAVEQDKNTQEVFAQVKQIYKTPPIKDFGGFNFSQILPDPSKPSKRSFIEDLLFNKVTLADAGFIKQYGDCLGDIAARDLICAQKFNGLTVLPPLLTDEMIAQYTSALLAGTITSGWTFGAGAALQIPFAMQMAYRFNGIGVTQNVLYENQKLIANQFNSAIGKIQDSLSSTASALGKLQDVVNQNAQALNTLVKQLSSNFGCISSVLNDILSRLDKVEAEVQIDCLITGRLQSLQTYVTQQLIRAAEIRASANLAATKMSECVLGQSKRVDFCGKGYHLMSFPQSAPHGVVFLHVTYVPAQEKNFTTAPAICHDGKAHFPREGVFVSNGTHWFVTQRNFYEPQIITTDNTFVSGNCDVVIGIVNNTVYDPLQPELDSFKEELDKYFKNHTSPDVDLGDISGINASVVNIQKEIDRLNEVAKNLNESLIDLQELGKYEQYIKWPWYIWLGFIAGLIAIVMVTIMLCCMTSCCSCLKGCCSCGSCCKFDEDDSEPVLKGVKLHYT

SEQ ID NO: 1118 - protein, 1273 aa, Artificial Sequence
  SARS-CoV-2/USA/WA-UW292/2020__EPI_ISL_418077 spike protein (1-1273)(A972C_R995C)
MFVFLVLLPLVSSQCVNLTTRTQLPPAYTNSFTRGVYYPDKVFRSSVLHSTQDLFLPFFSNVTWFHAIHVSGTNGTKRFDNPVLPFNDGVYFASTEKSNIIRGWIFGTTLDSKTQSLLIVNNATNVVIKVCEFQFCNDPFLGVYYHKNNKSWMESEFRVYSSANNCTFEYVSQPFLMDLEGKQGNFKNLREFVFKNIDGYFKIYSKHTPINLVRDLPQGFSALEPLVDLPIGINITRFQTLLALHRSYLTPGDSSSGWTAGAAAYYVGYLQPRTFLLKYNENGTITDAVDCALDPLSETKCTLKSFTVEKGIYQTSNFRVQPTESIVRFPNITNLCPFGEVFNATRFASVYAWNRKRISNCVADYSVLYNSASFSTFKCYGVSPTKLNDLCFTNVYADSFVIRGDEVRQIAPGQTGKIADYNYKLPDDFTGCVIAWNSNNLDSKVGGNYNYLYRLFRKSNLKPFERDISTEIYQASSTPCNGVEGFNCYFPLQSYGFQPTNGVGYQPYRVVVLSFELLHAPATVCGPKKSTNLVKNKCVNFNFNGLTGTGVLTESNKKFLPFQQFGRDIADTTDAVRDPQTLEILDITPCSFGGVSVITPGTNTSNQVAVLYQDVNCTEVPVAIHADQLTPTWRVYSTGSNVFQTRAGCLIGAEHVNNSYECDIPIGAGICASYQTQTNSPRRARSVASQSIIAYTMSLGAENSVAYSNNSIAIPTNFTISVTTEILPVSMTKTSVDCTMYICGDSTECSNLLLQYGSFCTQLNRALTGIAVEQDKNTQEVFAQVKQIYKTPPIKDFGGFNFSQILPDPSKPSKRSFIEDLLFNKVTLADAGFIKQYGDCLGDIAARDLICAQKFNGLTVLPPLLTDEMIAQYTSALLAGTITSGWTFGAGAALQIPFAMQMAYRFNGIGVTQNVLYENQKLIANQFNSAIGKIQDSLSSTASALGKLQDVVNQNAQALNTLVKQLSSNFGCISSVLNDILSRLDKVEAEVQIDCLITGRLQSLQTYVTQQLIRAAEIRASANLAATKMSECVLGQSKRVDFCGKGYHLMSFPQSAPHGVVFLHVTYVPAQEKNFTTAPAICHDGKAHFPREGVFVSNGTHWFVTQRNFYEPQIITTDNTFVSGNCDVVIGIVNNTVYDPLQPELDSFKEELDKYFKNHTSPDVDLGDISGINASVVNIQKEIDRLNEVAKNLNESLIDLQELGKYEQYIKWPWYIWLGFIAGLIAIVMVTIMLCCMTSCCSCLKGCCSCGSCCKFDEDDSEPVLKGVKLHYT

SEQ ID NO: 1119 - protein, 1273 aa, Artificial Sequence
  SARS-CoV-2/Iceland/192/2020__EPI_ISL_417819 spike protein (1-1273)(A972C_R995C)
MFVFFVLLPLVSSQCVNLTTRTQLPPAYTNSFTRGVYYPDKVFRSSVLHSTQDLFLPFFSNVTWFHAIHVSGTNGTKRFDNPVLPFNDGVYFASTEKSNIIRGWIFGTTLDSKTQSLLIVNNATNVVIKVCEFQFCNDPFLGVYYHKNNKSWMESEFRVYSSANNCTFEYVSQPFLMDLEGKQGNFKNLREFVFKNIDGYFKIYSKHTPINLVRDLPQGFSALEPLVDLPIGINITRFQTLLALHRSYLTPGDSSSGWTAGAAAYYVGYLQPRTFLLKYNENGTITDAVDCALDPLSETKCTLKSFTVEKGIYQTSNFRVQPTESIVRFPNITNLCPFGEVFNATRFASVYAWNRKRISNCVADYSVLYNSASFSTFKCYGVSPTKLNDLCFTNVYADSFVIRGDEVRQIAPGQTGKIADYNYKLPDDFTGCVIAWNSNNLDSKVGGNYNYLYRLFRKSNLKPFERDISTEIYQAGSTPCNGVEGFNCYFPLQSYGFQPTNGVGYQPYRVVVLSFELLHAPATVCGPKKSTNLVKNKCVNFNFNGLTGTGVLTESNKKFLPFQQFGRDIADTTDAVRDPQTLEILDITPCSFGGVSVITPGTNTSNQVAVLYQGVNCTEVPVAIHADQLTPTWRVYSTGSNVFQTRAGCLIGAEHVNNSYECDIPIGAGICASYQTQTNSPRRARSVASQSIIAYTMSLGAENSVAYSNNSIAIPTNFTISVTTEILPVSMTKTSVDCTMYICGDSTECSNLLLQYGSFCTQLNRALTGIAVEQDKNTQEVFAQVKQIYKTPPIKDFGGFNFSQILPDPSKPSKRSFIEDLLFNKVTLADAGFIKQYGDCLGDIAARDLICAQKFNGLTVLPPLLTDEMIAQYTSALLAGTITSGWTFGAGAALQIPFAMQMAYRFNGIGVTQNVLYENQKLIANQFNSAIGKIQDSLSSTASALGKLQDVVNQNAQALNTLVKQLSSNFGCISSVLNDILSRLDKVEAEVQIDCLITGRLQSLQTYVTQQLIRAAEIRASANLAATKMSECVLGQSKRVDFCGKGYHLMSFPQSAPHGVVFLHVTYVPAQEKNFTTAPAICHDGKAHFPREGVFVSNGTHWFVTQRNFYEPQIITTDNTFVSGNCDVVIGIVNNTVYDPLQPELDSFKEELDKYFKNHTSPDVDLGDISGINASVVNIQKEIDRLNEVAKNLNESLIDLQELGKYEQYIKWPWYIWLGFIAGLIAIVMVTIMLCCMTSCCSCLKGCCSCGSCCKFDEDDSEPVLKGVKLHYT

SEQ ID NO: 1120 - protein, 1273 aa, Artificial Sequence
  SARS-CoV-2/Belgium/ULG-6939/2020__EPI_ISL_417020 spike protein (1-1273)(A972C_R995C)
MFVFLVLLPLVSSQCVNLTTRTQLPPAYTNSFTRGVYYPDKVFRSSVLHSTQDLFLPFFSNVTWFHAIHVSGTNGTKRFDNPVLPFNDGVYFASTEKSNIIRGWIFGTTLDSKTQSLLIVNNATNVVIKVCEFQFCNDPFLGVYYHKNNKSWMESEFRVYSSANNCTFEYVSQPFLMDLEGKQGNFKNLREFVFKNIDGYFKIYSKHTPINLVRDLPQGFSALEPLVDLPIGINITRFQTLLALHRSYLTPGDSSSGWTAGAAAYYVGYLQPRTFLLKYNENGTITDAVDCALDPLSETKCTLKSFTVEKGIYQTSNFRVQPTESIVRFPNITNLCPFGEVFNATRFASVYAWNRKRISNCVADYSVLYNSASFSTFKCYGVSPTKLNDLCFTNVYADSFVIRGDEVRQIAPGQTGKIADYNYKLPDDFTGCVIAWNSNNLDSKVGGNYNYLYRLFRKSNLKPFERDISTEIYQAGSTPCNGVEGFNCYFPLQSYGFQPTNGVGYQPYRVVVLSFELLHAPATVCGPKKSTNLVKNKCVNFNFNGLTGTGVLTESNKKFLPFQQFGRDIADTTDAVRDPQTLEILDITPCSFGGVSVITPGTNTSNQVAVLYQGVNCTEVPVAIHADQLTPTWRVYSTGSNVFQTRAGCLIGAEHVNNSYECDIPIGAGICASYQTQTNSPRRARSVASQSIIAYTMSLGAENSVVYSNNSIAIPTNFTISVTTEILPVSMTKTSVDCTMYICGDSTECSNLLLQYGSFCTQLNRALTGIAVEQDKNTQEVFAQVKQIYKTPPIKDFGGFNFSQILPDPSKPSKRSFIEDLLFNKVTLADAGFIKQYGDCLGDIAARDLICAQKFNGLTVLPPLLTDEMIAQYTSALLAGTITSGWTFGAGAALQIPFAMQMAYRFNGIGVTQNVLYENQKLIANQFNSAIGKIQDSLSSTASALGKLQDVVNQNAQALNTLVKQLSSNFGCISSVLNDILSRLDKVEAEVQIDCLITGRLQSLQTYVTQQLIRAAEIRASANLAATKMSECVLGQSKRVDFCGKGYHLMSFPQSAPHGVVFLHVTYVPAQEKNFTTAPAICHDGKAHFPREGVFVSNGTHWFVTQRNFYEPQIITTDNTFVSGNCDVVIGIVNNTVYDPLQPELDSFKEELDKYFKNHTSPDVDLGDISGINASVVNIQKEIDRLNEVAKNLNESLIDLQELGKYEQYIKWPWYIWLGFIAGLIAIVMVTIMLCCMTSCCSCLKGCCSCGSCCKFDEDDSEPVLKGVKLHYT

SEQ ID NO: 1121 - protein, 1273 aa, Artificial Sequence
  SARS-CoV-2/France/HF2496/2020__EPI_ISL_418231 spike protein (1-1273)(A972C_R995C)
MFVFLVLLPLVSSQCVNLTTRTQLPPAYTNSFTRGVYYPDKVFRSSVLHSTQDLFLPFFSNVTWFHAIHVSGTNGTKRFDNPVLPFNDGVYFASTEKSNIIRGWIFGTTLDSKTQSLLIVNNATNVVIKVCEFQFCNDPFLGVYYHKNNKSWMESEFRVYSSANNCTFEYVSQPFLMDLEGKQGNFKNLREFVFKNIDGYFKIYSKHTPINLVRDLPQGFSALEPLVDLPIGINITRFQTLLALHRSYLTPGDSSSGWTAGAAAYYVGYLQPRTFLLKYNENGTITDAVDCALDPLSETKCTLKSFTVEKGIYQTSNFRVQPTESIVRFPNITNLCPFGEVFNATRFASVYAWNRKRISNCVADYSVLYNSASFSTFKCYGVSPTKLNDLCFTNVYADSFVIRGDEVRQIAPGQTGKIADYNYKLPDDFTGCVIAWNSNNLDSKVGGNYNYLYRLFRKSNLKPFERDISTEIYQAGSTPCNGVEGFNCYFPLQSYGFQPTNGVGYQPYRVVVLSFELLHAPATVCGPKKSTNLVKNKCVNFNFNGLTGTGVLTESNKKFLPFQQFGRDIADTTDAVRDPQTLEILDITPCSFGGVSVITPGTNTSNQVAVLYQGVNCTEVPVAIHADQLTPTWRVYSTGSNVFQTRAGCLIGAEHVNNSYECDIPIGAGICASYQTQTNSPRRARSVASQSIIAYTMSLGAENSVAYSNNSIAIPTNFTISVTTEILPVSMTKTSVDCTMYICGDSTECSNLLLQYGSFCTQLNRALTGIAVEQDKNTQEVFAQVKQIYKTPPIKDFGGFNFSQILPDPSKPSKRSFIEDLLFNKVTLADAGFIKQYGDCLGDIVARDLICAQKFNGLTVLPPLLTDEMIAQYTSALLAGTITSGWTFGAGAALQIPFAMQMAYRFNGIGVTQNVLYENQKLIANQFNSAIGKIQDSLSSTASALGKLQDVVNQNAQALNTLVKQLSSNFGCISSVLNDILSRLDKVEAEVQIDCLITGRLQSLQTYVTQQLIRAAEIRASANLAATKMSECVLGQSKRVDFCGKGYHLMSFPQSAPHGVVFLHVTYVPAQEKNFTTAPAICHDGKAHFPREGVFVSNGTHWFVTQRNFYEPQIITTDNTFVSGNCDVVIGIVNNTVYDPLQPELDSFKEELDKYFKNHTSPDVDLGDISGINASVVNIQKEIDRLNEVAKNLNESLIDLQELGKYEQYIKWPWYIWLGFIAGLIAIVMVTIMLCCMTSCCSCLKGCCSCGSCCKFDEDDSEPVLKGVKLHYT

SEQ ID NO: 1122 - protein, 1273 aa, Artificial Sequence
  SARS-CoV-2/USA/WA-UW291/2020__EPI_ISL_418076 spike protein (1-1273)(A972C_R995C)
MFVFLVLLPLVSSQCVNLTTRTQLPPAYTNSFTRGVYYPDKVFRSSVLHSTQDLFLPFFSNVTWFHAIHVSGTNGTKRFDNPVLPFNDGVYFASTEKSNIIRGWIFGTTLDSKTQSLLIVNNATNVVIKVCEFQFCNDPFLGVYYHKNNKSWMESEFRVYSSANNCTFEYVSQPFLMDLEGKQGNFKNLREFVFKNIDGYFKIYSKHTPINLVRDLPQGFSALEPLVDLPIGINITRFQTLLALHRSYLTPGDSSSGWTAGAAAYYVGYLQPRTFLLKYNENGTITDAVDCALDPLSETKCTLKSFTVEKGIYQTSNFRVQPTESIVRFPNITNLCPFGEVFNATRFASVYAWNRKRISNCVADYSVLYNSASFSTFKCYGVSPTKLNDLCFTNVYADSFVIRGDEVRQIAPGQTGKIADYNYKLPDDFTGCVIAWNSNNLDSKVGGNYNYLYRLFRKSNLKPFERDISTEIYQAGSTPCNGVEGFNCYFPLQSYGFQPTNGVGYQPYRVVVLSFELLHAPATVCGPKKSTNLVKNKCVNFNFNGLTGTGVLTESNKKFLPFQQFGRDIADTTDAVRDPQTLEILDITPCSFGGVSVITPGTNTSNQVAVLYQGVNCTEVPVAIHADQLTPTWRVYSTGSNVFQTRAGCLIGAEHVNNSYECDIPIGAGICASYQTQTNSPRRARSVASQSIIAYTMSLGAENSVAYSNNSIAIPTNFTISVTTEILPVSMTKTSVDCTMYICGDSTECSNLLLQYGSFCTQLNRALTGIAVEQDKNTQEVFAQVKQIYKTPPIKDFGGFNFSQILPDPSKPSKRSFIEDLLFNKVTLADAGFIKQYGDCLGDIAARDLICAQKFNGLTVLPPLLTDEMIAQYTSALLAGTITSGWTFGAGAALQIPFAMQMAYRFNGIGVTQNVLYENQKLIANQFNSAIGKIQYSLSSTASALGKLQDVVNQNAQALNTLVKQLSSNFGCISSVLNDILSRLDKVEAEVQIDCLITGRLQSLQTYVTQQLIRAAEIRASANLAATKMSECVLGQSKRVDFCGKGYHLMSFPQSAPHGVVFLHVTYVPAQEKNFTTAPAICHDGKAHFPREGVFVSNGTHWFVTQRNFYEPQIITTDNTFVSGNCDVVIGIVNNTVYDPLQPELDSFKEELDKYFKNHTSPDVDLGDISGINASVVNIQKEIDRLNEVAKNLNESLIDLQELGKYEQYIKWPWYIWLGFIAGLIAIVMVTIMLCCMTSCCSCLKGCCSCGSCCKFDEDDSEPVLKGVKLHYT

SEQ ID NO: 1123 - protein, 1273 aa, Artificial Sequence
  SARS-CoV-2/Portugal/PT0034/2020__EPI_ISL_418019 spike protein (1-1273)(A972C_R995C)
MFVFLVLLPLVSSQCVNLTTRTQLPPAYTNSFTRGVYYPDKVFRSSVLHSTQDLFLPFFSNVTWFHAIHVSGTNGTKRFDNPVLPFNDGVYFASTEKSNIIRGWIFGTTLDSKTQSLLIVNNATNVVIKVCEFQFCNDPFLGVYYHKNNKSWMESEFRVYSSANNCTFEYVSQPFLMDLEGKQGNFKNLREFVFKNIDGYFKIYSKHTPINLVRDLPQGFSALEPLVDLPIGINITRFQTLLALHRSYLTPGDSSSGWTAGAAAYYVGYLQPRTFLLKYNENGTITDAVDCALDPLSETKCTLKSFTVEKGIYQTSNFRVQPTESIVRFPNITNLCPFGEVFNATRFASVYAWNRKRISNCVADYSVLYNSASFSTFKCYGVSPTKLNDLCFTNVYADSFVIRGDEVRQIAPGQTGKIADYNYKLPDDFTGCVIAWNSNNLDSKVGGNYNYLYRLFRKSNLKPFERDISTEIYQAGSTPCNGVEGFNCYFPLQSYGFQPTNGVGYQPYRVVVLSFELLHAPATVCGPKKSTNLVKNKCVNFNFNGLTGTGVLTESNKKFLPFQQFGRDIADTTDAVRDPQTLEILDITPCSFGGVSVITPGTNTSNQVAVLYQGVNCTEVPVAIHADQLTPTWRVYSTGSNVFQTRAGCLIGAEHVNNSYECDIPIGAGICASYQTQTNSPRRARSVASQSIIAYTMSLGAENSVAYSNNSIAIPTNFTISVTTEILPVSMTKTSVDCTMYICGDSTECSNLLLQYGSFCTQLNRALTGIAVEQDKNTQEVFAQVKQIYKTPPIKDFGGFNFSQILPDPSKPSKRSFIEDLLFNKVTLADAGFIKQYGDCLGDIAARDLICAQKFNGLTVLPPLLTDEMIAQYTSALLAGTITSGWTFGAGAALQIPFAMQMAYRFNGIGVTQNVLYENQKLIANQFNSAIGKIQDSLSSTASALGKLQDVVNQNAQALNTLVKQLSSNFGCISSVLNDILSRLDKVEAEVQIDCLITGRLQSLQTYVTQQLIRAAEIRASANLAATKMSECVLGQSKRVDFCGKGYHLMSFPQSAPHGVVFLHVTYVPAQEKNFTTAPAICHDGKAHFPREGVFVSNGTHWFVTQRNFYEPQIITTDNTFVSGNCDVVIGIVNNTVYDPLQPELDSFKEELDKYFKNHTSPDVDLGDISGINASVVNIQKEIDRLNEVAKNLNESLIDLQELGKYEQYIKWPWYIWLGFIAGLIAIVMVTIMLCCITSCCSCLKGCCSCGSCCKFDEDDSEPVLKGVKLHYT

SEQ ID NO: 1124 - protein, 1273 aa, Artificial Sequence
  SARS-CoV-2/Iceland/202/2020__EPI_ISL_417750 spike protein (1-1273)(A972C_R995C)
MFVFLVLLPLVSSQCVNLTTRTQLPPAYTNSFTRGVYYPDKVFRSSVLHSTQDLFLPFFSNVTWFHAIHVSGTNGTKRFDNPVLPFNDGVYFASTEKSNIIRGWIFGTTLDSKTQSLLIVNNATNVVIKVCEFQFCNDPFLGVYYHKNNKSWMESEFRVYSSANNCTFEYVSQPFLMDLEGKQGNFKNLREFVFKNIDGYFKIYSKHTPINLVRDLPQGFSALEPLVDLPIGINITRFQTLLALHRSYLTPGDSSSGWTAGAAAYYVGYLQPRTFLLKYNENGTITDAVDCALDPLSETKCTLKSFTVEKGIYQTSNFRVQPTESIVRFPNITNLCPFGEVFNATRFASVYAWNRKRISNCVADYSVLYNSASFSTFKCYGVSPTKLNDLCFTNVYADSFVIRGDEVRQIAPGQTGKIADYNYKLPDDFTGCVIAWNSNNLDSKVGGNYNYLYRLFRKSNLKPFERDISTEIYQAGSTPCNGVEGFNCYFPLQSYGFQPTNGVGYQPYRVVVLSFELLHAPATVCGPKKSTNLVKNKCVNFNFNGLTGTGVLTESNKKFLPFQQFGRDIADTTDAVRDPQTLEILDITPCSFGGVSVITPGTNTSNQVAVLYQDVNCTEVPVAIHADQLTPTWRVYSTGSNVFQTRAGCLIGAEHVNNSYECDIPIGAGICASYQTQTNSPRRARSVASQSIIAYTMSLGAENSVAYSNNSIAIPTNFTISVTTEILPVSMTKTSVDCTMYICGDSTECSNLLLQYGSFCTQLNRALTGIAVEQDKNTQEVFAQVKQIYKTPPIKDFGGFNFSQILPDPSKPSKRSFIEDLLFNKVTLADAGFIKQYGDCLGDIAARDLICAQKFNGLTVLPPLLTDEMIAQYTSALLAGTITSGWTFGAGAALQIPFAMQMAYRFNGIGVTQNVLYENQKLIANQFNSAIGKIQDSLSSTASALGKLQDVVNQNAQALNTLVKQLSSNFGCISSVLNDILSRLDKVEAEVQIDCLITGRLQSLQTYVTQQLIRAAEIRASANLAATKMSECVLGQSKRVDFCGKGYHLMSFPQSAPHGVVFLHVTYVPAQEKNFTTAPAICHDGKAHFPREGVFVSNGTHWFVTQRNFYEPQIITTDNTFVSGNCDVVIGIVNNTVYDPLQPELDSFKEELDKYFKNHTSPDVDLGDIPGINASVVNIQKEIDRLNEVAKNLNESLIDLQELGKYEQYIKWPWYIWLGFIAGLIAIVMVTIMLCCMTSCCSCLKGCCSCGSCCKFDEDDSEPVLKGVKLHYT

SEQ ID NO: 1125 - protein, 1273 aa, Artificial Sequence
  SARS-CoV-2/USA/WA-UW261/2020__EPI_ISL_418046 spike protein (1-1273)(A972C_R995C)
MFVFLVLLPLVSSQCVNLTTRTQLPPAYTNSFTRGVYYPDKVFRSSVLHSTQDLFLPFFSNVTWFHAIHVSGTNGTKRFDNPVLPFNDGVYFASTEKSNIIRGWIFGTTLDSKTQSLLIVNNATNVVIKVCEFQFCNDPFLGVYYHKNNKSWMESEFRVYSSANNCTFEYVSQPFLMDLEGKQGNFKNLREFVFKNIDGYFKIYSKHTPINLVRDLPQGFSALEPLVDLPIGINITRFQTLLALHRSYLTPGDSSSGWTAGAAAYYVGYLQPRTFLLKYNENGTITDAVDCALDPLSETKCTLKSFTVEKGIYQTSNFRVQPTESIVRFPNITNLCPFGEVFNATRFTSVYAWNRKRISNCVADYSVLYNSASFSTFKCYGVSPTKLNDLCFTNVYADSFVIRGDEVRQIAPGQTGKIADYNYKLPDDFTGCVIAWNSNNLDSKVGGNYNYLYRLFRKSNLKPFERDISTEIYQAGSTPCNGVEGFNCYFPLQSYGFQPTNGVGYQPYRVVVLSFELLHAPATVCGPKKSTNLVKNKCVNFNFNGLTGTGVLTESNKKFLPFQQFGRDIADTTDAVRDPQTLEILDITPCSFGGVSVITPGTNTSNQVAVLYQDVNCTEVPVAIHADQLTPTWRVYSTGSNVFQTRAGCLIGAEHVNNSYECDIPIGAGICASYQTQTNSPRRARSVASQSIIAYTMSLGAENSVAYSNNSIAIPTNFTISVTTEILPVSMTKTSVDCTMYICGDSTECSNLLLQYGSFCTQLNRALTGIAVEQDKNTQEVFAQVKQIYKTPPIKDFGGFNFSQILPDPSKPSKRSFIEDLLFNKVTLADAGFIKQYGDCLGDIAARDLICAQKFNGLTVLPPLLTDEMIAQYTSALLAGTITSGWTFGAGAALQIPFAMQMAYRFNGIGVTQNVLYENQKLIANQFNSAIGKIQDSLSSTASALGKLQDVVNQNAQALNTLVKQLSSNFGCISSVLNDILSRLDKVEAEVQIDCLITGRLQSLQTYVTQQLIRAAEIRASANLAATKMSECVLGQSKRVDFCGKGYHLMSFPQSAPHGVVFLHVTYVPAQEKNFTTAPAICHDGKAHFPREGVFVSNGTHWFVTQRNFYEPQIITTDNTFVSGNCDVVIGIVNNTVYDPLQPELDSFKEELDKYFKNHTSPDVDLGDISGINASVVNIQKEIDRLNEVAKNLNESLIDLQELGKYEQYIKWPWYIWLGFIAGLIAIVMVTIMLCCMTSCCSCLKGCCSCGSCCKFDEDDSEPVLKGVKLHYT

SEQ ID NO: 1126 - protein, 1273 aa, Artificial Sequence
  SARS-CoV-2/Portugal/PT0035/2020__EPI_ISL_418020 spike protein (1-1273)(A972C_R995C)
MFVFLVLLPLVSSQCVNLTTRTQLPPAYTNSFTRGVYYPDKVFRSSVLHSTQDLFLPFFSNVTWFHAIHVSGTNGTKRFDNPVLPFNDGVYFASTEKSNIIRGWIFGTTLDSKTQSLLIVNNATNVVIKVCEFQFCNDPFLGVYYHKNNKSWMESEFRVYSSANNCTFEYVSQPFLMDLEGKQGNFKNLREFVFKNIDGYFKIYSKHTPINLVRDLPQGFSALEPLVDLPIGINITRFQTLLALHRSYLTPGDSSSGWTAGAAAYYVGYLQPRTFLLKYNENGTITDAVDCALDPLSETKCTLKSFTVEKGIYQTSNFRVQPTESIVRFPNITNLCPFGEVFNATRFASVYAWNRKRISNCVADYSVLYNSASFSTFKCYGVSPTKLNDLCFTNVYADSFVIRGDEVRQIAPGQTGKIADYNYKLPDDFTGCVIAWNSNNLDSKVGGNYNYLYRLFRKSNLKPFERDISTEIYQAGSTPCNGVEGFNCYFPLQSYGFQPTNGVGYQPYRVVVLSFELLHAPATVCGPKKSTNLVKNKCVNFNFNGLTGTGVLTESNKKFLPFQQFGRDIADTTDAVRDPQTLEILDITPCSFGGVSVITPGTNTSNQVAVLYQDVNCTEVPVAIHADQLTPTWRVYSTGSNVFQTRAGCLIGAEHVNNSYECDIPIGAGICASYQTQTNSPRRARSVASQSIIAYTMSLGAENSVAYSNNSIAIPTNFTISVTTEILPVSMTKTSVDCTMYICGDSTECSNLLLQYGSFCTQLNRALTGIAVEQDKNTQEVFAQVKQIYKTPPIKDFGGFNFSQILPDPSKPSKRSFIEDLLFNKVTLADAGFIKQYGDCLGDISARDLICAQKFNGLTVLPPLLTDEMIAQYTSALLAGTITSGWTFGAGAALQIPFAMQMAYRFNGIGVTQNVLYENQKLIANQFNSAIGKIQDSLSSTASALGKLQDVVNQNAQALNTLVKQLSSNFGCISSVLNDILSRLDKVEAEVQIDCLITGRLQSLQTYVTQQLIRAAEIRASANLAATKMSECVLGQSKRVDFCGKGYHLMSFPQSAPHGVVFLHVTYVPAQEKNFTTAPAICHDGKAHFPREGVFVSNGTHWFVTQRNFYEPQIITTDNTFVSGNCDVVIGIVNNTVYDPLQPELDSFKEELDKYFKNHTSPDVDLGDISGINASVVNIQKEIDRLNEVAKNLNESLIDLQELGKYEQYIKWPWYIWLGFIAGLIAIVMVTIMLCCMTSCCSCLKGCCSCGSCCKFDEDDSEPVLKGVKLHYT

SEQ ID NO: 1127 - protein, 1273 aa, Artificial Sequence
  SARS-CoV-2/USA/NY-NYUMC7/2020__EPI_ISL_418192 spike protein (1-1273)(A972C_R995C)
MFVFLVLLPLVSSQCVNLTTRTQLPPAYTNSFTRGVYYPDKVFRSSVLHSTQDLFLPFFSNVTWFHAIHVSGTNGTKRFDNPVLPFNDGVYFASTEKSNIIRGWIFGTTLDSKTQSLLIVNNATNVVIKVCEFQFCNDPFLGVYHHKNNKSWMESEFRVYSSANNCTFEYVSQPFLMDLEGKQGNFKNLREFVFKNIDGYFKIYSKHTPINLVRDLPQGFSALEPLVDLPIGINITRFQTLLALHRSYLTPGDSSSGWTAGAAAYYVGYLQPRTFLLKYNENGTITDAVDCALDPLSETKCTLKSFTVEKGIYQTSNFRVQPTESIVRFPNITNLCPFGEVFNATRFASVYAWNRKRISNCVADYSVLYNSASFSTFKCYGVSPTKLNDLCFTNVYADSFVIRGDEVRQIAPGQTGKIADYNYKLPDDFTGCVIAWNSNNLDSKVGGNYNYLYRLFRKSNLKPFERDISTEIYQAGSTPCNGVEGFNCYFPLQSYGFQPTNGVGYQPYRVVVLSFELLHAPATVCGPKKSTNLVKNKCVNFNFNGLTGTGVLTESNKKFLPFQQFGRDIADTTDAVRDPQTLEILDITPCSFGGVSVITPGTNTSNQVAVLYQGVNCTEVPVAIHADQLTPTWRVYSTGSNVFQTRAGCLIGAEHVNNSYECDIPIGAGICASYQTQTNSPRRARSVASQSIIAYTMSLGAENSVAYSNNSIAIPTNFTISVTTEILPVSMTKTSVDCTMYICGDSTECSNLLLQYGSFCTQLNRALTGIAVEQDKNTQEVFAQVKQIYKTPPIKDFGGFNFSQILPDPSKPSKRSFIEDLLFNKVTLADAGFIKQYGDCLGDIAARDLICAQKFNGLTVLPPLLTDEMIAQYTSALLAGTITSGWTFGAGAALQIPFAMQMAYRFNGIGVTQNVLYENQKLIANQFNSAIGKIQDSLSSTASALGKLQDVVNQNAQALNTLVKQLSSNFGCISSVLNDILSRLDKVEAEVQIDCLITGRLQSLQTYVTQQLIRAAEIRASANLAATKMSECVLGQSKRVDFCGKGYHLMSFPQSAPHGVVFLHVTYVPAQEKNFTTAPAICHDGKAHFPREGVFVSNGTHWFVTQRNFYEPQIITTDNTFVSGNCDVVIGIVNNTVYDPLQPELDSFKEELDKYFKNHTSPDVDLGDISGINASVVNIQKEIDRLNEVAKNLNESLIDLQELGKYEQYIKWPWYIWLGFIAGLIAIVMVTIMLCCMTSCCSCLKGCCSCGSCCKFDEDDSEPVLKGVKLHYT

SEQ ID NO: 1128 - protein, 1273 aa, Artificial Sequence
  SARS-CoV-2/Iceland/189/2020__EPI_ISL_417709 spike protein (1-1273)(A972C_R995C)
MFVFLVLLPLVSSQCVNLTTRTQLPPAYTNSFTRGVYYPDKVFRSSVLHSTQDLFLPFFSNVTWFHAIHVSGTNGTKRFDNPVLPFNDGVYFASTEKSNIIRGWIFGTTLDSKTQSLLIVNNATNVVIKVCEFQFCNDPFLGVYYHKNNKSWMESEFRVYSSANNCTFEYVSQPFLMDLEGKQGNFKNLREFVFKNIDGYFKIYSKHTPINLVRDLPQGFSALEPLVDLPIGINITRFQTLLALHRSYLTPGDSSSGWTAGAAAYYVGYLQPRTFLLKYNENGTITDAVDCALDPLSETKCTLKSFTVEKGIYQTSNFRVQPTESIVRFPNITNLCPFGEVFNATRFASVYAWNRKRISNCVADYSVLYNSASFSTFKCYGVSPTKLNDLCFTNVYADSFVIRGDEVRQIAPGQTGKIADYNYKLPDDFTGCVIAWNSNNLDSKVGGNYNYLYRLFRKSNLKPFERDISTEIYQAGSTPCNGVEGFNCYFPLQSYGFQPTNGVGYQPYRVVVLSFELLHAPATVCGPKKSTNLVKNKCVNFNFNGLTGTGVLTESNKKFLPFQQFGRDIADTTDAVRDPQTLEILDITPCSFGGVSVITPGTNTSNQVAVLYQGVNCTEVPVAIHADQLTPTWRVYSTGSNVFQTRAGCLIGAEHVNNSYECDIPIGAGICASYQTQTNSPRRARSVASQSIIAYTMSLGAENSVAYSNNSIAIPTNFTISVTTEILPVSMTKTSVDCTMYICGDSTECSNLLLQYGSFCTQLNRALTGIAVEQDKNTQEVFAQVKQIYKTPPIKDFGGFNFSQILPDPSKPSKRSFIEDLLFNKVTLADAGFTKQYGDCLGDIAARDLICAQKFNGLTVLPPLLTDEMIAQYTSALLAGTITSGWTFGAGAALQIPFAMQMAYRFNGIGVTQNVLYENQKLIANQFNSAIGKIQDSLSSTASALGKLQDVVNQNAQALNTLVKQLSSNFGCISSVLNDILSRLDKVEAEVQIDCLITGRLQSLQTYVTQQLIRAAEIRASANLAATKMSECVLGQSKRVDFCGKGYHLMSFPQSAPHGVVFLHVTYVPAQEKNFTTAPAICHDGKAHFPREGVFVSNGTHWFVTQRNFYEPQIITTDNTFVSGNCDVVIGIVNNTVYDPLQPELDSFKEELDKYFKNHTSPDVDLGDISGINASVVNIQKEIDRLNEVAKNLNESLIDLQELGKYEQYIKWPWYIWLGFIAGLIAIVMVTIMLCCMTSCCSCLKGCCSCGSCCKFDEDDSEPVLKGVKLHYT

SEQ ID NO: 1129 - protein, 1273 aa, Artificial Sequence
  SARS-CoV-2/Australia/NSW56/2020__EPI_ISL_417408 spike protein (1-1273)(A972C_R995C)
MFVFLVLLPLVSSQCVNLTTRTQLPPAYTNSFTRGVYYPDKVFRSSVLHSTQDLFLPFFSNVTWFHAIHVSGTNGTKRFDNPVLPFNDGVYFASTEKSNIIRGWIFGTTLDSKTQSLLIVNNATNVVIKVCEFQFCNDPFLGVYYHKNNKSWMESEFRVYSSANNCTFEYVSQPFLMDLEGKQGNFKNLREFVFKNIDGYFKIYSKHTPINLVRDLPQGFSALEPLVDLPIGINITRFQTLLALHRSYLTPGDSSSGWTAGAAAYYVGYLQPRTFLLKYNENGTITDAVDCALDPLSETKCTLKSFTVEKGIYQTSNFRVQPTESIVRFPNITNLCPFGEVFNATRFASVYAWNRKRISNCVADYSVLYNSASFSTFKCYGVSPTKLNDLCFTNVYADSFVIRGDEVRQIAPGQTGKIADYNYKLPDDFTGCVIAWNSNNLDSKVGGNYNYLYRLFRKSNLKPFERDISTEIYQAGSTPCNGVEGFNCYFPLQSYGFQPTNGVGYQPYRVVVLSFELLHAPATVCGPKKSTNLVKNKCVNFNFNGLTGTGVLTESNKKFLPFQQFGRDIADTTDAVRDPQTLEILDITPCSFGGVSVITPGTNTSNQVAVLYQDVNCTEVPVAIHADQLTPTWRVYSTGSNVFQTRAGCLIGAEHVNNSYECDIPIGAGICASYQTQTNSPRRARSVASQSIIAYTMSLGAENSVAYSNNSIAIPTNFTISVTTEILPVSMTKTSVDCTMYICGDSTECSNLLLQYGSFCTQLNRALTGIAVEQDKNTQEVFAQVKQIYKTPPIKDFGGFNFSQILPDSSKPSKRSFIEDLLFNKVTLADAGFIKQYGDCLGDIAARDLICAQKFNGLTVLPPLLTDEMIAQYTSALLAGTITSGWTFGAGAALQIPFAMQMAYRFNGIGVTQNVLYENQKLIANQFNSAIGKIQDSLSSTASALGKLQDVVNQNAQALNTLVKQLSSNFGCISSVLNDILSRLDKVEAEVQIDCLITGRLQSLQTYVTQQLIRAAEIRASANLAATKMSECVLGQSKRVDFCGKGYHLMSFPQSAPHGVVFLHVTYVPAQEKNFTTAPAICHDGKAHFPREGVFVSNGTHWFVTQRNFYEPQIITTDNTFVSGNCDVVIGIVNNTVYDPLQPELDSFKEELDKYFKNHTSPDVDLGDISGINASVVNIQKEIDRLNEVAKNLNESLIDLQELGKYEQYIKWPWYIWLGFIAGLIAIVMVTIMLCCMTSCCSCLKGCCSCGSCCKFDEDDSEPVLKGVKLHYT

SEQ ID NO: 1130 - protein, 1273 aa, Artificial Sequence
  SARS-CoV-2/Iceland/280/2020__EPI_ISL_417608 spike protein (1-1273)(A972C_R995C)
MFVFLVLLPLVSSQCVNLTTRTQLPPAYTNSFTRGVYYPDKVFRSSVLHSTQDLFLPFFSNVTWFHAIHVSGTNGTKRFDNPVLPFNDGVYFASTEKSNIIRGWIFGTTLDSKTQSLLIVNNATNVVIKVCEFQFCNDPFLGVYYHKNNKSWMESEFRVYSSANNCTFEYVSQPFLMDLEGKQGNFKNLREFVFKNIDGYFKIYSKHTPINLVRDLPQGFSALEPLVDLPIGINITRFQTLLALHRSYLTPGDSSSGWTAGAAAYYVGYLQPRTFLLKYNENGTITDAVDCALDPLSETKCTLKSFTVEKGIYQTSNFRVQPTESIVRFPNITNLCPFGEVFNATRFASVYAWNRKRISNCVADYSVLYNSASFSTFKCYGVSPTKLNDLCFTNVYADSFVIRGDEVRQIAPGQTGKIADYNYKLPDDFTGCVIAWNSNNLDSKVGGNYNYLYRLFRKSNLKPFERDISTEIYQAGSTPCNGVEGFNCYFPLQSYGFQPTNGVGYQPYRVVVLSFELLHAPATVCGPKKSTNLVKNKCVNFNFNGLTGTGVLTESNKKFLPFQQFGRDIADTTDAVRDPQTLEILDITPCSFGGVSVITPGTNTSNQVAVLYQGVNCTEVPVAIHADQLTPTWRVYSTGSNVFQTRAGCLIGAEHVNNSYECDIPIGAGICASYHTQTNSPRRARSVASQSIIAYTMSLGAENSVAYSNNSIAIPTNFTISVTTEILPVSMTKTSVDCTMYICGDSTECSNLLLQYGSFCTQLNRALTGIAVEQDKNTQEVFAQVKQIYKTPPIKDFGGFNFSQILPDPSKPSKRSFIEDLLFNKVTLADAGFIKQYGDCLGDIAARDLICAQKFNGLTVLPPLLTDEMIAQYTSALLAGTITSGWTFGAGAALQIPFAMQMAYRFNGIGVTQNVLYENQKLIANQFNSAIGKIQDSLSSTASALGKLQDVVNQNAQALNTLVKQLSSNFGCISSVLNDILSRLDKVEAEVQIDCLITGRLQSLQTYVTQQLIRAAEIRASANLAATKMSECVLGQSKRVDFCGKGYHLMSFPQSAPHGVVFLHVTYVPAQEKNFTTAPAICHDGKAHFPREGVFVSNGTHWFVTQRNFYEPQIITTDNTFVSGNCDVVIGIVNNTVYDPLQPELDSFKEELDKYFKNHTSPDVDLGDISGINASVVNIQKEIDRLNEVAKNLNESLIDLQELGKYEQYIKWPWYIWLGFIAGLIAIVMVTIMLCCMTSCCSCLKGCCSCGSCCKFDEDDSEPVLKGVKLHYT

SEQ ID NO: 1131 - protein, 1273 aa, Artificial Sequence
  SARS-CoV-2/Iceland/247/2020__EPI_ISL_417575 spike protein (1-1273)(A972C_R995C)
MFVFLVLLPLVSSQCVNLTTRTQLPPAYTNSFTRGVYYPDKVFRSSVLHSTQDLFLPFFSNVTWFHAIHVSGTNGTKRFDNPVLPFNDGVYFASTEKSNIIRGWIFGTTLDSKTQSLLIVNNATNVVIKVCEFQFCNDPFLGVYYHKNNKSWMESEFRVYSSANNCTFEYVSQPFLMDLEGKQGNFKNLREFVFKNIDGYFKIYSKHTPINLVRDLPQGFSALEPLVDLPIGINITRFQTLLALHRSYLTPGDSSSGWTAGAAAYYVGYLQPRTFLLKYNENGTITDAVDCALDPLSETKCTLKSFTVEKGIYQTSNFRVQPTESIVRFPNITNLCPFGEVFNATRFASVYAWNRKRISNCVADYSVLYNSASFSTFKCYGVSPTKLNDLCFTNVYADSFVIRGDEVRQIAPGQTGKIADYNYKLPDDFTGCVIAWNSNNLDSKVGGNYNYLYRLFRKSNLKPFERDISTEIYQAGSTPCNGVEGFNCYFPLQSYGFQPTNGVGYQPYRVVVLSFELLHAPATVCGPKKSTNLVKNKCVNFNFNGLTGTGVLTESNKKFLPFQQFGRDIADTTDAVRDPQTLEILDITPCSFGGVSVITPGTNTSNQVAVLYQGVNCTEVPVAIHADQLTPTWRVYSTGSNVFQTRAGCLIGAEHVNNSYECDIPIGAGICASYQTQTNSPRRARSVASQSIIAYTMSLGAENSVAYSNNSIAIPTNFTISVTTEILPVSMTKTSVDCTMYICGDSTECSNLLLQYGSFCTQLNRALTGIAVEQDKNTQEVFAQVKQIYKTPPIKDFGGFNFSQILPDPSKPSKRSFIEDLLFNKVTLADAGFIKQYGDCLGDIAARDLICAQKFNGLTVLPPLLTDEMIAQYTSALLAGTITSGWTFGAGAALQIPFAMQMAYRFNGIGVTQNVLYENQKLIANQFNSAIGKIQDSLSSTASALGKLQDVVNQNAQALNTLVKQLSSNFGCISSVLNDILSRLDKVEAEVQIDCLITGRLQSLQTYVTQQLIRAAEIRASANLAATKMSECVLGQSKRVDFCGKGYHLMSFPQSAPHGVVFLHVTYVPAQEKNFTTAPAICHDGKAHFPREGVFVSNGTHWFVTQRNFYEPQIITTDNTFVSGNCDVVIGIVNNTVYDPLQPELDSFKEELDKYFKNHTSPDVDLGDISGINASVVNIQKEIDRLNEVAKNLNESLIDLQELGKYEQYIKWPWYIWLGFIAGLIAIVIVTIMLCCMTSCCSCLKGCCSCGSCCKFDEDDSEPVLKGVKLHYT

SEQ ID NO: 1132 - protein, 1273 aa, Artificial Sequence
  SARS-CoV-2/Iceland/238/2020__EPI_ISL_417566 spike protein (1-1273)(A972C_R995C)
MFVFLVLLPLVSSQCVNLTTRTQLPPAYTNSFTRGVYYPDKVFRSSVLHSTQDLFLPFFSNVTWFHAIHVSGTNGTKRFDNPVLPFNDGVYFASTEKSNIIRGWIFGTTLDSKTQSLLIVNNATNVVIKVCEFQFCNDPFLGVYYHKNNKSWMESEFRVYSSANNCTFEYVSQPFLMDLEGKQGNFKNLREFVFKNIDGYFKIYSKHTPINLVRDLPQGFSALEPLVDLPIGINITRFQTLLALHRSYLTPGDSSSGWTAGAAAYYVGYLQPRTFLLKYNENGTITDAVDCALDPLSETKCTLKSFTVEKGIYQTSNFRVQPTESIVRFPNITNLCPFGEVFNATRFASVYAWNRKRISNCVADYSVLYNSASFSTFKCYGVSPTKLNDLCFTNVYADSFVIRGDEVRQIAPGQTGKIADYNYKLPDDFTGCVIAWNSNNLDSKVGGNYNYLYRLFRKSNLKPFERDISTEIYQAGSTPCNGVEGFNCYFPLQSYGFQPTNGVGYQPYRVVVLSFELLHAPATVCGPKKSTNLVKNKCVNFNFNGLTGTGVLTESNKKFLPFQQFGRDIADTTDAVRDPQTLEILDITPCSFGGVSVITPGTNTSNQVAVLYQGVNCTEVPVAIHADQLTPTWRVYSTGSNVFQTRAGCLIGAEHVNNSYECDIPIGAGICASYQTQTNSPRRARSVASQSIIAYTMSLGAENSVAYSNNSIAIPTNFTISVTTEILPVSMTKTSVDCTMYICGDSTECSNLLLQYGSFCTQLNRALTGIAVEQDKNTQEVFAQVKQIYKTPPIKDFGGFNFSQILPDPSKPSKRSFIEDLLFNKVTLADVGFIKQYGDCLGDIAARDLICAQKFNGLTVLPPLLTDEMIAQYTSALLAGTITSGWTFGAGAALQIPFAMQMAYRFNGIGVTQNVLYENQKLIANQFNSAIGKIQDSLSSTASALGKLQDVVNQNAQALNTLVKQLSSNFGCISSVLNDILSRLDKVEAEVQIDCLITGRLQSLQTYVTQQLIRAAEIRASANLAATKMSECVLGQSKRVDFCGKGYHLMSFPQSAPHGVVFLHVTYVPAQEKNFTTAPAICHDGKAHFPREGVFVSNGTHWFVTQRNFYEPQIITTDNTFVSGNCDVVIGIVNNTVYDPLQPELDSFKEELDKYFKNHTSPDVDLGDISGINASVVNIQKEIDRLNEVAKNLNESLIDLQELGKYEQYIKWPWYIWLGFIAGLIAIVMVTIMLCCMTSCCSCLKGCCSCGSCCKFDEDDSEPVLKGVKLHYT

SEQ ID NO: 1133 - protein, 1273 aa, Artificial Sequence
  SARS-CoV-2/Greece/16/2020__EPI_ISL_418265 spike protein (1-1273)(A972C_R995C)
MFVFLVLLPLVSSQCVNLTTRTQLPPAYTNSFTRGVYYPDKVFRSSVLHSTQDLFLPFFSNVTWFHAIHVSGTNGTKRFDNPVLPFNDGVYFASTEKSNIIRGWIFGTTLDSKTQSLLIVNNATNVVIKVCEFQFCNDPFLGVYYHKNNKSWMESEFRVYSSANNCTFEYVSQPFLMDLEGKQGNFKNLREFVFKNVDGYFKIYSKHTPINLVRDLPQGFSALEPLVDLPIGINITRFQTLLALHRSYLTPGDSSSGWTAGAAAYYVGYLQPRTFLLKYNENGTITDAVDCALDPLSETKCTLKSFTVEKGIYQTSNFRVQPTESIVRFPNITNLCPFGEVFNATRFASVYAWNRKRISNCVADYSVLYNSASFSTFKCYGVSPTKLNDLCFTNVYADSFVIRGDEVRQIAPGQTGKIADYNYKLPDDFTGCVIAWNSNNLDSKVGGNYNYLYRLFRKSNLKPFERDISTEIYQAGSTPCNGVEGFNCYFPLQSYGFQPTNGVGYQPYRVVVLSFELLHAPATVCGPKKSTNLVKNKCVNFNFNGLTGTGVLTESNKKFLPFQQFGRDIADTTDAVRDPQTLEILDITPCSFGGVSVITPGTNTSNQVAVLYQDVNCTEVPVAIHADQLTPTWRVYSTGSNVFQTRAGCLIGAEHVNNSYECDIPIGAGICASYQTQTNSPRRARSVASQSIIAYTMSLGAENSVAYSNNSIAIPTNFTISVTTEILPVSMTKTSVDCTMYICGDSTECSNLLLQYGSFCTQLNRALTGIAVEQDKNTQEVFAQVKQIYKTPPIKDFGGFNFSQILPDPSKPSKRSFIEDLLFNKVTLADAGFIKQYGDCLGDIAARDLICAQKFNGLTVLPPLLTDEMIAQYTSALLAGTITSGWTFGAGAALQIPFAMQMAYRFNGIGVTQNVLYENQKLIANQFNSAIGKIQDSLSSTASALGKLQDVVNQNAQALNTLVKQLSSNFGCISSVLNDILSRLDKVEAEVQIDCLITGRLQSLQTYVTQQLIRAAEIRASANLAATKMSECVLGQSKRVDFCGKGYHLMSFPQSAPHGVVFLHVTYVPAQEKNFTTAPAICHDGKAHFPREGVFVSNGTHWFVTQRNFYEPQIITTDNTFVSGNCDVVIGIVNNTVYDPLQPELDSFKEELDKYFKNHTSPDVDLGDISGINASVVNIQKEIDRLNEVAKNLNESLIDLQELGKYEQYIKWPWYIWLGFIAGLIAIVMVTIMLCCMTSCCSCLKGCCSCGSCCKFDEDDSEPVLKGVKLHYT

SEQ ID NO: 1134 - protein, 1273 aa, Artificial Sequence
  SARS-CoV-2/Iceland/319/2020__EPI_ISL_417648 spike protein (1-1273)(A972C_R995C)
MFVFLVLLPLVSSQCVNLTTRTQLPPAYTNSFTRGVYYPDKVFRSSVLHSTQDLFLPFFSNVTWFHAIHVSGTNGTKRFDNPVLPFNDGVYFASTEKSNIIRGWIFGTTLDSKTQSLLIVNNATNVVIKVCEFQFCNDPFLGVYYHKNNKSWMESEFRVYSSANNCTFEYVSQPFLIDLEGKQGNFKNLREFVFKNIDGYFKIYSKHTPINLVRDLPQGFSALEPLVDLPIGINITRFQTLLALHRSYLTPGDSSSGWTAGAAAYYVGYLQPRTFLLKYNENGTITDAVDCALDPLSETKCTLKSFTVEKGIYQTSNFRVQPTESIVRFPNITNLCPFGEVFNATRFASVYAWNRKRISNCVADYSVLYNSASFSTFKCYGVSPTKLNDLCFTNVYADSFVIRGDEVRQIAPGQTGKIADYNYKLPDDFTGCVIAWNSNNLDSKVGGNYNYLYRLFRKSNLKPFERDISTEIYQAGSTPCNGVEGFNCYFPLQSYGFQPTNGVGYQPYRVVVLSFELLHAPATVCGPKKSTNLVKNKCVNFNFNGLTGTGVLTESNKKFLPFQQFGRDIADTTDAVRDPQTLEILDITPCSFGGVSVITPGTNTSNQVAVLYQGVNCTEVPVAIHADQLTPTWRVYSTGSNVFQTRAGCLIGAEHVNNSYECDIPIGAGICASYQTQTNSPRRARSVASQSIIAYTMSLGAENSVAYSNNSIAIPTNFTISVTTEILPVSMTKTSVDCTMYICGDSTECSNLLLQYGSFCTQLNRALTGIAVEQDKNTQEVFAQVKQIYKTPPIKDFGGFNFSQILPDPSKPSKRSFIEDLLFNKVTLADAGFIKQYGDCLGDIAARDLICAQKFNGLTVLPPLLTDEMIAQYTSALLAGTITSGWTFGAGAALQIPFAMQMAYRFNGIGVTQNVLYENQKLIANQFNSAIGKIQDSLSSTASALGKLQDVVNQNAQALNTLVKQLSSNFGCISSVLNDILSRLDKVEAEVQIDCLITGRLQSLQTYVTQQLIRAAEIRASANLAATKMSECVLGQSKRVDFCGKGYHLMSFPQSAPHGVVFLHVTYVPAQEKNFTTAPAICHDGKAHFPREGVFVSNGTHWFVTQRNFYEPQIITTDNTFVSGNCDVVIGIVNNTVYDPLQPELDSFKEELDKYFKNHTSPDVDLGDISGINASVVNIQKEIDRLNEVAKNLNESLIDLQELGKYEQYIKWPWYIWLGFIAGLIAIVMVTIMLCCMTSCCSCLKGCCSCGSCCKFDEDDSEPVLKGVKLHYT

SEQ ID NO: 1135 - protein, 1273 aa, Artificial Sequence
  SARS-CoV-2/Congo/94/2020__EPI_ISL_417947 spike protein (1-1273)(A972C_R995C)
MFVFLVLLPLVSSQCVNLTTRTQLPPAYTNSFTRGVYYPDKVFRSSVLHSTQDLFLPFFSNVTWFHAIHVSGTNGTKRFDNPVLPFNDGVYFASTEKSNIIRGWIFGTTLDSKTQSLLIVNNATNVVIKVCEFQFCNDPFLGVYYHKNNKSWMESEFRVYSSANNCTFEYVSQPFLMDLEGKQGNFKNLREFVFKNIDGYFKIYSKHTPINLVRDLPQGFSALEPLVDLPIGINITRFQTLLALHRSYLTPGDSSSGWTAGAAAYYVGYLQPRTFLLKYNENGTITDAVDCALDPLSETKCTLKSFTVEKGIYQTSNFRVQPTESIVRFPNITNLCPFGEVFNATRFASVYAWNRKRISNCVADYSVLYNSASFSTFKCYGVSPTKLNDLCFTNVYADSFVIRGDEVRQIAPGQTGKIADYNYKLPDDFTGCVIAWNSNNLDSKVGGNYNYLYRLFRKSNLKPFERDISTEIYQAGSTPCNGVEGFNCYFPLQSYGFQPTNGVGYQPYRVVVLSFELLHAPATVCGPKKSTNLVKNKCVNFNFNGLTGTGVLTESNKKFLPFQQFGRDIADTTDAVRDPQTLEILDITPCSFGGVSVITPGTNTSNQVAVLYQGVNCTEVPVAIHADQLTPTWRVYSTGSNVFQTRAGCLIGAEHVNNSYECDIPIGAGICASYQTQTNSPRRARSVASQSIIAYTMSLGAENSVAYSNNSIAIPTNFTISVTTEILPVSMTKTSVDCTMYICGDSTECSNLLLQYGSFCTQLNRALTGIAVEQDKNTQEVFAQVKQIYKTPPIKDFGGFNFSQILPDPSKPSKRSFIEDILFNKVTLADAGFIKQYGDCLGDIAARDLICAQKFNGLTVLPPLLTDEMIAQYTSALLAGTITSGWTFGAGAALQIPFAMQMAYRFNGIGVTQNVLYENQKLIANQFNSAIGKIQDSLSSTASALGKLQDVVNQNAQALNTLVKQLSSNFGCISSVLNDILSRLDKVEAEVQIDCLITGRLQSLQTYVTQQLIRAAEIRASANLAATKMSECVLGQSKRVDFCGKGYHLMSFPQSAPHGVVFLHVTYVPAQEKNFTTAPAICHDGKAHFPREGVFVSNGTHWFVTQRNFYEPQIITTDNTFVSGNCDVVIGIVNNTVYDPLQPELDSFKEELDKYFKNHTSPDVDLGDISGINASVVNIQKEIDRLNEVAKNLNESLIDLQELGKYEQYIKWPWYIWLGFIAGLIAIVMVTIMLCCMTSCCSCLKGCCSCGSCCKFDEDDSEPVLKGVKLHYT

SEQ ID NO: 1136 - protein, 1273 aa, Artificial Sequence
  SARS-CoV-2/Congo/158/2020__EPI_ISL_417950 spike protein (1-1273)(A972C_R995C)
MFVFLVLLPLVSSQCVNLTTRTQLPPAYTNSFTRGVYYPDKVFRSSVLHSTQDLFLPFFSNVTWFHAIHVSGTNGTKRFDNPVLPFNDGVYFASTEKSNIIRGWIFGTTLDSKTQSLLIVNNATNVVIKVCEFQFCNDPFLGVYYHKNNKSWMESEFRVYSSANNCTFEYVSQPFLMDLEGKQGNFKNLREFVFKNIDGYFKIYSKHTPINLVRDLPQGFSALEPLVDLPIGINITRFQTLLALHRSYLTPGDSSSGWTAGAAAYYVGYLQPRTFLLKYNENGTITDAVDCALDPLSETKCTLKSFTVEKGIYQTSNFRVQPTESIVRFPNITNLCPFGEVFNATRFASVYAWNRKRISNCVADYSVLYNSASFSTFKCYGVSPTKLNDLCFTNVYADSFVIRGDEVRQIAPGQTGKIADYNYKLPDDFTGCVIAWNSNNLDSKVGGNYNYLYRLFRKSNLKPFERDISTEIYQAGSTPCNGVEGFNCYFPLQSYGFQPTNGVGYQPYRVVVLSFELLHAPATVCGPKKSTNLVKNKCVNFNFNGLTGTGVLTESNKKFLPFQQFGRDIADTTDAVRDPQTLEILDITPCSFGGVSVITPGTNTSNQVAVLYQDVNCTEVPVAIHADQLTPTWRVYSTGSNVFQTRAGCLIGAEHVNNSYECDIPIGAGICASYQTQTNSPRRARSVASQSIIAYTMSLGAENSVAYSNNSIAIPTNFTISVTTEILPVSMTKTSVDCTMYICGDSTECSNLLLQYGSFCTQLNRALTGIAVEQDKNTQEVFAQVKQIYKTPPIKDFGGFNFSQILPDPSKPSKRSFIEDLLFNKVTLADAGFIKQYGDCLGDIAARDLICAQKFNGLTVLPPLLTDEMIAQYTSALLAGTITSGWTFGAGAALQIPFAMQMAYRFNGIGVTQNVLYENQKLIANQFNSAIGKIQDSLSSTASALGKLQDVVNQNAQALNTLVKQLSSNFGCISSVLNDILSRLDKVEAEVQIDCLITGRLQSLQTYVTQQLIRAAEIRASANLAATKMSECVLGQSKRVDFCGKGYHLMSFPQSAPHGVVFLHVTYVPAQEKNFTTAPAICHDGKAHFPREGVFVSNGTHWFVTQRNFYEPQIITTDNTFLSGNCDVVIGIVNNTVYDPLQPELDSFKEELDKYFKNHTSPDVDLGDISGINASVVNIQKEIDRLNEVAKNLNESLIDLQELGKYEQYIKWPWYIWLGFIAGLIAIVMVTIMLCCMTSCCSCLKGCCSCGSCCKFDEDDSEPVLKGVKLHYT

SEQ ID NO: 1137 - protein, 1273 aa, Artificial Sequence
  SARS-CoV-2/USA/UT-00034/2020__EPI_ISL_417977 spike protein (1-1273)(A972C_R995C)
MFVFLVLLPLVSSQCVNLTTRTQLPPAYTNSFTRGVYYPDKVFRSSVLHSTQDLFLPFFSNVTWFHAIHVSGTNGTKRFDNPVLPFNDGVYFASTEKSNIIRGWIFGTTLDSKTQSLLIVNNATNVVIKVCEFQFCNDPFLGVYYYKNNKSWMESEFRVYSSANNCTFEYVSQPFLMDLEGKQGNFKNLREFVFKNIDGYFKIYSKHTPINLVRDLPQGFSALEPLVDLPIGINITRFQTLLALHRSYLTPGDSSSGWTAGAAAYYVGYLQPRTFLLKYNENGTITDAVDCALDPLSETKCTLKSFTVEKGIYQTSNFRVQPTESIVRFPNITNLCPFGEVFNATRFASVYAWNRKRISNCVADYSVLYNSASFSTFKCYGVSPTKLNDLCFTNVYADSFVIRGDEVRQIAPGQTGKIADYNYKLPDDFTGCVIAWNSNNLDSKVGGNYNYLYRLFRKSNLKPFERDISTEIYQAGSTPCNGVEGFNCYFPLQSYGFQPTNGVGYQPYRVVVLSFELLHAPATVCGPKKSTNLVKNKCVNFNFNGLTGTGVLTESNKKFLPFQQFGRDIADTTDAVRDPQTLEILDITPCSFGGVSVITPGTNTSNQVAVLYQGVNCTEVPVAIHADQLTPTWRVYSTGSNVFQTRAGCLIGAEHVNNSYECDIPIGAGICASYQTQTNSPRRARSVASQSIIAYTMSLGAENSVAYSNNSIAIPTNFTISVTTEILPVSMTKTSVDCTMYICGDSTECSNLLLQYGSFCTQLNRALTGIAVEQDKNTQEVFAQVKQIYKTPPIKDFGGFNFSQILPDPSKPSKRSFIEDLLFNKVTLADAGFIKQYGDCLGDIAARDLICAQKFNGLTVLPPLLTDEMIAQYTSALLAGTITSGWTFGAGAALQIPFAMQMAYRFNGIGVTQNVLYENQKLIANQFNSAIGKIQDSLSSTASALGKLQDVVNQNAQALNTLVKQLSSNFGCISSVLNDILSRLDKVEAEVQIDCLITGRLQSLQTYVTQQLIRAAEIRASANLAATKMSECVLGQSKRVDFCGKGYHLMSFPQSAPHGVVFLHVTYVPAQEKNFTTAPAICHDGKAHFPREGVFVSNGTHWFVTQRNFYEPQIITTDNTFVSGNCDVVIGIVNNTVYDPLQPELDSFKEELDKYFKNHTSPDVDLGDISGINASVVNIQKEIDRLNEVAKNLNESLIDLQELGKYEQYIKWPWYIWLGFIAGLIAIVMVTIMLCCMTSCCSCLKGCCSCGSCCKFDEDDSEPVLKGVKLHYT

SEQ ID NO: 1138 - protein, 1273 aa, Artificial Sequence
  SARS-CoV-2/USA/UT-00033/2020__EPI_ISL_417976 spike protein (1-1273)(A972C_R995C)
MFVFLVLLPLVSSQCVNLTTRTQLPPAYTNSFTRGVYYPDKVFRSSVLHSTQDLFLPFFSNVTWFHAIHVSGTNGTKRFDNPVLPFNDGVYFASTEKSNIIRGWIFGTTLDSKTQSLLIVNNATNVVIKVCEFQFCNDPFLGVYYHKNNKSWMESEFRVYSSANNCTFEYVSQPFLMDLEGKQGNFKNLREFVFKNIDGYFKIYSKHTPINLVRDLPQGFSALEPLVDLPIGINITRFQTLLALHRSYLTPGDSSSGLTAGAAAYYVGYLQPRTFLLKYNENGTITDAVDCALDPLSETKCTLKSFTVEKGIYQTSNFRVQPTESIVRFPNITNLCPFGEVFNATRFASVYAWNRKRISNCVADYSVLYNSASFSTFKCYGVSPTKLNDLCFTNVYADSFVIRGDEVRQIAPGQTGKIADYNYKLPDDFTGCVIAWNSNNLDSKVGGNYNYLYRLFRKSNLKPFERDISTEIYQAGSTPCNGVEGFNCYFPLQSYGFQPTNGVGYQPYRVVVLSFELLHAPATVCGPKKSTNLVKNKCVNFNFNGLTGTGVLTESNKKFLPFQQFGRDIADTTDAVRDPQTLEILDITPCSFGGVSVITPGTNTSNQVAVLYQGVNCTEVPVAIHADQLTPTWRVYSTGSNVFQTRAGCLIGAEHVNNSYECDIPIGAGICASYQTQTNSPRRARSVASQSIIAYTMSLGAENSVAYSNNSIAIPTNFTISVTTEILPVSMTKTSVDCTMYICGDSTECSNLLLQYGSFCTQLNRALTGIAVEQDKNTQEVFAQVKQIYKTPPIKDFGGFNFSQILPDPSKPSKRSFIEDLLFNKVTLADAGFIKQYGDCLGDIAARDLICAQKFNGLTVLPPLLTDEMIAQYTSALLAGTITSGWTFGAGAALQIPFAMQMAYRFNGIGVTQNVLYENQKLIANQFNSAIGKIQDSLSSTASALGKLQDVVNQNAQALNTLVKQLSSNFGCISSVLNDILSRLDKVEAEVQIDCLITGRLQSLQTYVTQQLIRAAEIRASANLAATKMSECVLGQSKRVDFCGKGYHLMSFPQSAPHGVVFLHVTYVPAQEKNFTTAPAICHDGKAHFPREGVFVSNGTHWFVTQRNFYEPQIITTDNTFVSGNCDVVIGIVNNTVYDPLQPELDSFKEELDKYFKNHTSPDVDLGDISGINASVVNIQKEIDRLNEVAKNLNESLIDLQELGKYEQYIKWPWYIWLGFIAGLIAIVMVTIMLCCMTSCCSCLKGCCSCGSCCKFDEDDSEPVLKGVKLHYT

SEQ ID NO: 1139 - protein, 1273 aa, Artificial Sequence
  SARS-CoV-2/USA/WI-13/2020__EPI_ISL_417516 spike protein (1-1273)(A972C_R995C)
MFVFLVLLPLVSSQCVNLTTRTQLPPAYTNSFTRGVYYPDKVFRSSVLHSTQDLFLPFFSNVTWFHAIHVSGTNGTKRFDNPVLPFNDGVYFASTEKSNIIRGWIFGTTLDSKTQSLLIVNNATNVVIKVCEFQFCNDPFLGVYYHKNNKSWMESEFRVYSSANNCTFEYVSQPFLMDLEGKQGNFKNLREFVFKNIDGYFKIYSKHTPINLVRDLPQGFSALEPLVDLPIGINITRFQTLLALHRSYLTPGDSSSGWTAGAAAYYVGYLQPRTFLLKYNENGTITDAVDCALDPLSETKCTLKSFTVEKGIYQTSNFRVLPTESIVRFPNITNLCPFGEVFNATRFASVYAWNRKRISNCVADYSVLYNSASFSTFKCYGVSPTKLNDLCFTNVYADSFVIRGDEVRQIAPGQTGKIADYNYKLPDDFTGCVIAWNSNNLDSKVGGNYNYLYRLFRKSNLKPFERDISTEIYQAGSTPCNGVEGFNCYFPLQSYGFQPTNGVGYQPYRVVVLSFELLHAPATVCGPKKSTNLVKNKCVNFNFNGLTGTGVLTESNKKFLPFQQFGRDIADTTDAVRDPQTLEILDITPCSFGGVSVITPGTNTSNQVAVLYQGVNCTEVPVAIHADQLTPTWRVYSTGSNVFQTRAGCLIGAEHVNNSYECDIPIGAGICASYQTQTNSPRRARSVASQSIIAYTMSLGAENSVAYSNNSIAIPTNFTISVTTEILPVSMTKTSVDCTMYICGDSTECSNLLLQYGSFCTQLNRALTGIAVEQDKNTQEVFAQVKQIYKTPPIKDFGGFNFSQILPDPSKPSKRSFIEDLLFNKVTLADAGFIKQYGDCLGDIAARDLICAQKFNGLTVLPPLLTDEMIAQYTSALLAGTITSGWTFGAGAALQIPFAMQMAYRFNGIGVTQNVLYENQKLIANQFNSAIGKIQDSLSSTASALGKLQDVVNQNAQALNTLVKQLSSNFGCISSVLNDILSRLDKVEAEVQIDCLITGRLQSLQTYVTQQLIRAAEIRASANLAATKMSECVLGQSKRVDFCGKGYHLMSFPQSAPHGVVFLHVTYVPAQEKNFTTAPAICHDGKAHFPREGVFVSNGTHWFVTQRNFYEPQIITTDNTFVSGNCDVVIGIVNNTVYDPLQPELDSFKEELDKYFKNHTSPDVDLGDISGINASVVNIQKEIDRLNEVAKNLNESLIDLQELGKYEQYIKWPWYIWLGFIAGLIAIVMVTIMLCCMTSCCSCLKGCCSCGSCCKFDEDDSEPVLKGVKLHYT

SEQ ID NO: 1140 - protein, 1272 aa, Artificial Sequence
  SARS-CoV-2/India/1-27/2020__EPI_ISL_413522 spike protein (1-1272)(A971C_R994C)
MFVFLVLLPLVSSQCVNLTTRTQLPPAYTNSFTRGVYYPDKVFRSSVLHSTQDLFLPFFSNVTWFHAIHVSGTNGTKRFDNPVLPFNDGVYFASTEKSNIIRGWIFGTTLDSKTQSLLIVNNATNVVIKVCEFQFCNDPFLGVYHKNNKSWMESEFRVYSSANNCTFEYVSQPFLMDLEGKQGNFKNLREFVFKNIDGYFKIYSKHTPINLVRDLPQGFSALEPLVDLPIGINITRFQTLLALHRSYLTPGDSSSGWTAGAAAYYVGYLQPRTFLLKYNENGTITDAVDCALDPLSETKCTLKSFTVEKGIYQTSNFRVQPTESIVRFPNITNLCPFGEVFNATRFASVYAWNRKRISNCVADYSVLYNSASFSTFKCYGVSPTKLNDLCFTNVYADSFVIRGDEVIQIAPGQTGKIADYNYKLPDDFTGCVIAWNSNNLDSKVGGNYNYLYRLFRKSNLKPFERDISTEIYQAGSTPCNGVEGFNCYFPLQSYGFQPTNGVGYQPYRVVVLSFELLHAPATVCGPKKSTNLVKNKCVNFNFNGLTGTGVLTESNKKFLPFQQFGRDIADTTDAVRDPQTLEILDITPCSFGGVSVITPGTNTSNQVAVLYQDVNCTEVPVAIHADQLTPTWRVYSTGSNVFQTRAGCLIGAEHVNNSYECDIPIGAGICASYQTQTNSPRRARSVASQSIIAYTMSLGAENSVAYSNNSIAIPTNFTISVTTEILPVSMTKTSVDCTMYICGDSTECSNLLLQYGSFCTQLNRALTGIAVEQDKNTQEVFAQVKQIYKTPPIKDFGGFNFSQILPDPSKPSKRSFIEDLLFNKVTLADAGFIKQYGDCLGDIAARDLICAQKFNGLTVLPPLLTDEMIAQYTSALLAGTITSGWTFGAGAALQIPFAMQMAYRFNGIGVTQNVLYENQKLIANQFNSAIGKIQDSLSSTASALGKLQDVVNQNAQALNTLVKQLSSNFGCISSVLNDILSRLDKVEAEVQIDCLITGRLQSLQTYVTQQLIRAAEIRASANLAATKMSECVLGQSKRVDFCGKGYHLMSFPQSAPHGVVFLHVTYVPAQEKNFTTAPAICHDGKAHFPREGVFVSNGTHWFVTQRNFYEPQIITTDNTFVSGNCDVVIGIVNNTVYDPLQPELDSFKEELDKYFKNHTSPDVDLGDISGINASVVNIQKEIDRLNEVAKNLNESLIDLQELGKYEQYIKWPWYIWLGFIAGLIAIVMVTIMLCCMTSCCSCLKGCCSCGSCCKFDEDDSEPVLKGVKLHYT

SEQ ID NO: 1141 - protein, 1267 aa, Artificial Sequence
  SARS-CoV-2/pangolin/Guangxi/P4L/2017__EPI_ISL_410538 spike protein (1-1267)(A966C_R989C)
MFVFLFVLPLVSSQCVNLTTRTGIPPGYTNSSTRGVYYPDKVFRSSILHLTQDLFLPFFSNVTWFNTINYQGGFKKFDNPVLPFNDGVYFASTEKSNIIRGWIFGTTLDARTQSLLIVNNATNVVIKVCEFQFCTDPFLGVYYHNNNKTWVENEFRVYSSANNCTFEYISQPFLMDLEGKQGNFKNLREFVFKNVDGYFKIYSKHTPIDLVRDLPRGFAALEPLVDLPIGINITRFQTLLALHRSYLTPGNLESGWTTGAAAYYVGYLQQRTFLLSYNQNGTITDAVDCSLDPLSETKCTLKSLTVEKGIYQTSNFRVQPTISIVRFPNITNLCPFGEVFNASKFASVYAWNRKRISNCVADYSVLYNSTSFSTFKCYGVSPTKLNDLCFTNVYADSFVVKGDEVRQIAPGQTGVIADYNYKLPDDFTGCVIAWNSVKQDALTGGNYGYLYRLFRKSKLKPFERDISTEIYQAGSTPCNGQVGLNCYYPLERYGFHPTTGVNYQPFRVVVLSFELLNGPATVCGPKLSTTLVKDKCVNFNFNGLTGTGVLTTSKKQFLPFQQFGRDISDTTDAVRDPQTLEILDITPCSFGGVSVITPGTNTSNQVAVLYQDVNCTEVPMAIHAEQLTPAWRVYSAGANVFQTRAGCLVGAEHVNNSYECDIPVGAGICASYHSMSSLRSVNQRSIIAYTMSLGAENSVAYSNNSIAIPTNFTISVTTEILPVSMTKTSVDCTMYICGDSIECSNLLLQYGSFCTQLNRALTGIAVEQDKNTQEVFAQVKQIYKTPPIKDFGGFNFSQILPDPSKPSKRSFIEDLLFNKVTLADAGFIKQYGDCLGDIAARDLICAQKFNGLTVLPPLLTDEMIAQYTSALLAGTITSGWTFGAGAALQIPFAMQMAYRFNGIGVTQNVLYENQKLIANQFNSAIGKIQDSLSSTASALGKLQDVVNQNAQALNTLVKQLSSNFGCISSVLNDILSRLDKVEAEVQIDCLITGRLQSLQTYVTQQLIRAAEIRASANLAATKMSECVLGQSKRVDFCGKGYHLMSFPQSAPHGVVFLHVTYVPAQEKNFTTAPAICHEGKAHFPREGVFVSNGTHWFITQRNFYEPQIITTDNTFVSGSCDVVIGIVNNTVYDPLQPELDSFKEELDKYFKNHTSPDVDLGDISGINASVVNIQKEIDRLNEVAKNLNESPIDLQELGKYEQYIKWPWYIWLGFIAGLIAIIMVTIMLCCMTSCCSCLKGCCSCGSCCKFDEDDSEPVLKGVKLHYT

SEQ ID NO: 1142 - protein, 1267 aa, Artificial Sequence
  SARS-CoV-2/pangolin/Guangxi/P5L/2017__EPI_ISL_410540 spike protein (1-1267)(A966C_R989C)
MFVFLFVLPLVSSQCVNLTTRTGIPPGYTNSSTRGVYYPDKVFRSSILHLTQDLFLPFFSNVTWFNTINYQGGFKKFDNPVLPFNDGVYFASTEKSNIIRGWIFGTTLDARTQSLLIVNNATNVVIKVCEFQFCTDPFLGVYYHNNNKTWVENEFRVYSSANNCTFEYISQPFLMDLEGKQGNFKNLREFVFKNVDGYFKIYSKHTPIDLVRDLPRGFAALEPLVDLPIGINITRFQTLLALHRSYLTPGKLESGWTTGAAAYYVGYLQQRTFLLSYNQNGTITDAVDCSLDPLSETKCTLKSLTVEKGIYQTSNFRVQPTISIVRFPNITNLCPFGEVFNASKFASVYAWNRKRISNCVADYSVLYNSTSFSTFKCYGVSPTKLNDLCFTNVYADSFVVKGDEVRQIAPGQTGVIADYNYKLPDDFTGCVIAWNSVKQDALTGGNYGYLYRLFRKSKLKPFERDISTEIYQAGSTPCNGQVGLNCYYPLERYGFHPTTGVNYQPFRVVVLSFELLNGPATVCGPKLSTTLVKDKCVNFNFNGLTGTGVLTTSKKQFLPFQQFGRDISDTTDAVRDPQTLEILDITPCSFGGVSVITPGTNTSNQVAVLYQDVNCTEVPMAIHAEQLTPAWRVYSAGANVFQTRAGCLVGAEHVNNSYECDIPVGAGICASYHSMSSFRSVNQRSIIAYTMSLGAENSVAYSNNSIAIPTNFTISVTTEILPVSMTKTSVDCTMYICGDSIECSNLLLQYGSFCTQLNRALTGIAVEQDKNTQEVFAQVKQIYKTPPIKDFGGFNFSQILPDPSKPSKRSFIEDLLFNKVTLADAGFIKQYGDCLGDIAARDLICAQKFNGLTVLPPLLTDEMIAQYTSALLAGTITSGWTFGAGAALQIPFAMQMAYRFNGIGVTQNVLYENQKLIANQFNSAIGKIQDSLSSTASALGKLQDVVNQNAQALNTLVKQLSSNFGCISSVLNDILSRLDKVEAEVQIDCLITGRLQSLQTYVTQQLIRAAEIRASANLAATKMSECVLGQSKRVDFCGKGYHLMSFPQSAPHGVVFLHVTYVPAQEKNFTTAPAICHEGKAHFPREGVFVSNGTHWFITQRNFYEPQIITTDNTFVSGSCDVVIGIVNNTVYDPLQPELDSFKEELDKYFKNHTSPDVDLGDISGINASVVNIQKEIDRLNEVAKNLNESLIDLQELGKYEQYIKWPWYIWLGFIAGLIAIIMVTIMLCCMTSCCSCLKGCCSCGSCCKFDEDDSEPVLKGVKLHYT

SEQ ID NO: 1143 - protein, 1267 aa, Artificial Sequence
  SARS-CoV-2/pangolin/Guangxi/P5E/2017__EPI_ISL_410541 spike protein (1-1267)(A966C_R989C)
MFVFLFVLPLVSSQCVNLTTRTGIPPGYTNSSTRGVYYPDKVFRSSILHLTQDLFLPFFSNVTWFNTITYQGGSKKFDNPVLPFNDGVYFASTEKSNIIRGWIFGTTLDARTQSLLIVNNATNVVIKVCEFQFCTDPFLGVYYHNNNKTWVENEFRVYSSANNCTFEYISQPFLMDLEGKQGNFKNLREFVFKNVDGYFKIYSKHTPIDLVRDLPRGFAALEPLVDLPIGINITRFQTLLALHRSYLTPGKLESGWTTGAAAYYVGYLQQRTFLLSYNQNGTITDAVDCSLDPLSETKCTLKSLTVEKGIYQTSNFRVQPTISIVRFPNITNLCPFGEVFNASKFASVYAWNRKRISNCVADYSVLYNSTSFSTFKCYGVSPTKLNDLCFTNVYADSFVVKGDEVRQIAPGQTGVIADYNYKLPDDFTGCVIAWNSVKQDALTGDNYGYLYRLFRKSKLKPFERDISTEIYQAGSTPCNGQVGLNCYYPLERYGFHPTTGVNYQPFRVVVLSFELLNGPATVCGPKLSTTLVKDKCVNFNFNGLTGTGVLTTSKKQFLPFQQFGRDISDTTDAVRDPQTLEILDITPCSFGGVSVITPGTNTSNQVAVLYQDVNCTEVPMAIHAEQLTPAWRVYSAGANVFQTRAGCLVGAEHVNNSYECDIPVGAGICASYHSMSSFRSVNQRSIIAYTMSLGAENSVAYSNNSIAIPTNFTISVTTEILPVSMTKTSVDCTMYICGDSIECSNLLLQYGSFCTQLNRALTGIAVEQDKNTQEVFAQVKQIYKTPPIKDFGGFNFSQILPDPSKPSKRSFIEDLLFNKVTLADAGFIKQYGDCLGDIAARDLICAQKFNGLTVLPPLLTDEMIAQYTSALLAGTITSGWTFGAGAALQIPFAMQMAYRFNGIGVTQNVLYENQKLIANQFNSAIGKIQDSLSSTASALGKLQDVVNQNAQALNTLVKQLSSNFGCISSVLNDILSRLDKVEAEVQIDCLITGRLQSLQTYVTQQLIRAAEIRASANLAATKMSECVLGQSKRVDFCGKGYHLMSFPQSAPHGVVFLHVTYVPAQEKNFTTAPAICHEGKAHFPREGVFVSNGTHWFITQRNFYEPQIITTDNTFVSGSCDVVIGIVNNTVYDPLQPELDSFKEELDKYFKNHTSPDVDLGDISGINASVVNIQKEIDRLNEVAKNLNESLIDLQELGKYEQYIKWPWYIWLGFIAGLIAIIMVTIMLCCMTSCCSCLKGCCSCGSCCKFDEDDSEPVLKGVKLHYT

SEQ ID NO: 1144 - protein, 1265 aa, Artificial Sequence
  SARS-CoV-2/pangolin/Guangxi/P1E/2017__EPI_ISL_410539 spike protein (1-1265)(A964C_R987C)
MFVFLFVLPLVSSQCVNLTTRTGIQPGYTNSSTRGVYYPDKVFRSSILHLTQDLFLPFFSNVTWFNTINYQGGFKKFDNPVLPFNDGVYFASTEKSNIIRGWIFGTTLDARTQSLLIVNNATNVVIKVCEFQFCTDPFLGVYYHNNNKTWVENEFRVYSSANNCTFEYISQPFLMDLEGKQGNFKNLREFVFKNVDGYFKIYSKHTPIDLVRDLPRGFAALEPLVDLPIGINITRFQTLLALHRSYLTPGKLESGWTTGAAAYYVGYLQQRTFLLSYNQNGTITDAVDCSLDPLSETKCTLKSLTVEKGIYQTSNFRVQPTISIVRFPNITNLCPFGEVFNASKFASVYAWNRKRISNCVADYSVLYNSTSFSTFKCYGVSPTKLNDLCFTNVYADSFVVKGDEVRQIAPGQTGVIADYNYKLPDDFTGCVIAWNSVKQDALTGGNYLYRLFRKSKLKPFERDISTEIYQAGSTPCNGQVGLNCYYPLERYGFHPTTGVNYQPFRVVVLSFELLNGPATVCGPKLSTTLVKDKCVNFNFNGLTGTGVLTTSKKQFLPFQQFGRDISDTTDAVRDPQTLEILDITPCSFGGVSVITPGTNTSNQVAVLYQDVNCTEVPMAIHAEQLTPAWRVYSAGANVFQTRAGCLVGAEHVNNSYECDIPVGAGICASYHSMSSLRSVNQRSIIAYTMSLGAENSVAYSNNSIAIPTNFTISVTTEILPVSMTKTSVDCTMYICGDSIECSNLLLQYGSFCTQLNRALTGIAVEQDKNTQEVFAQVKQIYKTPPIKDFGGFNFSQILPDPSKPSKRSFIEDLLFNKVTLADAGFIKQYGDCLGDIAARDLICAQKFNGLTVLPPLLTDEMIAQYTSALLAGTITSGWTFGAGAALQIPFAMQMAYRFNGIGVTQNVLYENQKLIANQFNSAIGKIQDSLSSTASALGKLQDVVNQNAQALNTLVKQLSSNFGCISSVLNDILSRLDKVEAEVQIDCLITGRLQSLQTYVTQQLIRAAEIRASANLAATKMSECVLGQSKRVDFCGKGYHLMSFPQSAPHGVVFLHVTYVPAQEKNFTTAPAICHEGKAHFPREGVFVSNGTHWFITQRNFYEPQIITTDNTFVSGSCDVVIGIVNNTVYDPLQPELDSFKEELDKYFKNHTSPDVDLGDISGINASVVNIQKEIDRLNEVAKNLNESLIDLQELGKYEQYIKWPWYIWLGFIAGLIAIIMVTIMLCCMTSCCSCLKGCCSCGSCCKFDEDDSEPVLKGVKLHYT

SEQ ID NO: 1145 - protein, 1273 aa, Artificial Sequence
  SARS-CoV-2/Wuhan/WIV05/2019__EPI_ISL_402128 spike protein (1-1273)(A890C_V1040C)
MFVFLVLLPLVSSQCVNLTTRTQLPPAYTNSFTRGVYYPDKVFRSSVLHSTQDLFLPFFSNVTWFHAIHVSGTNGTKRFDNPVLPFNDGVYFASTEKSNIIRGWIFGTTLDSKTQSLLIVNNATNVVIKVCEFQFCNDPFLGVYYHKNNKSWMESEFRVYSSANNCTFEYVSQPFLMDLEGKQGNFKNLREFVFKNIDGYFKIYSKHTPINLVRDLPQGFSALEPLVDLPIGINITRFQTLLALHRSYLTPGDSSSGWTAGAAAYYVGYLQPRTFLLKYNENGTITDAVDCALDPLSETKCTLKSFTVEKGIYQTSNFRVQPTESIVRFPNITNLCPFGEVFNATRFASVYAWNRKRISNCVADYSVLYNSASFSTFKCYGVSPTKLNDLCFTNVYADSFVIRGDEVRQIAPGQTGKIADYNYKLPDDFTGCVIAWNSNNLDSKVGGNYNYLYRLFRKSNLKPFERDISTEIYQAGSTPCNGVEGFNCYFPLQSYGFQPTNGVGYQPYRVVVLSFELLHAPATVCGPKKSTNLVKNKCVNFNFNGLTGTGVLTESNKKFLPFQQFGRDIADTTDAVRDPQTLEILDITPCSFGGVSVITPGTNTSNQVAVLYQDVNCTEVPVAIHADQLTPTWRVYSTGSNVFQTRAGCLIGAEHVNNSYECDIPIGAGICASYQTQTNSPRRARSVASQSIIAYTMSLGAENSVAYSNNSIAIPTNFTISVTTEILPVSMTKTSVDCTMYICGDSTECSNLLLQYGSFCTQLNRALTGIAVEQDKNTQEVFAQVKQIYKTPPIKDFGGFNFSQILPDPSKPSKRSFIEDLLFNKVTLADAGFIKQYGDCLGDIAARDLICAQKFNGLTVLPPLLTDEMIAQYTSALLAGTITSGWTFGCGAALQIPFAMQMAYRFNGIGVTQNVLYENQKLIANQFNSAIGKIQDSLSSTASALGKLQDVVNQNAQALNTLVKQLSSNFGAISSVLNDILSRLDKVEAEVQIDRLITGRLQSLQTYVTQQLIRAAEIRASANLAATKMSECVLGQSKRCDFCGKGYHLMSFPQSAPHGVVFLHVTYVPAQEKNFTTAPAICHDGKAHFPREGVFVSNGTHWFVTQRNFYEPQIITTDNTFVSGNCDVVIGIVNNTVYDPLQPELDSFKEELDKYFKNHTSPDVDLGDISGINASVVNIQKEIDRLNEVAKNLNESLIDLQELGKYEQYIKWPWYIWLGFIAGLIAIVMVTIMLCCMTSCCSCLKGCCSCGSCCKFDEDDSEPVLKGVKLHYT

SEQ ID NO: 1146 - protein, 1269 aa, Artificial Sequence
  SARS-CoV-2/bat/Yunnan/RaTG13/2013__EPI_ISL_402131 spike protein (1-1269)(A886C_V1036C)
MFVFLVLLPLVSSQCVNLTTRTQLPPAYTNSSTRGVYYPDKVFRSSVLHLTQDLFLPFFSNVTWFHAIHVSGTNGIKRFDNPVLPFNDGVYFASTEKSNIIRGWIFGTTLDSKTQSLLIVNNATNVVIKVCEFQFCNDPFLGVYYHKNNKSWMESEFRVYSSANNCTFEYVSQPFLMDLEGKQGNFKNLREFVFKNIDGYFKIYSKHTPINLVRDLPPGFSALEPLVDLPIGINITRFQTLLALHRSYLTPGDSSSGWTAGAAAYYVGYLQPRTFLLKYNENGTITDAVDCALDPLSETKCTLKSFTVEKGIYQTSNFRVQPTDSIVRFPNITNLCPFGEVFNATTFASVYAWNRKRISNCVADYSVLYNSTSFSTFKCYGVSPTKLNDLCFTNVYADSFVITGDEVRQIAPGQTGKIADYNYKLPDDFTGCVIAWNSKHIDAKEGGNFNYLYRLFRKANLKPFERDISTEIYQAGSKPCNGQTGLNCYYPLYRYGFYPTDGVGHQPYRVVVLSFELLNAPATVCGPKKSTNLVKNKCVNFNFNGLTGTGVLTESNKKFLPFQQFGRDIADTTDAVRDPQTLEILDITPCSFGGVSVITPGTNASNQVAVLYQDVNCTEVPVAIHADQLTPTWRVYSTGSNVFQTRAGCLIGAEHVNNSYECDIPIGAGICASYQTQTNSRSVASQSIIAYTMSLGAENSVAYSNNSIAIPTNFTISVTTEILPVSMTKTSVDCTMYICGDSTECSNLLLQYGSFCTQLNRALTGIAVEQDKNTQEVFAQVKQIYKTPPIKDFGGFNFSQILPDPSKPSKRSFIEDLLFNKVTLADAGFIKQYGDCLGDIAARDLICAQKFNGLTVLPPLLTDEMIAQYTSALLAGTITSGWTFGCGAALQIPFAMQMAYRFNGIGVTQNVLYENQKLIANQFNSAIGKIQDSLSSTASALGKLQDVVNQNAQALNTLVKQLSSNFGAISSVLNDILSRLDKVEAEVQIDRLITGRLQSLQTYVTQQLIRAAEIRASANLAATKMSECVLGQSKRCDFCGKGYHLMSFPQSAPHGVVFLHVTYVPAQEKNFTTAPAICHDGKAHFPREGVFVSNGTHWFVTQRNFYEPQIITTDNTFVSGSCDVVIGIVNNTVYDPLQPELDSFKEELDKYFKNHTSPDVDLGDISGINASVVNIQKEIDRLNEVAKNLNESLIDLQELGKYEQYIKWPWYIWLGFIAGLIAIIMVTIMLCCMTSCCSCLKGCCSCGSCCKFDEDDSEPVLKGVKLHYT

SEQ ID NO: 1147 - protein, 1273 aa, Artificial Sequence
  SARS-CoV-2/Wuhan/HBCDC-HB-01/2019__EPI_ISL_402132 spike protein (1-1273)(A890C_V1040C)
MFVFLVLLPLVSSQCVNLTTRTQLPPAYTNSITRGVYYPDKVFRSSVLHSTQDLFLPFFSNVTWFHAIHVSGTNGTKRFDNPVLPFNDGVYFASTEKSNIIRGWIFGTTLDSKTQSLLIVNNATNVVIKVCEFQFCNDPFLGVYYHKNNKSWMESEFRVYSSANNCTFEYVSQPFLMDLEGKQGNFKNLREFVFKNIDGYFKIYSKHTPINLVRDLPQGFSALEPLVDLPIGINITRFQTLLALHRSYLTPGDSSSGWTAGAAAYYVGYLQPRTFLLKYNENGTITDAVDCALDPLSETKCTLKSFTVEKGIYQTSNFRVQPTESIVRFPNITNLCPFGEVFNATRFASVYAWNRKRISNCVADYSVLYNSASFSTFKCYGVSPTKLNDLCFTNVYADSFVIRGDEVRQIAPGQTGKIADYNYKLPDDFTGCVIAWNSNNLDSKVGGNYNYLYRLFRKSNLKPFERDISTEIYQAGSTPCNGVEGFNCYFPLQSYGFQPTNGVGYQPYRVVVLSFELLHAPATVCGPKKSTNLVKNKCVNFNFNGLTGTGVLTESNKKFLPFQQFGRDIADTTDAVRDPQTLEILDITPCSFGGVSVITPGTNTSNQVAVLYQDVNCTEVPVAIHADQLTPTWRVYSTGSNVFQTRAGCLIGAEHVNNSYECDIPIGAGICASYQTQTNSPRRARSVASQSIIAYTMSLGAENSVAYSNNSIAIPTNFTISVTTEILPVSMTKTSVDCTMYICGDSTECSNLLLQYGSFCTQLNRALTGIAVEQDKNTQEVFAQVKQIYKTPPIKDFGGFNFSQILPDPSKPSKRSFIEDLLFNKVTLADAGFIKQYGDCLGDIAARDLICAQKFNGLTVLPPLLTDEMIAQYTSALLAGTITSGWTFGCGAALQIPFAMQMAYRFNGIGVTQNVLYENQKLIANQFNSAIGKIQDSLSSTASALGKLQDVVNQNAQALNTLVKQLSSNFGAISSVLNDILSRLDKVEAEVQIDRLITGRLQSLQTYVTQQLIRAAEIRASANLAATKMSECVLGQSKRCDFCGKGYHLMSFPQSAPHGVVFLHVTYVPAQEKNFTTAPAICHDGKAHFPREGVFVSNGTHWFVTQRNFYEPQIITTDNTFVSGNCDVVIGIVNNTVYDPLQPELDSFKEELDKYFKNHTSPDVDLGDISGINASVVNIQKEIDRLNEVAKNLNESLIDLQELGKYEQYIKWPWYIWLGFIAGLIAIVMVTIMLCCMTSCCSCLKGCCSCGSCCKFDEDDSEPVLKGVKLHYT

SEQ ID NO: 1148 - protein, 1273 aa, Artificial Sequence
  SARS-CoV-2/Guangdong/20SF028/2020__EPI_ISL_403936 spike protein (1-1273)(A890C_V1040C)
MFVFLVLLPLVSSQCVNLTTRTQLPPAYTNSFTRGVYYPDKVFRSSVLYSTQDLFLPFFSNVTWFHAIHVSGTNGTKRFDNPVLPFNDGVYFASTEKSNIIRGWIFGTTLDSKTQSLLIVNNATNVVIKVCEFQFCNDPFLGVYYHKNNKSWMESEFRVYSSANNCTFEYVSQPFLMDLEGKQGNFKNLREFVFKNIDGYFKIYSKHTPINLVRDLPQGFSALEPLVDLPIGINITRFQTLLALHRSYLTPGDSSSGWTAGAAAYYVGYLQPRTFLLKYNENGTITDAVDCALDPLSETKCTLKSFTVEKGIYQTSNFRVQPTESIVRFPNITNLCPFGEVFNATRFASVYAWNRKRISNCVADYSVLYNSASFSTFKCYGVSPTKLNDLCFTNVYADSFVIRGDEVRQIAPGQTGKIADYNYKLPDDFTGCVIAWNSNNLDSKVGGNYNYLYRLFRKSNLKPFERDISTEIYQAGSTPCNGVEGFNCYFPLQSYGFQPTNGVGYQPYRVVVLSFELLHAPATVCGPKKSTNLVKNKCVNFNFNGLTGTGVLTESNKKFLPFQQFGRDIADTTDAVRDPQTLEILDITPCSFGGVSVITPGTNTSNQVAVLYQDVNCTEVPVAIHADQLTPTWRVYSTGSNVFQTRAGCLIGAEHVNNSYECDIPIGAGICASYQTQTNSPRRARSVASQSIIAYTMSLGAENSVAYSNNSIAIPTNFTISVTTEILPVSMTKTSVDCTMYICGDSTECSNLLLQYGSFCTQLNRALTGIAVEQDKNTQEVFAQVKQIYKTPPIKDFGGFNFSQILPDPSKPSKRSFIEDLLFNKVTLADAGFIKQYGDCLGDIAARDLICAQKFNGLTVLPPLLTDEMIAQYTSALLAGTITSGWTFGCGAALQIPFAMQMAYRFNGIGVTQNVLYENQKLIANQFNSAIGKIQDSLSSTASALGKLQDVVNQNAQALNTLVKQLSSNFGAISSVLNDILSRLDKVEAEVQIDRLITGRLQSLQTYVTQQLIRAAEIRASANLAATKMSECVLGQSKRCDFCGKGYHLMSFPQSAPHGVVFLHVTYVPAQEKNFTTAPAICHDGKAHFPREGVFVSNGTHWFVTQRNFYEPQIITTDNTFVSGNCDVVIGIVNNTVYDPLQPELDSFKEELDKYFKNHTSPDVDLGDISGINASVVNIQKEIDRLNEVAKNLNESLIDLQELGKYEQYIKWPWYIWLGFIAGLIAIVMVTIMLCCMTSCCSCLKGCCSCGSCCKFDEDDSEPVLKGVKLHYT

SEQ ID NO: 1149 - protein, 1273 aa, Artificial Sequence
  SARS-CoV-2/Shenzhen/SZTH-001/2020__EPI_ISL_406592 spike protein (1-1273)(A890C_V1040C)
MFVFLVLLPLVSSQCVNLTTRTQLPPAYTNSFTRGVYYPDKVFRSSVLHSTQDLFLPFFSNVTWFHAIHVSGTNGTKRFDNPVLPFNDGVYFASTEKSNIIRGWIFGTTLDSKTQSLLIVNNATNVVIKVCEFQFCNDPFLGVYYHKNNKSWMESEFRVYSSANNCTFEYVSQPFLMDLEGKQGNFKNLREFVFKNIDGYFKIYSKHTPINLVRDLPQGFSALEPLVDLPIGINITRFQTLLALHRSYLTPGDSSSGWTAGAAAYYVGYLQPRTFLLKYNENGTITDAVDCALDPLSETKCTLKSFTVEKGIYQTSNFRVQPTESIVRFPNITNLCPFGEVFNATRFASVYAWNRKRISNCVADYSVLYNSASFSTFKCYGVSPTKLNDLCFTNVYADSFVIRGDEVRQIAPGQTGKIADYNYKLPDDFTGCVIAWNSNNLDSKVGGNYNYLYRLFRKSNLKPFERDISTEIYQAGSTPCNGVEGFNCYFPLQSYGFQPTNGVGYQPYRVVVLSFELLHAPATVCGPKKSTNLVKNKCVNFNFNGLTGTGVLTESNKKFLPFQQFGRDIADTTDAVRDPQTLEILDITPCSFGGVSVITPGTNTSNQVAVLYQDVNCTEVPVAIHADQLTPTWRVYSTGSNVFQTRAGCLIGAEHVNNSYECDIPIGAGICASYQTQTNSPRRARSVASQSIIAYTMSLGAENSVAYSNNSIAIPTNFTISVTTEILPVSMTKTSVDCTMYICGDSTECSNLLLQYGSFCTQLNRALTGIAVEQDKNTQEVFAQVKQIYKTPPIKDFGGFNFSQILPDPSKPSKRSFIEDLLFNKVTLADAGFIKQYGDCLGDIAARDLICAQKFNGLTVLPPLLTDEMIAQYTSALLAGTITSGWTFGCGAALQIPFAMQMAYRFNGIGVTQNVLYENQKLIANQFNSAIGKIQDSLSSTASALGKLQDVVNQNAQALNTLVKQLSSNFGAISSVLNDILSRLDKVEAEVQIDRLITGRLQSLQTYVTQQLIRAAEIRASANLAATKMSECVLGQSKRCDFCGKGYHLMSFPQSAPHGVVFLHVTYVPAQEKNFTTAPAICHDGKAHFPREGVFVSNGTHWFVTQRNFYEPQIITTDNTFVSGNCDVLIGIVNNTVYDPLQPELDSFKEELDKYFKNHTSPDVDLGDISGINASVVNIQKEIDRLNEVAKNLNESLIDLQELGKYEQYIKWPWYIWLGFIAGLIAIVMVTIMLCCMTSCCSCLKGCCSCGSCCKFDEDDSGPVLKGVKLHYT

SEQ ID NO: 1150 - protein, 1273 aa, Artificial Sequence
  SARS-CoV-2/Shenzhen/SZTH-004/2020__EPI_ISL_406595 spike protein (1-1273)(A890C_V1040C)
MFVFLVLLPLVSSQCVNLTTRTQLPPAYTNSFTRGVYYPDKVFRSSVLHSTQDLFLPFFSNVTWFHAIHVSGTNGTKRFDNPVLPFNDGVYFASTEKSNIIRGWIFGTTLDSKTQSLLIVNNATNVVIKVCEFQFCNDPFLGVYYHKNNKSWMESEFRVYSSANNCTFEYVSQPFLMDLEGKQGNFKNLREFVFKNIDGYFKIYSKHTPINLVRDLPQGFSALEPLVDLPIGINITRFQTLLALHRSYLTPGDSSSGWTAGAAAYYVGYLQPRTFLLKYNENGTITDAVDCALDPLSETKCTLKSFTVEKGIYQTSNFRVQPTESIVRFPNITNLCPFGEVFNATRFASVYAWDRKRISNCVAYYSVLYNSASFSTFKCYGVSPTKLNDLCFTNVYADSFVIRGDEVRQIAPGQTGKIADYNYKLPDDFTGCVIAWNSNNLDSKVGGNYNYLYRLFRKSNLKPFERDISTEIYQAGSTPCNGVEGFNCYFPLQSYGFQPTNGVGYQPYRVVVLSFELLHAPATVCGPKKSTNLVKNKCVNFNFNGLTGTGVLTESNKKFLPFQQFGRDIADTTDAVRDPQTLEILDITPCSFGGVSVITPGTNTSNQVAVLYQDVNCTEVPVAIHADQLTPTWRVYSTGSNVFQTRAGCLIGAEHVNNSYECDIPIGAGICASYQTQTNSPRRARSVASQSIIAYTMSLGAENSVAYSNNSIAIPTNFTISVTTEILPVSMTKTSVDCTMYICGDSTECSNLLLQYGSFCTQLNRALTGIAVEQDKNTQEVFAQVKQIYKTPPIKDFGGFNFSQILPDPSKPSKRSFIEDLLFNKVTLADAGFIKQYGDCLGDIAARDLICAQKFNGLTVLPPLLTDEMIAQYTSALLAGTITSGWTFGCGAALQIPFAMQMAYRFNGIGVTQNVLYENQKLIANQFNSAIGKIQDSLSSTASALGKLQDVVNQNAQALNTLVKQLSSNFGAISSVLNDILSRLDKVEAEVQIDRLITGRLQSLQTYVTQQLIRAAEIRASANLAATKMSECVLGQSKRCDFCGKGYHLMSFPQSAPHGVVFLHVTYVPAQEKNFTTAPAICHDGKAHFPREGVFVSNGTHWFVTQRNFYEPQIITTDNTFVSGNCDVVIGIVNNTVYDPLQPELDSFKEELDKYFKNHTSPDVDLGDISGINASVVNIQKEIDRLNEVAKNLNESLIDLQELGKYEQYIKWPWYIWLGFIAGLIAIVMVTIMLCCMTSCCSCLKGCCSCGSCCKFDEDDSEPVLKGVKLHYT

SEQ ID NO: 1151 - protein, 1273 aa, Artificial Sequence
  SARS-CoV-2/France/IDF0372/2020__EPI_ISL_406596 spike protein (1-1273)(A890C_V1040C)
MFVFLVLLPLVSSQCVNLTTRTQLPPAYTNSFTRGVYYPDKVFRSSVLHSTQDLFLPFFSNVTWFHAIHVSGTNGTKRFDNPVLPFNDGVYFASTEKSNIIRGWIFGTTLDSKTQSLLIVNNATNVVIKVCEFQFCNDPFLGVYYHKNNKSWMESEFRVYSSANNCTFEYVSQPFLMDLEGKQGNFKNLREFVFKNIDGYFKIYSKHTPINLVRDLPQGFSALEPLVDLPIGINITRFQTLLALHRSYLTPGDSSSGWTAGAAAYYVGYLQPRTFLLKYNENGTITDAVDCALDPLSETKCTLKSFTVEKGIYQTSNFRVQPTESIVRFPNITNLCPFGEVFNATRFASVYAWNRKRISNCVADYSFLYNSASFSTFKCYGVSPTKLNDLCFTNVYADSFVIRGDEVRQIAPGQTGKIADYNYKLPDDFTGCVIAWNSNNLDSKVGGNYNYLYRLFRKSNLKPFERDISTEIYQAGSTPCNGVEGFNCYFPLQSYGFQPTNGVGYQPYRVVVLSFELLHAPATVCGPKKSTNLVKNKCVNFNFNGLTGTGVLTESNKKFLPFQQFGRDIADTTDAVRDPQTLEILDITPCSFGGVSVITPGTNTSNQVAVLYQDVNCTEVPVAIHADQLTPTWRVYSTGSNVFQTRAGCLIGAEHVNNSYECDIPIGAGICASYQTQTNSPRRARSVASQSIIAYTMSLGAENSVAYSNNSIAIPTNFTISVTTEILPVSMTKTSVDCTMYICGDSTECSNLLLQYGSFCTQLNRALTGIAVEQDKNTQEVFAQVKQIYKTPPIKDFGGFNFSQILPDPSKPSKRSFIEDLLFNKVTLADAGFIKQYGDCLGDIAARDLICAQKFNGLTVLPPLLTDEMIAQYTSALLAGTITSGWTFGCGAALQIPFAMQMAYRFNGIGVTQNVLYENQKLIANQFNSAIGKIQDSLSSTASALGKLQDVVNQNAQALNTLVKQLSSNFGAISSVLNDILSRLDKVEAEVQIDRLITGRLQSLQTYVTQQLIRAAEIRASANLAATKMSECVLGQSKRCDFCGKGYHLMSFPQSAPHGVVFLHVTYVPAQEKNFTTAPAICHDGKAHFPREGVFVSNGTHWFVTQRNFYEPQIITTDNTFVSGNCDVVIGIVNNTVYDPLQPELDSFKEELDKYFKNHTSPDVDLGDISGINASVVNIQKEIDRLNEVAKNLNESLIDLQELGKYEQYIKWPWYIWLGFIAGLIAIVMVTIMLCCMTSCCSCLKGCCSCGSCCKFDEDDSEPVLKGVKLHYT

SEQ ID NO: 1152 - protein, 1273 aa, Artificial Sequence
  SARS-CoV-2/Australia/VIC01/2020__EPI_ISL_406844 spike protein (1-1273)(A890C_V1040C)
MFVFLVLLPLVSSQCVNLTTRTQLPPAYTNSFTRGVYYPDKVFRSSVLHSTQDLFLPFFSNVTWFHAIHVSGTNGTKRFDNPVLPFNDGVYFASTEKSNIIRGWIFGTTLDSKTQSLLIVNNATNVVIKVCEFQFCNDPFLGVYYHKNNKSWMESEFRVYSSANNCTFEYVSQPFLMDLEGKQGNFKNLREFVFKNIDGYFKIYSKHTPINLVRDLPQGFSALEPLVDLPIGINITRFQTLLALHRRYLTPGDSSSGWTAGAAAYYVGYLQPRTFLLKYNENGTITDAVDCALDPLSETKCTLKSFTVEKGIYQTSNFRVQPTESIVRFPNITNLCPFGEVFNATRFASVYAWNRKRISNCVADYSVLYNSASFSTFKCYGVSPTKLNDLCFTNVYADSFVIRGDEVRQIAPGQTGKIADYNYKLPDDFTGCVIAWNSNNLDSKVGGNYNYLYRLFRKSNLKPFERDISTEIYQAGSTPCNGVEGFNCYFPLQSYGFQPTNGVGYQPYRVVVLSFELLHAPATVCGPKKSTNLVKNKCVNFNFNGLTGTGVLTESNKKFLPFQQFGRDIADTTDAVRDPQTLEILDITPCSFGGVSVITPGTNTSNQVAVLYQDVNCTEVPVAIHADQLTPTWRVYSTGSNVFQTRAGCLIGAEHVNNSYECDIPIGAGICASYQTQTNSPRRARSVASQSIIAYTMSLGAENSVAYSNNSIAIPTNFTISVTTEILPVSMTKTSVDCTMYICGDSTECSNLLLQYGSFCTQLNRALTGIAVEQDKNTQEVFAQVKQIYKTPPIKDFGGFNFSQILPDPSKPSKRSFIEDLLFNKVTLADAGFIKQYGDCLGDIAARDLICAQKFNGLTVLPPLLTDEMIAQYTSALLAGTITSGWTFGCGAALQIPFAMQMAYRFNGIGVTQNVLYENQKLIANQFNSAIGKIQDSLSSTASALGKLQDVVNQNAQALNTLVKQLSSNFGAISSVLNDILSRLDKVEAEVQIDRLITGRLQSLQTYVTQQLIRAAEIRASANLAATKMSECVLGQSKRCDFCGKGYHLMSFPQSAPHGVVFLHVTYVPAQEKNFTTAPAICHDGKAHFPREGVFVSNGTHWFVTQRNFYEPQIITTDNTFVSGNCDVVIGIVNNTVYDPLQPELDSFKEELDKYFKNHTSPDVDLGDISGINASVVNIQKEIDRLNEVAKNLNESLIDLQELGKYEQYIKWPWYIWLGFIAGLIAIVMVTIMLCCMTSCCSCLKGCCSCGSCCKFDEDDSEPVLKGVKLHYT

SEQ ID NO: 1153 - protein, 1273 aa, Artificial Sequence
  SARS-CoV-2/Germany/BavPat1/2020__EPI_ISL_406862 spike protein (1-1273)(A890C_V1040C)
MFVFLVLLPLVSSQCVNLTTRTQLPPAYTNSFTRGVYYPDKVFRSSVLHSTQDLFLPFFSNVTWFHAIHVSGTNGTKRFDNPVLPFNDGVYFASTEKSNIIRGWIFGTTLDSKTQSLLIVNNATNVVIKVCEFQFCNDPFLGVYYHKNNKSWMESEFRVYSSANNCTFEYVSQPFLMDLEGKQGNFKNLREFVFKNIDGYFKIYSKHTPINLVRDLPQGFSALEPLVDLPIGINITRFQTLLALHRSYLTPGDSSSGWTAGAAAYYVGYLQPRTFLLKYNENGTITDAVDCALDPLSETKCTLKSFTVEKGIYQTSNFRVQPTESIVRFPNITNLCPFGEVFNATRFASVYAWNRKRISNCVADYSVLYNSASFSTFKCYGVSPTKLNDLCFTNVYADSFVIRGDEVRQIAPGQTGKIADYNYKLPDDFTGCVIAWNSNNLDSKVGGNYNYLYRLFRKSNLKPFERDISTEIYQAGSTPCNGVEGFNCYFPLQSYGFQPTNGVGYQPYRVVVLSFELLHAPATVCGPKKSTNLVKNKCVNFNFNGLTGTGVLTESNKKFLPFQQFGRDIADTTDAVRDPQTLEILDITPCSFGGVSVITPGTNTSNQVAVLYQGVNCTEVPVAIHADQLTPTWRVYSTGSNVFQTRAGCLIGAEHVNNSYECDIPIGAGICASYQTQTNSPRRARSVASQSIIAYTMSLGAENSVAYSNNSIAIPTNFTISVTTEILPVSMTKTSVDCTMYICGDSTECSNLLLQYGSFCTQLNRALTGIAVEQDKNTQEVFAQVKQIYKTPPIKDFGGFNFSQILPDPSKPSKRSFIEDLLFNKVTLADAGFIKQYGDCLGDIAARDLICAQKFNGLTVLPPLLTDEMIAQYTSALLAGTITSGWTFGCGAALQIPFAMQMAYRFNGIGVTQNVLYENQKLIANQFNSAIGKIQDSLSSTASALGKLQDVVNQNAQALNTLVKQLSSNFGAISSVLNDILSRLDKVEAEVQIDRLITGRLQSLQTYVTQQLIRAAEIRASANLAATKMSECVLGQSKRCDFCGKGYHLMSFPQSAPHGVVFLHVTYVPAQEKNFTTAPAICHDGKAHFPREGVFVSNGTHWFVTQRNFYEPQIITTDNTFVSGNCDVVIGIVNNTVYDPLQPELDSFKEELDKYFKNHTSPDVDLGDISGINASVVNIQKEIDRLNEVAKNLNESLIDLQELGKYEQYIKWPWYIWLGFIAGLIAIVMVTIMLCCMTSCCSCLKGCCSCGSCCKFDEDDSEPVLKGVKLHYT

SEQ ID NO: 1154 - protein, 1273 aa, Artificial Sequence
  SARS-CoV-2/Wuhan/HBCDC-HB-02/2020__EPI_ISL_412978 spike protein (1-1273)(A890C_V1040C)
MFVFLVLLPLVSSQCVNLTTRTQLPPAYTNSFTRGVYYPDKVFRSSVLHSTQDLFLPFFSNVTWFHAIHVSGTNGTKRFDNPVLPFNDGVYFASTEKSNIIRGWIFGTTLDSKTQSLLIVNNATNVVIKVCEFQFCNDPFLGVYYHKNNKSWMESEFRVYSSANNCTFEYVSQPFLMDLEGKQGNFKNLREFVFKNIDGYFKIYSKHTPINLVRDLPQGFSALEPLVDLPIGINITRFQTLLALHRSYLTPGDSSSGWTAGAAAYYVGYLQPRTFLLKYNENGTITDAVDCALDPLSETKCTLKSFTVEKGIYQTSNFRVQPTESIVRFPNITNLCPFGEVFNATRFASVYAWNRKRISNCVADYSVLYNSASFSTFKCYGVSPTKLNDLCFTNVYADSFVIRGDEVRQIAPGQTGKIADYNYKLPDDFTGCVIAWNSNNLDSKVGGNYNYLYRLFRKSNLKPFERDISTEIYQAGSTPCNGVEGFNCYFPLQSYGFQPTNGVGYQPYRVVVLSFELLHAPATVCGPKKSTNLVKNKCVNFNFNGLTGTGVLTESNKKFLPFQQFGRDIADTTDAVRDPQTLEILDITPCSFGGVSVITPGTNTSNQVAVLYQDVNCTEVPVAIHADQLTPTWRVYSTGSNVFQTRAGCLIGAEHVNNSYECDIPIGAGICASYQTQTNSPRRARSVASQSIIAYTMSLGAENSVAYSNNSIAIPTNFTISVTTEILPVSMTKTSVDCTMYICGDSTECSNFLLQYGSFCTQLNRALTGIAVEQDKNTQEVFAQVKQIYKTPPIKDFGGFNFSQILPDPSKPSKRSFIEDLLFNKVTLADAGFIKQYGDCLGDIAARDLICAQKFNGLTVLPPLLTDEMIAQYTSALLAGTITSGWTFGCGAALQIPFAMQMAYRFNGIGVTQNVLYENQKLIANQFNSAIGKIQDSLSSTASALGKLQDVVNQNAQALNTLVKQLSSNFGAISSVLNDILSRLDKVEAEVQIDRLITGRLQSLQTYVTQQLIRAAEIRASANLAATKMSECVLGQSKRCDFCGKGYHLMSFPQSAPHGVVFLHVTYVPAQEKNFTTAPAICHDGKAHFPREGVFVSNGTHWFVTQRNFYEPQIITTDNTFVSGNCDVVIGIVNNTVYDPLQPELDSFKEELDKYFKNHTSPDVDLGDISGINASVVNIQKEIDRLNEVAKNLNESLIDLQELGKYEQYIKWPWYIWLGFIAGLIAIVMVTIMLCCMTSCCSCLKGCCSCGSCCKFDEDDSEPVLKGVKLHYT

SEQ ID NO: 1155 - protein, 1273 aa, Artificial Sequence
  SARS-CoV-2/Australia/QLD02/2020__EPI_ISL_407896 spike protein (1-1273)(A890C_V1040C)
MFVFLVLLPLVSSQCVNLTTRTQLPPAYTNSFTRGVYYPDKVFRSSVLHSTQDLFLPFFSNVTWFHAIHVSGTNGTKRFDNPVLPFNDGVYFASTEKSNIIRGWIFGTTLDSKTQSLLIVNNATNVVIKVCEFQFCNDPFLGVYYHKNNKSWMESEFRVYSSANNCTFEYVSQPFLMDLEGKQGNFKNLREFVFKNIDGYFKIYSKHTPINLVRDLPQGFSALEPLVDLPIGINITRFQTLLALHRSYLTPGDSSSGWTAGAAAYYVGYLQPRTFLLKYNENGTITDAVDCALDPLSETKCTLKSFTVEKGIYQTSNFRVQPTESIVRFPNITNLCPFGEVFNATRFASVYAWNRKRISNCVADYSVLYNSASFSTFKCYGVSPTKLNDLCFTNVYADSFVIRGDEVRQIAPGQTGKIADYNYKLPDDFTGCVIAWNSNNLDSKVGGNYNYLYRLFRKSNLKPFERDISTEIYQAGSTPCNGVEGFNCYFPLQSYGFQPTNGVGYQPYRVVVLSFELLHAPATVCGPKKSTNLVKNKCVNFNFNGLTGTGVLTESNKKFLPFQQFGRDIADTTDAVRDPQTLEILDITPCSFGGVSVITPGTNTSNQVAVLYQDVNCTEVPVAIHADQLTPTWRVYSTGSNVFQTRAGCLIGAEHVNNSYECDIPIGAGICASYQTQTNSPRRARSVASQSIIAYTMSLGAENSVAYSNNSIAIPTNFTISVTTEILPVSMTKTSVDCTMYICGDSTECSNLLLQYGSFCTQLNRALTGIAVEQDKNTQEVFAQVKQIYKTPPIKDFGGFNFSQILPDPSKPSKRSFIEDLLFNKVTLADAGFIKQYGDCLGDIAARDLICAQKFNGLTVLPPLLTDEMIAQYTSALLAGTITSGWTFGCGAALQIPFAMQMAYRFNGIGVTQNVLYENQKLIANQFNSAIGKIQDSLSSTASALGKLQDVVNQNAQALNTLVKQLSSNFGAISSVLNDILSRLDKVEAEVQIDRLITGRLQSLQTYVTQQLIRAAEIRASANLAATKMSECVLGQSKRCDFCGKGYHLMSFPQSAPHGVVFLHVTYVPAQEKNFTTAPAICHDGKAHFPREGVFVSNGTHWFVTQRNFYEPQIITTDNTFVSGNCDVVIGIVNNTVYDPLQLELDSFKEELDKYFKNHTSPDVDLGDISGINASVVNIQKEIDRLNEVAKNLNESLIDLQELGKYEQYIKWPWYIWLGFIAGLIAIVMVTIMLCCMTSCCSCLKGCCSCGSCCKFDEDDSEPVLKGVKLHYT

SEQ ID NO: 1156 - protein, 1273 aa, Artificial Sequence
  SARS-CoV-2/India/1-31/2020__EPI_ISL_413523 spike protein (1-1273)(A890C_V1040C)
MFVFLVLLPLVSSQCVNLTTRTQLPPAYTNSFTRGVYYPDKVFRSSVLHSTQDLFLPFFSNVTWFHAIHVSGTNGTKRFDNPVLPFNDGVYFASTEKSNIIRGWIFGTTLDSKTQSLLIVNNATNVVIKVCEFQFCNDPFLGVYYHKNNKSWMESEFRVYSSANNCTFEYVSQPFLMDLEGKQGNFKNLREFVFKNIDGYFKIYSKHTPINLVRDLPQGFSALEPLVDLPIGINITRFQTLLALHRSYLTPGDSSSGWTAGAAAYYVGYLQPRTFLLKYNENGTITDAVDCALDPLSETKCTLKSFTVEKGIYQTSNFRVQPTESIVRFPNITNLCPFGEVFNATRFASVYAWNRKRISNCVADYSVLYNSASFSTFKCYGVSPTKLNDLCFTNVYADSFVIRGDEVRQIAPGQTGKIADYNYKLPDDFTGCVIAWNSNNLDSKVGGNYNYLYRLFRKSNLKPFERDISTEIYQAGSTPCNGVEGFNCYFPLQSYGFQPTNGVGYQPYRVVVLSFELLHAPATVCGPKKSTNLVKNKCVNFNFNGLTGTGVLTESNKKFLPFQQFGRDIADTTDAVRDPQTLEILDITPCSFGGVSVITPGTNTSNQVAVLYQDVNCTEVPVAIHADQLTPTWRVYSTGSNVFQTRAGCLIGAEHVNNSYECDIPIGAGICASYQTQTNSPRRARSVASQSIIAYTMSLGAENSVAYSNNSIAIPTNFTISVTTEILPVSMTKTSVDCTMYICGDSTECSNLLLQYGSFCTQLNRALTGIAVEQDKNTQEVFAQVKQIYKTPPIKDFGGFNFSQILPDPSKPSKRSFIEDLLFNKVTLADAGFIKQYGDCLGDIAARDLICAQKFNGLTVLPPLLTDEMIAQYTSALLAGTITSGWTFGCGAALQIPFAMQMAYRFNGIGVTQNVLYENQKLIANQFNSVIGKIQDSLSSTASALGKLQDVVNQNAQALNTLVKQLSSNFGAISSVLNDILSRLDKVEAEVQIDRLITGRLQSLQTYVTQQLIRAAEIRASANLAATKMSECVLGQSKRCDFCGKGYHLMSFPQSAPHGVVFLHVTYVPAQEKNFTTAPAICHDGKAHFPREGVFVSNGTHWFVTQRNFYEPQIITTDNTFVSGNCDVVIGIVNNTVYDPLQPELDSFKEELDKYFKNHTSPDVDLGDISGINASVVNIQKEIDRLNEVAKNLNESLIDLQELGKYEQYIKWPWYIWLGFIAGLIAIVMVTIMLCCMTSCCSCLKGCCSCGSCCKFDEDDSEPVLKGVKLHYT

SEQ ID NO: 1157 - protein, 1273 aa, Artificial Sequence
  SARS-CoV-2/Guangdong/GD2020087-P0008/2020__EPI_ISL_413863 spike protein (1-1273)(A890C_V1040C)
MFVFLVLLPLVSSQCVNLTTRTQLPPAYTNSFTRGVYYPDKVFRSSVLHSTQDLFLPFFSNVTWFHAIHVSGTNGTKRFDNPVLPFNDGVYFASTEKSNIIRGWIFGTTLDSKTQSLLIVNNATNVVIKVCEFQFCNDPFLGVYYHKNNKSWMESEFRVYSSANNCTFEYVSQPFLMDLEGKQGNFKNLREFVFKNIDGYFKIYSKHTPINLVRDLPQGFSALEPLVDLPIGINITRFQTLLALHRSYLTPGDSSSGWTAGAAAYYVGYLQPRTFLLKYNENGTITDAVDCALDPLSETKCTLKSFTVEKGIYQTSNFRVQPTESIVRFPNITNLCPFGEVFNATRFASVYAWNRKRISNCVADYSVLYNSASFSTFKCYGVSPTKLNDLCFTNVYADSFVIRGDEVREIAPGQTGKIADYNYKLPDDFTGCVIAWNSNNLDSKVGGNYNYLYRLFRKSNLKPFERDISTEIYQAGSTPCNGVEGFNCYFPLQSYGFQPTNGVGYQPYRVVVLSFELLHAPATVCGPKKSTNLVKNKCVNFNFNGLTGTGVLTESNKKFLPFQQFGRDIADTTDAVRDPQTLEILDITPCSFGGVSVITPGTNTSNQVAVLYQDVNCTEVPVAIHADQLTPTWRVYSTGSNVFQTRAGCLIGAEHVNNSYECDIPIGAGICASYQTQTNSPRRARSVASQSIIAYTMSLGAENSVAYSNNSIAIPTNFTISVTTEILPVSMTKTSVDCTMYICGDSTECSNLLLQYGSFCTQLNRALTGIAVEQDKNTQEVFAQVKQIYKTPPIKDFGGFNFSQILPDPSKPSKRSFIEDLLFNKVTLADAGFIKQYGDCLGDIAARDLICAQKFNGLTVLPPLLTDEMIAQYTSALLAGTITSGWTFGCGAALQIPFAMQMAYRFNGIGVTQNVLYENQKLIANQFNSAIGKIQDSLSSTASALGKLQDVVNQNAQALNTLVKQLSSNFGAISSVLNDILSRLDKVEAEVQIDRLITGRLQSLQTYVTQQLIRAAEIRASANLAATKMSECVLGQSKRCDFCGKGYHLMSFPQSAPHGVVFLHVTYVPAQEKNFTTAPAICHDGKAHFPREGVFVSNGTHWFVTQRNFYEPQIITTDNTFVSGNCDVVIGIVNNTVYDPLQPELDSFKEELDKYFKNHTSPDVDLGDISGINASVVNIQKEIDRLNEVAKNLNESLIDLQELGKYEQYIKWPWYIWLGFIAGLIAIVMVTIMLCCMTSCCSCLKGCCSCGSCCKFDEDDSEPVLKGVKLHYT

SEQ ID NO: 1158 - protein, 1273 aa, Artificial Sequence
  SARS-CoV-2/Sweden/01/2020__EPI_ISL_411951 spike protein (1-1273)(A890C_V1040C)
MFVFLVLLPLVSSQCVNLTTRTQLPPAYTNSFTRGVYYPDKVFRSSVLHSTQDLFLPFFSNVTWFHAIHVSGTNGTKRFDNPVLPFNDGVYFASTEKSNIIRGWIFGTTLDSKTQSLLIVNNATNVVIKVCEFQFCNDPFLGVYYHKNNKSWMESEFRVYSSANNCTFEYVSQPFLMDLEGKQGNFKNLREFVFKNIDGYFKIYSKHTPINLVRDLPQGFSALEPLVDLPIGINITRFQTLLALHRSYLTPGDSSSGWTAGAAAYYVGYLQPRTFLLKYNENGTITDAVDCALDPLSETKCTLKSFTVEKGIYQTSNFRVQPTESIVRFPNITNLCPFGEVFNATRFASVYAWNRKRISNCVADYSVLYNSASFSTFKCYGVSPTKLNDLCFTNVYADSFVIRGDEVRQIAPGQTGKIADYNYKLPDDFTGCVIAWNSNNLDSKVGGNYNYLYRLFRKSNLKPFERDISTEIYQAGSTPCNGVEGFNCYFPLQSYGFQPTNGVGYQPYRVVVLSFELLHAPATVCGPKKSTNLVKNKCVNFNFNGLTGTGVLTESNKKFLPFQQFGRDIADTTDAVRDPQTLEILDITPCSFGGVSVITPGTNTSNQVAVLYQDVNCTEVPVAIHADQLTPTWRVYSTGSNVFQTRAGCLIGAEHVNNSYECDIPIGAGICASYQTQTNSPRRARSVASQSIIAYTMSLGAENSVAYSNNSIAIPTNFTISVTTEILPVSMTKTSVDCTMYICGDSTECSNLLLQYGSFCTQLNRALTGIAVEQDKNTQEVFAQVKQIYKTPPIKDCGGFNFSQILPDPSKPSKRSFIEDLLFNKVTLADAGFIKQYGDCLGDIAARDLICAQKFNGLTVLPPLLTDEMIAQYTSALLAGTITSGWTFGCGAALQIPFAMQMAYRFNGIGVTQNVLYENQKLIANQFNSAIGKIQDSLSSTASALGKLQDVVNQNAQALNTLVKQLSSNFGAISSVLNDILSRLDKVEAEVQIDRLITGRLQSLQTYVTQQLIRAAEIRASANLAATKMSECVLGQSKRCDFCGKGYHLMSFPQSAPHGVVFLHVTYVPAQEKNFTTAPAICHDGKAHFPREGVFVSNGTHWFVTQRNFYEPQIITTDNTFVSGNCDVVIGIVNNTVYDPLQPELDSFKEELDKYFKNHTSPDVDLGDISGINASVVNIQKEIDRLNEVAKNLNESLIDLQELGKYEQYIKWPWYIWLGFIAGLIAIVMVTIMLCCMTSCCSCLKGCCSCGSCCKFDEDDSEPVLKGVKLHYT

SEQ ID NO: 1159 - protein, 1273 aa, Artificial Sequence
  SARS-CoV-2/Tianmen/HBCDC-HB-07/2020__EPI_ISL_412983 spike protein (1-1273)(A890C_V1040C)
MFVFLVLLPLVSSQCVNLTTRTQLPPAYTNSFTRGVYYPDKVFRSSVLHSTQDLFLPFFSNVTWFHAIHVSGTNGTKRFDNPVLPFNDGVYFASTEKSNIIRGWIFGTTLDSKTQSLLIVNNATNVVIKVCEFQFCNDPFLGVYYHKNNKSWMESEFRVYSSANNCTFEYVSQPFLMDLEGKQGNFKNLREFVFKNIDGYFKIYSKHTPINLVRDLPQGFSALEPLVDLPIGINITRFQTLLALHRSYLTPGDSSSGWTAGAAAYYVGYLQPRTFLLKYNENGTITDAVDCALDPLSETKCTLKSFTVEKGIYQTSNFRVQPTESIVRFPNITNLCPFGEVFNATRFASVYAWNRKRISNCVADYSVLYNSASFSTFKCYGVSPTKLNDLCFTNVYADSFVIRGDEVRQIAPGQTGKIADYNYKLPDDFTGCVIAWNSNNLDSKVGGNYNYLYRLFRKSNLKPFERDISTEIYQAGSTPCNGVEGFNCYFPLQSYGFQPTNGVGYQPYRVVVLSFELLHAPATVCGPKKSTNLVKNKCVNFNFNGLTGTGVLTESNKKFLPFQQFGRDIADTTDAVRDPQTLEILDITPCSFGGVSVITPGTNTSNQVAVLYQDLNCTEVPVAIHADQLTPTWRVYSTGSNVFQTRAGCLIGAEHVNNSYECDIPIGAGICASYQTQTNSPRRARSVASQSIIAYTMSLGAENSVAYSNNSIAIPTNFTISVTTEILPVSMTKTSVDCTMYICGDSTECSNLLLQYGSFCTQLNRALTGIAVEQDKNTQEVFAQVKQIYKTPPIKDFGGFNFSQILPDPSKPSKRSFIEDLLFNKVTLADAGFIKQYGDCLGDIAARDLICAQKFNGLTVLPPLLTDEMIAQYTSALLAGTITSGWTFGCGAALQIPFAMQMAYRFNGIGVTQNVLYENQKLIANQFNSAIGKIQDSLSSTASALGKLQDVVNQNAQALNTLVKQLSSNFGAISSVLNDILSRLDKVEAEVQIDRLITGRLQSLQTYVTQQLIRAAEIRASANLAATKMSECVLGQSKRCDFCGKGYHLMSFPQSAPHGVVFLHVTYVPAQEKNFTTAPAICHDGKAHFPREGVFVSNGTHWFVTQRNFYEPQIITTDNTFVSGNCDVVIGIVNNTVYDPLQPELDSFKEELDKYFKNHTSPDVDLGDISGINASVVNIQKEIDRLNEVAKNLNESLIDLQELGKYEQYIKWPWYIWLGFIAGLIAIVMVTIMLCCMTSCCSCLKGCCSCGSCCKFDEDDSEPVLKGVKLHYT

SEQ ID NO: 1160 - protein, 1273 aa, Artificial Sequence
  SARS-CoV-2/Hong Kong/case42_VM20002493/2020__EPI_ISL_414527 spike protein (1-1273)(A890C_V1040C)
MFVFLVLLPLVSSQCVNLTTRTQLPPAYTNSFTRGVYYPDKVFRSSVLHSTQDLFLPFFSNVTWFHAIHVSGTNGTKRFDNPVLPFNDGVYFASTEKSNIIRGWIFGTTLDSKTQSLLIVNNATNVVIKVCEFQFCNDPFLGVYYHKNNKSWMESEFRVYSSANNCTFEYVSQPFLMDLEGKQGNFKNLREFVFKNIDGYFKIYSKHTPINLVRDLPQGFSALEPLVDLPIGINITRFQTLLALHRSYLTPGDSSSGWTAGAAAYYVGYLQPRTFLLKYNENGTITDAVDCALDPLSETKCTLKSFTVEKGIYQTSNFRVQPTESIVRFPNITNLCPFGEVFNATRFASVYAWNRKRISNCVADYSVLYNSASFSTFKCYGVSPTKLNDLCFTNVYADSFVIRGDEVRQIAPGQTGKIADYNYKLPDDFTGCVIAWNSNNLDSKVGGNYNYLYRLFRKSNLKPFERDISTEIYQAGSTPCNGVEGFNCYFPLQSYGFQPTNGVGYQPYRVVVLSFELLHAPATVCGPKKSTNLVKNKCVNFNFNGLTGTGVLTESNKKFLPFQQFGRDIADTTDAVRDPQTLEILDITPCSFGGVSVITPGTNTSNQVAVLYQDVNCTEVPVAIHADQLTPTWRVYSTGSNVFQTRAGCLIGAEHVNNSYECDIPIGAGICASYQTQTNSPRRARSVASQSIIAYTMSLGAENSVAYSNNSIAIPTNFAISVTTEILPVSMTKTSVDCTMYICGDSTECSNLLLQYGSFCTQLNRALTGIAVEQDKNTQEVFAQVKQIYKTPPIKDFGGFNFSQILPDPSKPSKRSFIEDLLFNKVTLADAGFIKQYGDCLGDIAARDLICAQKFNGLTVLPPLLTDEMIAQYTSALLAGTITSGWTFGCGAALQIPFAMQMAYRFNGIGVTQNVLYENQKLIANQFNSAIGKIQDSLSSTASALGKLQDVVNQNAQALNTLVKQLSSNFGAISSVLNDILSRLDKVEAEVQIDRLITGRLQSLQTYVTQQLIRAAEIRASANLAATKMSECVLGQSKRCDFCGKGYHLMSFPQSAPHGVVFLHVTYVPAQEKNFTTAPAICHDGKAHFPREGVFVSNGTHWFVTQRNFYEPQIITTDNTFVSGNCDVVIGIVNNTVYDPLQPELDSFKEELDKYFKNHTSPDVDLGDISGINASVVNIQKEIDRLNEVAKNLNESLIDLQELGKYEQYIKWPWYIWLGFIAGLIAIVMVTIMLCCMTSCCSCLKGCCSCGSCCKFDEDDSEPVLKGVKLHYT

SEQ ID NO: 1161 - protein, 1273 aa, Artificial Sequence
  SARS-CoV-2/USA/CruiseA-23/2020__EPI_ISL_414482 spike protein (1-1273)(A890C_V1040C)
MFVFLVLLPLVSSQCVNLTTRTQLPPAYTNSFTRGVYYPDKVFRSSVLHSTQDLFLPFFSNVTWFHAIHVSGTNGTKRFDNPVLPFNDGVYFASTEKSNIIRGWIFGTTLDSKTQSLLIVNNATNVVIKVCEFQFCNDPFLGVYYHKNNKSWMESEFRVYSSANNCTFEYVSQPFLMDLEVKQGNFKNLREFVFKNIDGYFKIYSKHTPINLVRDLPQGFSALEPLVDLPIGINITRFQTLLALHRSYLTPGDSSSGWTAGAAAYYVGYLQPRTFLLKYNENGTITDAVDCALDPLSETKCTLKSFTVEKGIYQTSNFRVQPTESIVRFPNITNLCPFGEVFNATRFASVYAWNRKRISNCVADYSVLYNSASFSTFKCYGVSPTKLNDLCFTNVYADSFVIRGDEVRQIAPGQTGKIADYNYKLPDDFTGCVIAWNSNNLDSKVGGNYNYLYRLFRKSNLKPFERDISTEIYQAGSTPCNGVEGFNCYFPLQSYGFQPTNGVGYQPYRVVVLSFELLHAPATVCGPKKSTNLVKNKCVNFNFNGLTGTGVLTESNKKFLPFQQFGRDIADTTDAVRDPQTLEILDITPCSFGGVSVITPGTNTSNQVAVLYQDVNCTEVPVAIHADQLTPTWRVYSTGSNVFQTRAGCLIGAEHVNNSYECDIPIGAGICASYQTQTNSPRRARSVASQSIIAYTMSLGAENSVAYSNNSIAIPTNFTISVTTEILPVSMTKTSVDCTMYICGDSTECSNLLLQYGSFCTQLNRALTGIAVEQDKNTQEVFAQVKQIYKTPPIKDFGGFNFSQILPDPSKPSKRSFIEDLLFNKVTLADAGFIKQYGDCLGDIAARDLICAQKFNGLTVLPPLLTDEMIAQYTSALLAGTITSGWTFGCGAALQIPFAMQMAYRFNGIGVTQNVLYENQKLIANQFNSAIGKIQDSLSSTASALGKLQDVVNQNAQALNTLVKQLSSNFGAISSVLNDILSRLDKVEAEVQIDRLITGRLQSLQTYVTQQLIRAAEIRASANLAATKMSECVLGQSKRCDFCGKGYHLMSFPQSAPHGVVFLHVTYVPAQEKNFTTAPAICHDGKAHFPREGVFVSNGTHWFVTQRNFYEPQIITTDNTFVSGNCDVVIGIVNNTVYDPLQPELDSFKEELDKYFKNHTSPDVDLGDISGINASVVNIQKEIDRLNEVAKNLNESLIDLQELGKYEQYIKWPWYIWLGFIAGLIAIVMVTIMLCCMTSCCSCLKGCCSCGSCCKFDEDDSEPVLKGVKLHYT

SEQ ID NO: 1162 - protein, 1273 aa, Artificial Sequence
  SARS-CoV-2/Hong Kong/case85_VM20002868/2020__EPI_ISL_414519 spike protein (1-1273)(A890C_V1040C)
MFVFLVLVPLVSSQCVNLTTRTQLPPAYTNSFTRGVYYPDKVFRSSVLHSTQDLFLPFFSNVTWFHAIHVSGTNGTKRFDNPVLPFNDGVYFASTEKSNIIRGWIFGTTLDSKTQSLLIVNNATNVVIKVCEFQFCNDPFLGVYYHKNNKSWMESEFRVYSSANNCTFEYVSQPFLMDLEGKQGNFKNLREFVFKNIDGYFKIYSKHTPINLVRDLPQGFSALEPLVDLPIGINITRFQTLLALHRSYLTPGDSSSGWTAGAAAYYVGYLQPRTFLLKYNENGTITDAVDCALDPLSETKCTLKSFTVEKGIYQTSNFRVQPTESIVRFPNITNLCPFGEVFNATRFASVYAWNRKRISNCVADYSVLYNSASFSTFKCYGVSPTKLNDLCFTNVYADSFVIRGDEVRQIAPGQTGKIADYNYKLPDDFTGCVIAWNSNNLDSKVGGNYNYLYRLFRKSNLKPFERDISTEIYQAGSTPCNGVEGFNCYFPLQSYGFQPTNGVGYQPYRVVVLSFELLHAPATVCGPKKSTNLVKNKCVNFNFNGLTGTGVLTESNKKFLPFQQFGRDIADTTDAVRDPQTLEILDITPCSFGGVSVITPGTNTSNQVAVLYQDVNCTEVPVAIHADQLTPTWRVYSTGSNVFQTRAGCLIGAEHVNNSYECDIPIGAGICASYQTQTNSPRRARSVASQSIIAYTMSLGAENSVAYSNNSIAIPTNFTISVTTEILPVSMTKTSVDCTMYICGDSTECSNLLLQYGSFCTQLNRALTGIAVEQDKNTQEVFAQVKQIYKTPPIKDFGGFNFSQILPDPSKPSKRSFIEDLLFNKVTLADAGFIKQYGDCLGDIAARDLICAQKFNGLTVLPPLLTDEMIAQYTSALLAGTITSGWTFGCGAALQIPFAMQMAYRFNGIGVTQNVLYENQKLIANQFNSAIGKIQDSLSSTASALGKLQDVVNQNAQALNTLVKQLSSNFGAISSVLNDILSRLDKVEAEVQIDRLITGRLQSLQTYVTQQLIRAAEIRASANLAATKMSECVLGQSKRCDFCGKGYHLMSFPQSAPHGVVFLHVTYVPAQEKNFTTAPAICHDGKAHFPREGVFVSNGTHWFVTQRNFYEPQIITTDNTFVSGNCDVVIGIVNNTVYDPLQPELDSFKEELDKYFKNHTSPDVDLGDISGINASVVNIQKEIDRLNEVAKNLNESLIDLQELGKYEQYIKWPWYIWLGFIAGLIAIVMVTIMLCCMTSCCSCLKGCCSCGSCCKFDEDDSEPVLKGVKLHYT

SEQ ID NO: 1163 - protein, 1273 aa, Artificial Sequence
  SARS-CoV-2/England/200990660/2020__EPI_ISL_414523 spike protein (1-1273)(A890C_V1040C)
MFVFLVLLPLVSSQCVNLTTRTQLPPAYTNSFTRGVYYPDKVFRSSVLHSTQDLFLPFFSNVTWFHAIHVSGTNGTKRFDNPVLPFNDGVYFASTEKSNIIRGWIFGTTLDSKTQSLLIVNNATNVVIKVCEFQFCNDPFLGVYYHKNNKSWMESEFRVYSSANNCTFEYVSQPFLMDLEGKQGNFKNLREFVFKNIDGYFKIYSKHTPINLVRDLPQGFSALEPLVDLPIGINITRFQTLLALHRSYLTPGDSSSGWTAGAAAYYVGYLQPRTFLLKYNENGTITDAVDCALDPLSETKCTLKSFTVEKGIYQTSNFRVQPTESIVRFPNITNLCPFGEVFNATRFASVYAWNRKRISNCVADYSVLYNSASFSTFKCYGVSPTKLNDLCFTNVYADSFVIRGDEVRQIAPGQTGKIADYNYKLPDDFTGCVIAWNSNNLDSKVGGNYNYLYRLFRKSNLKPFERDISTEIYQAGSTPCNGVEGFNCYFPLQSYGFQPTNGVGYQPYRVVVLSFELLHAPATVCGPKKSTNLVKNKCVNFNFNGLTGTGVLTESNKKFLPFQQFGRDIADTTDAVRDPQTLEILDITPCSFGGVSVITPGTNTSNQVAVLYQGVNCTEVPVAIHADQLTPTWRVYSTGSNVFQTRAGCLIGAEHVNNSYECDIPIGAGICASYQTQTNSPRRARSVASQSIIAYTMSLGAENSVAYSNNSIAIPTNFTISVTTEILPVSMTKTSVDCTMYICGDSTECSNLLLQYGSFCTQLNRALTGIAVEQDKNTQEVFAQVKQIYKTPPIKDFGGFNFSQILPDPSKPSKRSFIEDLLFNKVTLADAGFIKQYGDCLGDIAARDLICAQKFNGLTVLPPLLTDEMIAQYTSALLAGTITSGWTFGCGAALQIPFAMQMAYRFNGIGVTQNVLYENQKLIANQFNSAIGKIQDSLSSTASALGKLQDVVNQNAQALNTLVKQLSSNFGAISSVLNDILSRLDKVEAEVQIDRLITGRLQSLQTYVTQQLIRAAEIRASANLAATKMSECVLGQSKRCDFCGKGYHLMSFPQSAPHGVVFLHVTYVPAQEKNFTTAPAICHDGKAHFPREGVFVSNGTHWFVTQRNFYEPQIITTDNTFVSGNCDVVIGIVNNTVYDPLQPELDSFKEELDKYFKNHTSPDVDLGDISGINASVVNIQKEIDRLNEVAKNLNESLIDLQELGKYEQYIKWPWYIWLGFIAGLIAIVMVTIMLCCMTSCCSCLKGCCSCGSCCKFDEDDSELVLKGVKLHYT

SEQ ID NO: 1164 - protein, 1273 aa, Artificial Sequence
  SARS-CoV-2/Australia/NSW09/2020__EPI_ISL_413595 spike protein (1-1273)(A890C_V1040C)
MFVFLVLLPLVSSQCVNLTTRTQLPPAYTNSFTRGVYYPDKVFRSSVLHSTQDLFLPFFSNVTWFHAIHVSGTNGTKRFDNPVLPFNDGVYFASTEKSNIIRGWIFGTTLDSKTQSLLIVNNATNVVIKVCEFQFCNDPFLGVYYHKNNKSWMESEFRVYSSANNCTFEYVSQPFLMDLEGKQGNFKNLREFVFKNIDGYFKIYSKHTPINLVRDLPQGFSALEPLVDLPIGINITRFQTLLALHRSYLTPGDSSSGWTAGAAAYYVGYLQPRTFLLKYNENGTITDAVDCALDPLSETKCTLKSFTVEKGIYQTSNFRVQPTESIVRFPNITNLCPFGEVFNATRFASVYAWNRKRISNCVADYSVLYNSASFSTFKCYGVSPTKLNDLCFTNVYADSFVIRGDEVRQIAPGQTGKIADYNYKLPDDFTGCVIAWNSNNLDSKVGGNYNYLYRLFRKSNLKPFERDISTEIYQAGSTPCNGVEGFNCYFPLQSYGFQPTNGVGYQPYRVVVLSFELLHAPATVCGPKKSTNLVKNKCVNFNFNGLTGTGVLTESNKKFLPFQQFGRDIADTTDAVRDPQTLEILDITPCSFGGVSVITPGTNTSNQVAVLYQDVNCTEVPVAIHADQLTPTWRVYSTGSNVFQTRAGCLIGAEHVNNSYECDIPIGAGICASYQTQTNSPRRARSVASQSIIAYTMSLGAENSVAYSNNSIAIPTNFTISVTTEILPVSMTKTSVDCTMYICGDSTECSNLLLQYGSFCTQLNRALTGIAVEQDKNTQEVFAQVKQIYKTPPIKDFGGFNFSQILPDPSKPSKRSFIEDLLFNKVTLADAGFIKQYGDCLGDIAARDLICAQKFNGLTVLPPLLTDEMIAQYTSALLAGTITSGWTFGCGAALQIPFAMQMAYRFNGIGVTQNVLYENQKLIANQFNSAIGKIQDSLSFTASALGKLQDVVNQNAQALNTLVKQLSSNFGAISSVLNDILSRLDKVEAEVQIDRLITGRLQSLQTYVTQQLIRAAEIRASANLAATKMSECVLGQSKRCDFCGKGYHLMSFPQSAPHGVVFLHVTYVPAQEKNFTTAPAICHDGKAHFPREGVFVSNGTHWFVTQRNFYEPQIITTDNTFVSGNCDVVIGIVNNTVYDPLQPELDSFKEELDKYFKNHTSPDVDLGDISGINASVVNIQKEIDRLNEVAKNLNESLIDLQELGKYEQYIKWPWYIWLGFIAGLIAIVMVTIMLCCMTSCCSCLKGCCSCGSCCKFDEDDSEPVLKGVKLHYT

SEQ ID NO: 1165 - protein, 1273 aa, Artificial Sequence
  SARS-CoV-2/Australia/NSW10/2020__EPI_ISL_413596 spike protein (1-1273)(A890C_V1040C)
MFVFLVLLPLVSSQCVNLTTRTQLPPAYTNSFTRGVYYPDKVFRSSVLHSTQDLFLPFFSNVTWFHAIHVSGTNGTKRFDNPVLPFNDGVYFASTEKSNIIRGWIFGTTLDSKTQSLLIVNNATNVVIKVCEFQFCNDPFLGVYYHKNNKSWMESEFRVYSSANNCTFEYVSQPFLMDLEGKQGNFKNLREFVFKNIDGYFKIYSKHTPINLVRDLPQGFSALEPLVDLPIGINITRFQTLLALHRSYLTPGDSSSGWTAGAAAYYVGYLQPRTFLLKYNENGTITDAVDCALDPLSETKCTLKSFTVEKGIYQTSNFRVQPTESIVRFPNITNLCPFGEVFNATRFASVYAWNRKRISNCVADYSVLYNSASFSTFKCYGVSPTKLNDLCFTNVYADSFVIRGDEVRQIAPGQTGKIADYNYKLPDDFTGCVIAWNSNNLDSKVGGNYNYLYRLFRKSNLKPFERDISTEIYQAGSTPCNGVEGFNCYFPLQSYGFQPTNGVGYQPYRVVVLSFELLHAPATVCGPKKSTNLVKNKCVNFNFNGLTGTGVLTESNKKFLPFQQFGRDIADTTDAVRDPQTLEILDITPCSFGGVSVITPGTNTSNQVAVLYQDVNCTEVPVAIHADQLTPTWRVYSTGSNVFQTRAGCLIGAEHVNNSYECDIPIGAGICASYQTQTNSPRRARSVASQSIIAYTMSLGAENSVAYSNNSIAIPTNFTISVTTEILPVSMTKTSVDCTMYICGDSTECSNLLLQYGSFCTQLNRALTGIAVEQDKNTQEVFAQVKQIYKTPPIKDFGGFNFSQILPDPSKPSKRSFIEDLLFNKVTLADAGFIKQYGDCLGDIAARDLICAQKFNGLTVLPPLLTDEMIAQYTSALLAGTITSGWTFGCGAALQIPFAMQMAYRFNGIGVTQNVLYENQKLIANQFNSAIGKIQDSLSSTASALGKLQDVVNQNAQALNTLVKQLSSNFGAISSVLNDILSRLDKVEAEVQIDRLITGRLQSLQTYVTQQLIRAAEIRASANLAATKMSECVLGQSKRCDFCGKGYHLMSFPQSAPHGVVFLHVTYVPAQEKNFTTAPAICHDGKAHFPREGVFVSNGTHWFVTQRNFYEPQIITTDNTFVSGNCDVVIGIVNNTVYDPLQPELDSFKEELDKYFKNHTSPDVDLGDISGINASVVNIQKEIDRLNEVAKNLNESLIDLQELGKYEQYIKWPWYIWLGFIAGLIAIVMVTIMLCCMTSCCSCLKGCCSCGSCFKFDEDDSEPVLKGVKLHYT

SEQ ID NO: 1166 - protein, 1273 aa, Artificial Sequence
  SARS-CoV-2/Switzerland/1000477797/2020__EPI_ISL_413023 spike protein (1-1273)(A890C_V1040C)
MFVFLVLLPLVSSQCVNLTTRTQLPPAYTNSFTRGVYYPDKVFRSSVLHSTQDLFLPFFSNVTWFHAIHVSGTNGTKRFDNPVLPFNDGVYFASTEKSNIIRGWIFGTTLDSKTQSLLIVNNATNVVIKVCEFQFCNDPFLGVYYHKNNKSWMESEFRVYSSANNCTFEYVSQPFLMDLEGKQGNFKNLREFVFKNIDGYFNIYSKHTPINLVRDLPQGFSALEPLVDLPIGINITRFQTLLALHRSYLTPGDSSSGWTAGAAAYYVGYLQPRTFLLKYNENGTITDAVDCALDPLSETKCTLKSFTVEKGIYQTSNFRVQPTESIVRFPNITNLCPFGEVFNATRFASVYAWNRKRISNCVADYSVLYNSASFSTFKCYGVSPTKLNDLCFTNVYADSFVIRGDEVRQIAPGQTGKIADYNYKLPDDFTGCVIAWNSNNLDSKVGGNYNYLYRLFRKSNLKPFERDISTEIYQAGSTPCNGVEGFNCYFPLQSYGFQPTNGVGYQPYRVVVLSFELLHAPATVCGPKKSTNLVKNKCVNFNFNGLTGTGVLTESNKKFLPFQQFGRDIADTTDAVRDPQTLEILDITPCSFGGVSVITPGTNTSNQVAVLYQGVNCTEVPVAIHADQLTPTWRVYSTGSNVFQTRAGCLIGAEHVNNSYECDIPIGAGICASYQTQTNSPRRARSVASQSIIAYTMSLGAENSVAYSNNSIAIPTNFTISVTTEILPVSMTKTSVDCTMYICGDSTECSNLLLQYGSFCTQLNRALTGIAVEQDKNTQEVFAQVKQIYKTPPIKDFGGFNFSQILPDPSKPSKRSFIEDLLFNKVTLADAGFIKQYGDCLGDIAARDLICAQKFNGLTVLPPLLTDEMIAQYTSALLAGTITSGWTFGCGAALQIPFAMQMAYRFNGIGVTQNVLYENQKLIANQFNSAIGKIQDSLSSTASALGKLQDVVNQNAQALNTLVKQLSSNFGAISSVLNDILSRLDKVEAEVQIDRLITGRLQSLQTYVTQQLIRAAEIRASANLAATKMSECVLGQSKRCDFCGKGYHLMSFPQSAPHGVVFLHVTYVPAQEKNFTTAPAICHDGKAHFPREGVFVSNGTHWFVTQRNFYEPQIITTDNTFVSGNCDVVIGIVNNTVYDPLQPELDSFKEELDKYFKNHTSPDVDLGDISGINASVVNIQKEIDRLNEVAKNLNESLIDLQELGKYEQYIKWPWYIWLGFIAGLIAIVMVTIMLCCMTSCCSCLKGCCSCGSCCKFDEDDSEPVLKGVKLHYT

SEQ ID NO: 1167 - protein, 1273 aa, Artificial Sequence
  SARS-CoV-2/Belgium/BA-02291/2020__EPI_ISL_415159 spike protein (1-1273)(A890C_V1040C)
MFVFLVLLPLVSSQCVNLTTRTQLPPAYTNSFTRGVYYPDKVFRSSVLHSTQDLFLPFFSNVTWFHAIHVSGTNGTKRFDNPVLPFNDGVYFASTEKSNIIRGWIFGTTLDSKTQSLLIVNNATNVVIKVCEFQFCNDPFLGVYYHKNNKSWMESEFRVYSSANNCTFEYVSQPFLMDLEGKQGNFKNLREFVFKNIDGYFKIYSKHTPINLVRDLPQGFSALEPLVDLPIGINITRFQTLLALHRSYLTPGDSSSGWTAGAAAYYVGYLQPRTFLLKYNENGTITDAVDCALDPLSETKCTLKSFTVEKGIYQTSNFRVQPTESIVRFPNITNLCPFGEVFNATRFASVYAWNRKRISNCVADYSVLYNSASFSTFKCYGVSPTKLNDLCFTNVYADSFVIRGDEVRQIAPGQTGKIADYNYKLPDDFTGCVIAWNSNNLDSKVGGNYNYLYRLFRRSNLKPFERDISTEIYQAGSTPCNGVEGFNCYFPLQSYGFQPTNGVGYQPYRVVVLSFELLPAPATVCGPKKSTNLVKNKCVNFNFNGLTGTGVLTESNKKFLPFQQFGRDIADTTDAVRDPQTLEILDITPCSFGGVSVITPGTNTSNQVAVLYQGVNCTEVPVAIHADQLTPTWRVYSTGSNVFQTRAGCLIGAEHVNNSYECDIPIGAGICASYQTQTNSPRRARSVASQSIIAYTMSLGAENSVAYSNNSIAIPTNFTISVTTEILPVSMTKTSVDCTMYICGDSTECSNLLLQYGSFCTQLNRALTGIAVEQDKNTQEVFAQVKQIYKTPPIKDFGGFNFSQILPDPSKPSKRSFIEDLLFNKVTLADAGFIKQYGDCLGDIAARDLICAQKFNGLTVLPPLLTDEMIAQYTSALLAGTITSGWTFGCGAALQIPFAMQMAYRFNGIGVTQNVLYENQKLIANQFNSAIGKIQDSLSSAAPALGKLQDVVNQNAQALNTLVKQLSSNFGAISSVLNDILSRLDKVEAEVQIDRLITGRLQSLQTYVTQQLIRAAEIRASANLAATKMSECVLGQSKRCDFCGKGYHLMSFPQSAPHGVVFLHVTYVPAQEKNFTTAPAICHDGKAHFPREGVFVSNGTHWFVTQRNFYEPQIITTDNTFVSGNCDVVIGIVNNTVYDPLQPELDSFKEELDKYFKNHTSPDVDLGDISGINASVVNIQKEIDRLNEVAKNLNESLIDLQELGKYEQYIKWPWYIWLGFIAGLIAIVMVTIMLCCMTSCCSCLKGCCSCGSCCKFDEDDSEPVLKGVKLHYT

SEQ ID NO: 1168 - protein, 1273 aa, Artificial Sequence
  SARS-CoV-2/USA/WA8-UW5/2020__EPI_ISL_413486 spike protein (1-1273)(A890C_V1040C)
MFVFLVLLPLVSSQCVNLTTRTQLPPAYTNSFTRGVYYPDKVFRSSVLHSTQDLFLPFFSNVTWFHAIHVSGTNGTKRFDNPVLPFNDGVYFASTEKSNIIRGWIFGTTLDSKTQSLLIVNNATNVVIKVCEFQFCNDPFLGVYYHKNNKSWMESEFRVYSSANNCTFEYVSQPFLMDLEGKQGNFKNLREFVFKNIDGYFKIYSKHTPINLVRDLPQGFSALEPLVDLPIGINITRFQTLLALHRSYLTPGDSSSGWTAGAAAYYVGYLQPRTFLLKYNENGTITDAVDCALDPLSETKCTLKSFTVEKGIYQTSNFRVQPTESIVRFPNITNLCPFGEVFNATRFASVYAWNRKRISNCVADYSVLYNSASFSTFKCYGVSPTKLNDLCFTNVYADSFVIRGDEVRQIAPGQTGKIADYNYKLPDDFTGCVIAWNSNNLDSKVGGNYNYLYRLFRKSNLKPFERDISTEIYQAGSTPCNGVEGFNCYFPLQSYGFQPTNGVGYQPYRVVVLSFELLHAPATVCGPKKSTNLVKNKCVNFNFNGLTGTGVLTESNKKFLPFQQFGRDIADTTDAVRDPQTLEILDITPCSFGGVSVITPGTNTSNQVAVLYQDVNCTEVPVAIHADQLTPTWRVYSTGSNVFQTRAGCLIGAEYVNNSYECDIPIGAGICASYQTQTNSPRRARSVASQSIIAYTMSLGAENSVAYSNNSIAIPTNFTISVTTEILPVSMTKTSVDCTMYICGDSTECSNLLLQYGSFCTQLNRALTGIAVEQDKNTQEVFAQVKQIYKTPPIKDFGGFNFSQILPDPSKPSKRSFIEDLLFNKVTLADAGFIKQYGDCLGDIAARDLICAQKFNGLTVLPPLLTDEMIAQYTSALLAGTITSGWTFGCGAALQIPFAMQMAYRFNGIGVTQNVLYENQKLIANQFNSAIGKIQDSLSSTASALGKLQDVVNQNAQALNTLVKQLSSNFGAISSVLNDILSRLDKVEAEVQIDRLITGRLQSLQTYVTQQLIRAAEIRASANLAATKMSECVLGQSKRCDFCGKGYHLMSFPQSAPHGVVFLHVTYVPAQEKNFTTAPAICHDGKAHFPREGVFVSNGTHWFVTQRNFYEPQIITTDNTFVSGNCDVVIGIVNNTVYDPLQPELDSFKEELDKYFKNHTSPDVDLGDISGINASVVNIQKEIDRLNEVAKNLNESLIDLQELGKYEQYIKWPWYIWLGFIAGLIAIVMVTIMLCCMTSCCSCLKGCCSCGSCCKFDEDDSEPVLKGVKLHYT

SEQ ID NO: 1169 - protein, 1273 aa, Artificial Sequence
  SARS-CoV-2/England/20102000506/2020__EPI_ISL_415147 spike protein (1-1273)(A890C_V1040C)
MFVFLVLLPLVSSQCVNLTTRTQLPPAYTNSFTRGVYYPDKVFRSSVLHSTQDLFLPFFSNVTWFHAIHVSGTNGTKRFDNPVLPFNDGVYFASTEKSNIIRGWIFGTTLDSKTQSLLIVNNATNVVIKVCEFQFCNDPFLGVYYHKNNKSWMESEFRVYSSANNCTFEYVSQPFLMDLEGKQGNFKNLREFVFKNIDGYFKIYSKHTPINLVRDLPQGFSALEPLVDLPIGINITRFQTLLALHRSYLTPGDSSSGWTAGAAAYYVGYLQPRTFLLKYNENGTITDAVDCALDPLSETKCTLKSFTVEKGIYQTSNFRVQPTESIVRFPNITNLCPFGEVFNATRFASVYAWNRKRISNCVADYSVLYNSASFSTFKCYGVSPTKLNDLCFTNVYADSFVIRGDEVRQIAPGQTGKIADYNYKLPDDFTGCVIAWNSNNLDSKVGGNYNYLYRLFRKSNLKPFERDISTEIYQAGSTPCNGVEGFNCYFPLQSYGFQPTNGVGYQPYRVVVLSFELLHAPATVCGPKKSTNLVKNKCVNFNFNGLTGTGVLTESNKKFLPFQQFGRDIADTTDAVRDPQTLEILDITPCSFGGVSVITPGTNTSNQVAVLYQGVNCTEVPVAIHADQLTPTWRVYSTGSNVFQTRAGCLIGAEHVNNSYECDIPIGAGICASYQTQTNSPRRARSVASQSIIAYTMSLGAENSVAYSNNSIAIPTNFTISVTTEILPVSMTKTSVDCTMYICGDSTECSNLLLQYGSFCTQLNRALTGIAVEQDKNTQEVFAQVKQIYKTPPIKDFGGFNFSQILPDPSKPSKRSFIEDLLFNKVTLADAGFIKQYGYCLGDIAARDLICAQKFNGLTVLPPLLTDEMIAQYTSALLAGTITSGWTFGCGAALQIPFAMQMAYRFNGIGVTQNVLYENQKLIANQFNSAIGKIQDSLSSTASALGKLQDVVNQNAQALNTLVKQLSSNFGAISSVLNDILSRLDKVEAEVQIDRLITGRLQSLQTYVTQQLIRAAEIRASANLAATKMSECVLGQSKRCDFCGKGYHLMSFPQSAPHGVVFLHVTYVPAQEKNFTTAPAICHDGKAHFPREGVFVSNGTHWFVTQRNFYEPQIITTDNTFVSGNCDVVIGIVNNTVYDPLQPELDSFKEELDKYFKNHTSPDVDLGDISGINASVVNIQKEIDRLNEVAKNLNESLIDLQELGKYEQYIKWPWYIWLGFIAGLIAIVMVTIMLCCMTSCCSCLKGCCSCGSCCKFDEDDSEPVLKGVKLHYT

SEQ ID NO: 1170 - protein, 1273 aa, Artificial Sequence
  SARS-CoV-2/Belgium/VAG-03013/2020__EPI_ISL_415155 spike protein (1-1273)(A890C_V1040C)
MFVFLVLLPLVSSQCVNLTTRTQLPPAYTNSFTRGVYYPDKVFRSSVLHSTQDLFLPFFSNVTWFHAIHVSGTNGTKRFDNPVLPFNDGVYFASTEKSNIIRGWIFGTTLDSKTQSLLIVNNATNVVIKVCEFQFCNDPFLGVYYHKNNKSWMESEFRVYSSANNCTFEYVSQPFLMDLEGKQGNFKNLREFVFKNIDGYFKIYSKHTPINLVRDLPQGFSALEPLVDLPIGINITRFQTLLALHRSYLTPGDSSSGWTAGAAAYYVGYLQPRTFLLKYNENGTITDAVDCALDPLSETKCTLKSFTVEKGIYQTSNFRVQPTESIVRFPNITNLCPFGEVFNATRFASVYAWNRKRISNCVADYSVLYNSASFSTFKCYGVSPTKLNDLCFTNVYADSFVIRGDEVRQIAPGQTGKIADYNYKLPDDFTGCVIAWNSNNLDSKVGGNYNYLYRLFRKSNLKPFERDISTEIYQAGSTPCNGVEGFNCYFPLQSYGFQPTNGVGYQPYRVVVLSFELLHAPATVCGPKKSTNLVKNKCVNFNFNGLTGTGVLTESNKKFLPFQQFGRDIADTTDAVRDPQTLEILDITPCSFGGVSVITPGTNTSNQVAVLYQGVNCTEVPVAIHADQLTPTWRVYSTGSNVFQTRAGCLIGAEHVNNSYECDIPIGAGICASYQTQTNSPRRARSVASQSIIAYTMSLGAENSVAYSNNSIAIPTNFTISVTTEILPVSMTKTSVDCTMYICGDSTECSNLLLQYGSFCTQLNRALTGIAVEQDKNTQEVFAQVKQIYKTPPIKDFGGFNFSQILPDPSKPSKRSFIEDLLFNKVTLADAGFIKQYGDCLGDIAARDLICAQKFNGLTVLPPLLTDEMIAQYTSALLAGTITSGWTFGCGAALQIPFAMQMAYRFNGIGVTQNVLYENQKLIANQFNSAIGKIQDSLSSTATALGKLQDVVNQNAQALNTLVKQLSSNFGAISSVLNDILSRLDKVEAEVQIDRLITGRLQSLQTYVTQQLIRAAEIRASANLAATKMSECVLGQSKRCDFCGKGYHLMSFPQSAPHGVVFLHVTYVPAQEKNFTTAPAICHDGKAHFPREGVFVSNGTHWFVTQRNFYEPQIITTDNTFVSGNCDVVIGIVNNTVYDPLQPELDSFKEELDKYFKNHTSPDVDLGDISGINASVVNIQKEIDRLNEVAKNLNESLIDLQELGKYEQYIKWPWYIWLGFIAGLIAIVMVTIMLCCMTSCCSCLKGCCSCGSCCKFDEDDSEPVLKGVKLHYT

SEQ ID NO: 1171 - protein, 1273 aa, Artificial Sequence
  SARS-CoV-2/Belgium/BC-03016/2020__EPI_ISL_415157 spike protein (1-1273)(A890C_V1040C)
MFVFLVLLPLVSSQCVNLTTRTQLPPAYTNSFTRGVYYPDKVFRSSVLHSTQDLFLPFFSNVTWFHAIHVSGTNGTKRFDNPVLPFNDGVYFASTEKSNIIRGWIFGTTLDSKTQSLLIVNNATNVVIKVCEFQFCNDPFLGVYYHKNNKSWMESEFRVYSSANNCTFEYVSQPFLMDLEGKQGNFKNLREFVFKNIDGYFKIYSKHTPINLVRDLPQGFSALEPLVDLPIGINITRFQTLLALHRSYLTPGDSSSGWTAGAAAYYVGYLQPRTFLLKYNENGTITDAVDCALDPLSETKCTLKSFTVEKGIYQTSNFRVQPTESIVRFPNITNLCPFGEVFNATRFASVYAWNRKRISNCVADYSVLYNSASFSTFKCYGVSPTKLNDLCFTNVYADSFVIRGDEVRQIAPGQTGKIADYNYKLPDDFTGCVIAWNSNNLDSKVGGNYNYLYRLFRKSNLKPFERDISTEIYQAGSTPCNGVEGFNCYFPLQSYGFQPTNGVGYQPYRVVVLSFELLHAPATVCGPKKSTNLVKNKCVNFNFNGLTGTGVLTESNKKFLPFQQFGRDIADTTDAVRDPQTLEILDITPCSFGGVSVITPGTNTSNQVAVLYQGVNCTEVPVAIHADQLTPTWRVYSTGSNVFQTRAGCLIGAEHVNNSYECDIPIGAGICASYQTQTNSPRRARSVASQSIIAYTMSLGAENSVAYSNNSIAIPTNFTISVTTEILPVSMTKTSVDCTMYICGDSTECSNLLLQYGSFCTQLNRALTGIAVEQDKNTQEVFAQVKQIYKTPPIKDFGGFNFSQILPDPSKPSKRSFIEDLLFNKVTLADAGFIKQYGDCLGDIAARDLICAQKFNGLTVLPPLLTDEMIAQYTSALLAGTITSGWTFGCGAALQIPFAMQMAYRFNGIGVTQNVLYENQKLIANQFNSAIGKIQDSLSSTAPALGKLQDVVNQNAQALNTLVKQLSSNFGAISSVLNDILSRLDKVEAEVQIDRLITGRLQSLQTYVTQQLIRAAEIRASANLAATKMSECVLGQSKRCDFCGKGYHLMSFPQSAPHGVVFLHVTYVPAQEKNFTTAPAICHDGKAHFPREGVFVSNGTHWFVTQRNFYEPQIITTDNTFVSGNCDVVIGIVNNTVYDPLQPELDSFKEELDKYFKNHTSPDVDLGDISGINASVVNIQKEIDRLNEVAKNLNESLIDLQELGKYEQYIKWPWYIWLGFIAGLIAIVMVTIMLCCMTSCCSCLKGCCSCGSCCKFDEDDSEPVLKGVKLHYT

SEQ ID NO: 1172 - protein, 1273 aa, Artificial Sequence
  SARS-CoV-2/Germany/BavPat3/2020__EPI_ISL_414521 spike protein (1-1273)(A890C_V1040C)
MFVFLVLLPLVSSQCVNLTTRTQLPPAYTNSFTRGVYYPDKVFRSSVLHSTQDLFLPFFSNVTWFHAIHVSGTNGTKRFDNPVLPFNDGVYFASTEKSNIIRGWIFGTTLDSKTQSLLIVNNATNVVIKVCEFQFCNDPFLGVYYHKNNKSWMESEFRVYSSANNCTFEYVSQPFLMDLEGKQGNFKNLREFVFKNIDGYFKIYSKHTPINLVRDLPQGFSALEPLVDLPIGINITRFQTLLALHRSYLTPGDSSSGWTAGAAAYYVGYLQPRTFLLKYNENGTITDAVDCALDPLSETKCTLKSFTVEKGIYQTSNFRVQPTESIVRFPNITNLCPFGEVFNATRFASVYAWNRKRISNCVADYSVLYNSASFSTFKCYGVSPTKLNDLCFTNVYADSFVIRGDEVRQIAPGQTGKIADYNYKLPDDFTGCVIAWNSNNLDSKVGGNYNYLYRLFRKSNLKPFERDISTEIYQAGSTPCNGVEGFNCYFPLQSYGFQPTNGVGYQPYRVVVLSFELLHAPATVCGPKKSTNLVKNKCVNFNFNGLTGTGVLTESNKKFLPFQQFGRDIADTTDAVRDPQTLEILDITPCSFGGVSVITPGTNTSNQVAVLYQDVNCTEVPVAIHADQLTPTWRVYSTGSNVFQTRAGCLIGAEHVNNSYECDIPIGAGICASYQTQTNSPRRARSVASQSIIAYTMSLGAENSVAYSNNSIAIPTNFTISVTTEILPVSMTKTSVDCTMYICGDSTECSNLLLQYGSFCTQLNRALTGIAVEQDKNTQQVFAQVKQIYKTPPIKDFGGFNFSQILPDPSKPSKRSFIEDLLFNKVTLADAGFIKQYGDCLGDIAARDLICAQKFNGLTVLPPLLTDEMIAQYTSALLAGTITSGWTFGCGAALQIPFAMQMAYRFNGIGVTQNVLYENQKLIANQFNSAIGKIQDSLSSTASALGKLQDVVNQNAQALNTLVKQLSSNFGAISSVLNDILSRLDKVEAEVQIDRLITGRLQSLQTYVTQQLIRAAEIRASANLAATKMSECVLGQSKRCDFCGKGYHLMSFPQSAPHGVVFLHVTYVPAQEKNFTTAPAICHDGKAHFPREGVFVSNGTHWFVTQRNFYEPQIITTDNTFVSGNCDVVIGIVNNTVYDPLQPELDSFKEELDKYFKNHTSPDVDLGDISGINASVVNIQKEIDRLNEVAKNLNESLIDLQELGKYEQYIKWPWYIWLGFIAGLIAIVMVTIMLCCMTSCCSCLKGCCSCGSCCKFDEDDSEPVLKGVKLHYT

SEQ ID NO: 1173 - protein, 1273 aa, Artificial Sequence
  SARS-CoV-2/France/HF1805/2020__EPI_ISL_414628 spike protein (1-1273)(A890C_V1040C)
MFVFLVLLPLVSSQCVNLTTRTQLPPAYTNSFTRGVYYPDKVFRSSVLHSTQDLFLPFFSNVTWFHAIHVSGTNGTKRFDNPVLPFNDGVYFASTEKSNIIRGWIFGTTLDSKTQSLLIVNNATNVVIKVCEFQFCNDPFLGVYYHKNNKSWMESEFRVYSSANNCTFEYVSQPFLMDLEGKQGNFKNLREFVFKNIDGYFKIYSKHTPINLVRDLPQGFSALEPLVDLPIGINITRFQTLLALHRSYLTPGDSSSGWTAGAAAYYVGYLQPRTFLLKYNENGTITDAVDCALDPLSETKCTLKSFTVEKGIYQTSNFRVQPTESIVRFPNITNLCPFGEVFNATRFASVYAWNRKRISNCVADYSVLYNSASFSTFKCYGVSPTKLNDLCFTNVYADSFVIRGDEVRQIAPGQTGKIADYNYKLPDDFTGCVIAWNSNNLDSKVGGNYNYLYRLFRKSNLKPFERDISTEIYQAGSTPCNGVEGFNCYFPLQSYGFQPTNGVGYQPYRVVVLSFELLHAPATVCGPKKSTNLVKNKCVNFNFNGLTGTGVLTESNKKFLPFQQFGRDIADTTDAVRDPQTLEILDITPCSFGGVSVITPGTNTSNQVAVLYQGVNCTEVPVAIHADQLTPTWRVYSTGSNVFQTRAGCLIGAEHVNNSYECDIPIGAGICASYQTQTNSPRRARSVASQSIIAYTMSLGAENSVAYSNNSIAIPTNFTISVTTEILPVSMTKTSVDCTMYICGDSTECSNLLLQYGSFCTQLNRALTGIAVEQDKNTQEVFAQVKQIYKTPPIKDFGGFNFSQILPDPSKPSKRSFIEDLLFNKVTLADAGFIKQYGDCLGDIAARDLICAQKFNGLTVLPPLLTDEMIAQYTSALLAGTITSGWTFGCGAALQIPFAMQMAYRFNGIGVTQNVLYENQKLIANQFNSAIGKIQDSLSSTASALGKLQDVVNQNAQALNTLVKQLSSNFGAISSVLNDILSRLDKVEAEVQIDRLITGRLQSLQTYVTQQLIRAAEIRASANLAATKMSECVLGQSKRCDFCGKGYHLMSFPQSAPHGVVFLHVTYVPAQEKNFTTAPAICHDGKAHFPREGVFVSNGTHWFVTQRNFYEPQIITTDNTFVSGNCDVVIGVVNNTVYDPLQPELDSFKEELDKYFKNHTSPDVDLGDISGINASVVNIQKEIDRLNEVAKNLNESLIDLQELGKYEQYIKWPWYIWLGFIAGLIAIVMVTIMLCCMTSCCSCLKGCCSCGSCCKFDEDDSEPVLKGVKLHYT

SEQ ID NO: 1174 - protein, 1273 aa, Artificial Sequence
  SARS-CoV-2/Netherlands/ZuidHolland_9/2020__EPI_ISL_414445 spike protein (1-1273)(A890C_V1040C)
MFVFLVLLPLVSSQCVNLTTRTQLPPAYTNSFTRGVYYPDKVFRSSVLHSTQDLFLPFFSNVTWFHAIHVSGTNGTKRFDNPVLPFNDGVYFASTEKSNIIRGWIFGTTLDSKTQSLLIVNNATNVVIKVCEFQFCNDPFLGVYYHKNNKSWMESEFRVYSSANNCTFEYVSQPFLMDLEGKQGNFKNLREFVFKNIDGYFKIYSKHTPINLVRDLPQGFSALEPLVDLPIGINITRFQTLLALHRSYLTPGDSSSGWTAGAAAYYVGYLQPRTFLLKYNENGTITDAVDCALDPLSETKCTLKSFTVEKGIYQTSNFRVQPTESIVRFPNITNLCPFGEVFNATRFASVYAWNRKRISNCVADYSVLYNSASFSTFKCYGVSPTKLNDLCFTNVYADSFVIRGDEVRQIAPGQTGKIADYNYKLPDDFTGCVIAWNSNNLDSKVGGNYNYLYRLFRKSNLKPFERDISTEIYQAGSTPCNGVEGFNCYFPLQSYGFQPTNGVGYQPYRVVVLSFELLHAPATVCGPKKSTNLVKNKCVNFNFNGLTGTGVLTESNKKFLPFQQFGRDIADTTDAVRDPQTLEILDITPCSFGGVSVITPGTNTSNQVAVLYQGVNCTEVPVAIHADQLTPTWRVYSTGSNVFQTRAGCLIGAEHVNNSYECDIPIGAGICASYQTQTNSPRRARSVASQSIIAYTMSLGAENSVAYSNNSIAIPTNFTISVTTEILPVSMTKTSVDCTMYICGDSTECSNLLLQYGSFCTQLNRALTGIAVEQDKNTQEVFAQVKQIYKTPPIKDFGGFNFSQILPDPSKPSKRSFIEDLLFNKVTLADAGFIKQYGDCLGDIAARDLICVQKFNGLTVLPPLLTDEMIAQYTSALLAGTITSGWTFGCGAALQIPFAMQMAYRFNGIGVTQNVLYENQKLIANQFNSAIGKIQDSLSSTASALGKLQDVVNQNAQALNTLVKQLSSNFGAISSVLNDILSRLDKVEAEVQIDRLITGRLQSLQTYVTQQLIRAAEIRASANLAATKMSECVLGQSKRCDFCGKGYHLMSFPQSAPHGVVFLHVTYVPAQEKNFTTAPAICHDGKAHFPREGVFVSNGTHWFVTQRNFYEPQIITTDNTFVSGNCDVVIGIVNNTVYDPLQPELDSFKEELDKYFKNHTSPDVDLGDISGINASVVNIQKEIDRLNEVAKNLNESLIDLQELGKYEQYIKWPWYIWLGFIAGLIAIVMVTIMLCCMTSCCSCLKGCCSCGSCCKFDEDDSEPVLKGVKLHYT

SEQ ID NO: 1175 - protein, 1273 aa, Artificial Sequence
  SARS-CoV-2/Finland/FIN03032020A/2020__EPI_ISL_413602 spike protein (1-1273)(A890C_V1040C)
MFVFLVLLPLVSSQCVNLTTRTQLPPAYTNSFTRGVYYPDKVFRSSVLHSTQDLFLPFFSNVTWFHAIHVSGTNGTKRFDNPVLPFNDGVYFASTEKSNIIRGWIFGTTLDSKTQSLLIVNNATNVVIKVCEFQFCNDPFLGVYYHKNNKSWMESEFRVYSSANNCTFEYVSQPFLMDLEGKQGNFKNLREFVFKNIDGYFKIYSKHTPINLVRDLPQGFSALEPLVDLPIGINITRFQTLLALHRSYLTPGDSSSGWTAGAAAYYVGYLQPRTFLLKYNENGTITDAVDCALDPLSETKCTLKSFTVEKGIYQTSNFRVQPTESIVRFPNITNLCPFGEVFNATRFASVYAWNRKRISNCVADYSVLYNSASFSTFKCYGVSPTKLNDLCFTNVYADSFVIRGDEVRQIAPGQTGKIADYNYKLPDDFTGCVISWNSNNLDSKVGGNYNYLYRLFRKSNLKPFERDISTEIYQAGSTPCNGVEGFNCYFPLQSYGFQPTNGVGYQPYRVVVLSFELLHAPATVCGPKKSTNLVKNKCVNFNFNGLTGTGVLTESNKKFLPFQQFGRDIADTTDAVRDPQTLEILDITPCSFGGVSVITPGTNTSNQVAVLYQGVNCTEVPVAIHADQLTPTWRVYSTGSNVFQTRAGCLIGAEHVNNSYECDIPIGAGICASYQTQTNSPRRARSVASQSIIAYTMSLGAENSVAYSNNSIAIPTNFTISVTTEILPVSMTKTSVDCTMYICGDSTECSNLLLQYGSFCTQLNRALTGIAVEQDKNTQEVFAQVKQIYKTPPIKDFGGFNFSQILPDPSKPSKRSFIEDLLFNKVTLADAGFIKQYGDCLGDIAARDLICAQKFNGLTVLPPLLTDEMIAQYTSALLAGTITSGWTFGCGAALQIPFAMQMAYRFNGIGVTQNVLYENQKLIANQFNSAIGKIQDSLSSTASALGKLQDVVNQNAQALNTLVKQLSSNFGAISSVLNDILSRLDKVEAEVQIDRLITGRLQSLQTYVTQQLIRAAEIRASANLAATKMSECVLGQSKRCDFCGKGYHLMSFPQSAPHGVVFLHVTYVPAQEKNFTTAPAICHDGKAHFPREGVFVSNGTHWFVTQRNFYEPQIITTDNTFVSGNCDVVIGIVNNTVYDPLQPELDSFKEELDKYFKNHTSPDVDLGDISGINASVVNIQKEIDRLNEVAKNLNESLIDLQELGKYEQYIKWPWYIWLGFIAGLIAIVMVTIMLCCMTSCCSCLKGCCSCGSCCKFDEDDSEPVLKGVKLHYT

SEQ ID NO: 1176 - protein, 1273 aa, Artificial Sequence
  SARS-CoV-2/France/GE1977/2020__EPI_ISL_414632 spike protein (1-1273)(A890C_V1040C)
MFVFLVLLPLVSSQCVNLTTRTQLPPAYTNSFTRGVYYPDKVFRSSVLHSTQDLFLPFFSNVTWFHAIHVSGTNGTKRFDNPVLPFNDGVYFASTEKSNIIRGWIFGTTLDSKTQSLLIVNNATNVVIKVCEFQFCNDPFLGVYYHKNNKSWMESEFRVYSSANNCTFEYVSQPFLMDLEGKQGNFKNLREFVFKNIDGYFKIYSKHTPINLVRDLPQGFSALEPLVDLPIGINITRFQTLLALHRSYLTPGDSSSGWTAGAAAYYVGYLQPRTFLLKYNENGTITDAVDCALDPLSETKCTLKSFTVEKGIYQTSNFRVQPTESIVRFPNITNLCPFGEVFNATRFASVYAWNRKRISNCVADYSVLYNSASFSTFKCYGVSPTKLNDLCFTNVYADSFVIRGDEVRQIAPGQTGKIADYNYKLPDDFTGCVIAWNSNNLDSKVGGNYNYLYRLFRKSNLKPFERDISTEIYQAGSTPCNGVEGFNCYFPLQSYGFQPTNGVGYQPYRVVVLSFELLHAPATVCGPKKSTNLVKNKCVNFNFNGLTGTGVLTESNKKFLPFQQFGRDIADTTDAVRDPQTLEILDITPCSFGGVSVITPGTNTSNQVAVLYQGVNCTEVPVAIHADQLTPTWRVYSTGSNVFQTRAGCLIGAEHVNNSYECDIPIGAGICASYQTQTNSPRRARSVASQSIIAYTMSLGAENSVAYSNNSIAIPTNFTISVTTEILPVSMTKTSVDCTMYICGDSTECSNLLLQYGSFCTQLNRALTGIAVEQDKNTQEVFAQVKQIYKTPPIKDFGGFNFSQILPDPSKPSKRSFIEDLLFNKVTLADAGFIKQYGDCLGDIAARDLICAQKFNGLTVLPPLLTDEMIAQYTSALLAGTITSGWTFGCGAALQIPFAMQMAYRFNGIGVTQNVLYENQKLIANQFNSAIGKIQDSLFSTASALGKLQDVVNQNAQALNTLVKQLSSNFGAISSVLNDILSRLDKVEAEVQIDRLITGRLQSLQTYVTQQLIRAAEIRASANLAATKMSECVLGQSKRCDFCGKGYHLMSFPQSAPHGVVFLHVTYVPAQEKNFTTAPAICHDGKAHFPREGVFVSNGTHWFVTQRNFYEPQIITTDNTFVSGNCDVVIGIVNNTVYDPLQPELDSFKEELDKYFKNHTSPDVDLGDISGINASVVNIQKEIDRLNEVAKNLNESLIDLQELGKYEQYIKWPWYIWLGFIAGLIAIVMVTIMLCCMTSCCSCLKGCCSCGSCCKFDEDDSEPVLKGVKLHYT

SEQ ID NO: 1177 - protein, 1273 aa, Artificial Sequence
  SARS-CoV-2/Finland/FIN-313/2020__EPI_ISL_414641 spike protein (1-1273)(A890C_V1040C)
MFVFLVLLPLVSSQCVNLTTRTQLPPAYTNSFTRGVYYPDKVFRSSVLHSTQDLFLPFFSNVTWFHAIHVSGTNGTKRFDNPVLPFNDGVYFASTEKSNIIRGWIFGTTLDSKTQSLLIVNNATNVVIKVCEFQFCNDPFLGVYYHKNNKSWMESEFRVYSSANNCTFEYVSQPFLMDLEGKQGNFKNLREFVFKNIDGYFKIYSKHTPINLVRDLPQGFSALEPLVDLPIGINITRFKTLLALHRSYLTPGDSSSGWTAGAAAYYVGYLQPRTFLLKYNENGTITDAVDCALDPLSETKCTLKSFTVEKGIYQTSNFRVQPTESIVRFPNITNLCPFGEVFNATRFASVYAWNRKRISNCVADYSVLYNSASFSTFKCYGVSPTKLNDLCFTNVYADSFVIRGDEVRQIAPGQTGKIADYNYKLPDDFTGCVIAWNSNNLDSKVGGNYNYLYRLFRKSNLKPFERDISTEIYQAGSTPCNGVEGFNCYFPLQSYGFQPTNGVGYQPYRVVVLSFELLHAPATVCGPKKSTNLVKNKCVNFNFNGLTGTGVLTESNKKFLPFQQFGRDIADTTDAVRDPQTLEILDITPCSFGGVSVITPGTNTSNQVAVLYQGVNCTEVPVAIHADQLTPTWRVYSTGSNVFQTRAGCLIGAEHVNNSYECDIPIGAGICASYQTQTNSPRRARSVASQSIIAYTMSLGAENSVAYSNNSIAIPTNFTISVTTEILPVSMTKTSVDCTMYICGDSTECSNLLLQYGSFCTQLNRALTGIAVEQDKNTQEVFAQVKQIYKTPPIKDFGGFNFSQILPDPSKPSKRSFIEDLLFNKVTLADAGFIKQYGDCLGDIAARDLICAQKFNGLTVLPPLLTDEMIAQYTSALLAGTITSGWTFGCGAALQIPFAMQMAYRFNGIGVTQNVLYENQKLIANQFNSAIGKIQDSLSSTASALGKLQDVVNQNAQALNTLVKQLSSNFGAISSVLNDILSRLDKVEAEVQIDRLITGRLQSLQTYVTQQLIRAAEIRASANLAATKMSECVLGQSKRCDFCGKGYHLMSFPQSAPHGVVFLHVTYVPAQEKNFTTAPAICHDGKAHFPREGVFVSNGTHWFVTQRNFYEPQIITTDNTFVSGNCDVVIGIVNNTVYDPLQPELDSFKEELDKYFKNHTSPDVDLGDISGINASVVNIQKEIDRLNEVAKNLNESLIDLQELGKYEQYIKWPWYIWLGFIAGLIAIVMVTIMLCCMTSCCSCLKGCCSCGSCCKFDEDDSEPVLKGVKLHYT

SEQ ID NO: 1178 - protein, 1273 aa, Artificial Sequence
  SARS-CoV-2/Netherlands/ZuidHolland_2/2020__EPI_ISL_414556 spike protein (1-1273)(A890C_V1040C)
MFVFLVLLPLVSSQCVNLTTRTQLPPAYTNSFTRGVYYPDKVFRSSVLHSTQDLFLPFFSNVTWFHAIHVSGTNGTKRFDNPVLPFNDGVYFASTEKSNIIRGWIFGTTLDSKTQSLLIVNNATNVVIKVCEFQFCNDPFLGVYYHKNNKSWMESEFRVYSSANNCTFEYVSQPFLMDLEGKQGNFKNLREFVFKNIDGYFKIYSKHTPINLVRDLPQGFSALEPLVDLPIGINITRFQTLLALHRSYLTPGDSSSGWTAGAAAYYVGYLQPRTFLLKYNENGTITDAVDCALDPLSETKCTLKSFTVEKGIYQTSNFRVQPTESIVRFPNITNLCPFGEVFNATRFASVYAWNRKRISNCVADYSVLYNSASFSTFKCYGVSPTKLNDLCFTNVYADSFVIRGDEVRQIAPGQTGKIADYNYKLPDDFTGCVIAWNSNNLDSKVGGNYNYLYRLFRKSNLKPFERDISTEIYQAGSTPCNGVEGFNCYFPLQSYGFQPTNGVGYQPYRVVVLSFELLHAPATVCGPKKSTNLVKNKCVNFNFNGLTGTGVLTESNKKFLPFQQFGRDIADTTDAVRDPQTLEILDITPCSFGGVSVITPGTNTSNQVAVLYQGVNCTEVPVAIHADQLTPTWRVYSTGSNVFQTRAGCLIGAEHVNNSYECDIPIGAGICASYQTQTNSPRRARSVASQSIIAYTMSLGAENSVAYSNNSIAIPTNFTISVTTEILPVSMTKTSVDCTMYICGDSTECSNLLLQYGSFCTQLNRALTGIALEQDKNTQEVFAQVKQIYKTPPIKDFGGFNFSQILPDPSKPSKRSFIEDLLFNKVTLADAGFIKQYGDCLGDIAARDLICAQKFNGLTVLPPLLTDEMIAQYTSALLAGTITSGWTFGCGAALQIPFAMQMAYRFNGIGVTQNVLYENQKLIANQFNSAIGKIQDSLSSTASALGKLQDVVNQNAQALNTLVKQLSSNFGAISSVLNDILSRLDKVEAEVQIDRLITGRLQSLQTYVTQQLIRAAEIRASANLAATKMSECVLGQSKRCDFCGKGYHLMSFPQSAPHGVVFLHVTYVPAQEKNFTTAPAICHDGKAHFPREGVFVSNGTHWFVTQRNFYEPQIITTDNTFVSGNCDVVIGIVNNTVYDPLQPELDSFKEELDKYFKNHTSPDVDLGDISGINASVVNIQKEIDRLNEVAKNLNESLIDLQELGKYEQYIKWPWYIWLGFIAGLIAIVMVTIMLCCMTSCCSCLKGCCSCGSCCKFDEDDSEPVLKGVKLHYT

SEQ ID NO: 1179 - protein, 1273 aa, Artificial Sequence
  SARS-CoV-2/USA/WA-UW31/2020__EPI_ISL_414618 spike protein (1-1273)(A890C_V1040C)
MFVFLVLLPLVSSQCVNLTTRTQLPPAYTNSFTRGVYYPDKVFRSSVLHSTQDLFLPFFSNVTWFHAIHVSGTNGTKRFDNPVLPFNDGVYFASTEKSNIIRGWIFGTTLDSKTQSLLIVNNATNVVIKVCEFQFCNDPFLGVYYHKNNKSWMESEFRVYSSANNCTFEYVSQPFLMDLEGKQGNFKNLREFVFKNIDGYFKIYSKHTPINLVRDLPQGFSALEPLVDLPIGINITRFQTLLALHRSYLTPGDSSSGWTAGAAAYYVGYLQPRTFLLKYNENGTITDAVDCALDPLSETKCTLKSFTVEKGIYQTSNFRVQPTESIVRFPNITNLCPFGEVFNATRFASVYAWNRKRISNCVADYSVLYNSASFSTFKCYGVSPTKLNDLCFTNVYADSFVIRGDEVRQIAPGQTGKIADYNYKLPDDFTGCVIAWNSNNLDSKVGGNYNYLYRLFRKSNLKPFERDISTEIYQAGSTPCNGAEGFNCYFPLQSYGFQPTNGVGYQPYRVVVLSFELLHAPATVCGPKKSTNLVKNKCVNFNFNGLTGTGVLTESNKKFLPFQQFGRDIADTTDAVRDPQTLEILDITPCSFGGVSVITPGTNTSNQVAVLYQDVNCTEVPVAIHADQLTPTWRVYSTGSNVFQTRAGCLIGAEHVNNSYECDIPIGAGICASYQTQTNSPRRARSVASQSIIAYTMSLGAENSVAYSNNSIAIPTNFTISVTTEILPVSMTKTSVDCTMYICGDSTECSNLLLQYGSFCTQLNRALTGIAVEQDKNTQEVFAQVKQIYKTPPIKDFGGFNFSQILPDPSKPSKRSFIEDLLFNKVTLADAGFIKQYGDCLGDIAARDLICAQKFNGLTVLPPLLTDEMIAQYTSALLAGTITSGWTFGCGAALQIPFAMQMAYRFNGIGVTQNVLYENQKLIANQFNSAIGKIQDSLSSTASALGKLQDVVNQNAQALNTLVKQLSSNFGAISSVLNDILSRLDKVEAEVQIDRLITGRLQSLQTYVTQQLIRAAEIRASANLAATKMSECVLGQSKRCDFCGKGYHLMSFPQSAPHGVVFLHVTYVPAQEKNFTTAPAICHDGKAHFPREGVFVSNGTHWFVTQRNFYEPQIITTDNTFVSGNCDVVIGIVNNTVYDPLQPELDSFKEELDKYFKNHTSPDVDLGDISGINASVVNIQKEIDRLNEVAKNLNESLIDLQELGKYEQYIKWPWYIWLGFIAGLIAIVMVTIMLCCMTSCCSCLKGCCSCGSCCKFDEDDSEPVLKGVKLHYT

SEQ ID NO: 1180 - protein, 1273 aa, Artificial Sequence
  SARS-CoV-2/South Korea/SNU01/2020__EPI_ISL_411929 spike protein (1-1273)(A890C_V1040C)
MFVFLVLLPLVSSQCVNLTTRTQLPPAYTNSFTRGVYYPDKVFRSSVLHSTQDLFLPFFSNVTWFHAIHVSGTNGTKRFDNPVLPFNDGVYFASTEKSNIIRGWIFGTTLDSKTQSLLIVNNATNVVIKVCEFQFCNDPFLGVYYHKNNKSWMESEFRVYSSANNCTFEYVSQPFLMDLEGKQGNFKNLREFVFKNIDGYFKIYSKHTPINLVRDLPQGFWALEPLVDLPIGINITRFQTLLALHRSYLTPGDSSSGWTAGAAAYYVGYLQPRTFLLKYNENGTITDAVDCALDPLSETKCTLKSFTVEKGIYQTSNFRVQPTESIVRFPNITNLCPFGEVFNATRFASVYAWNRKRISNCVADYSVLYNSASFSTFKCYGVSPTKLNDLCFTNVYADSFVIRGDEVRQIAPGQTGKIADYNYKLPDDFTGCVIAWNSNNLDSKVGGNYNYLYRLFRKSNLKPFERDISTEIYQAGSTPCNGVEGFNCYFPLQSYGFQPTNGVGYQPYRVVVLSFELLHAPATVCGPKKSTNLVKNKCVNFNFNGLTGTGVLTESNKKFLPFQQFGRDIADTTDAVRDPQTLEILDITPCSFGGVSVITPGTNTSNQVAVLYQDVNCTEVPVAIHADQLTPTWRVYSTGSNVFQTRAGCLIGAEHVNNSYECDIPIGAGICASYQTQTNSPRRARSVASQSIIAYTMSLGAENSVAYSNNSIAIPTNFTISVTTEILPVSMTKTSVDCTMYICGDSTECSNLLLQYGSFCTQLNRALTGIAVEQDKNTQEVFAQVKQIYKTPPIKDFGGFNFSQILPDPSKPSKRSFIEDLLFNKVTLADAGFIKQYGDCLGDIAARDLICAQKFNGLTVLPPLLTDEMIAQYTSALLAGTITSGWTFGCGAALQIPFAMQMAYRFNGIGVTQNVLYENQKLIANQFNSAIGKIQDSLSSTASALGKLQDVVNQNAQALNTLVKQLSSNFGAISSVLNDILSRLDKVEAEVQIDRLITGRLQSLQTYVTQQLIRAAEIRASANLAATKMSECVLGQSKRCDFCGKGYHLMSFPQSAPHGVVFLHVTYVPAQEKNFTTAPAICHDGKAHFPREGVFVSNGTHWFVTQRNFYEPQIITTDNTFVSGNCDVVIGIVNNTVYDPLQPELDSFKEELDKYFKNHTSPDVDLGDISGINASVVNIQKEIDRLNEVAKNLNESLIDLQELGKYEQYIKWPWYIWLGFIAGLIAIVMVTIMLCCMTSCCSCLKGCCSCGSCCKFDEDDSEPVLKGVKLHYT

SEQ ID NO: 1181 - protein, 1273 aa, Artificial Sequence
  SARS-CoV-2/China/WF0004/2020__EPI_ISL_413694 spike protein (1-1273)(A890C_V1040C)
MFVFLVLLPLVSSQCVNLTTRTQLPPAYTNSFTRGVYYPDKVFRSSVLHSTQDLFLPFFSNVTWFHAIHVSGTNGTKRFDNPVLPFNDGVYFASTEKSNIIRGWIFGTTLDSKTQSLLIVNNATNVVIKVCEFQFCNDPFLGVYYHKNNKSWTESEFRVYSSANNCTFEYVSQPFLMDLEGKQGNFKNLREFVFKNIDGYFKIYSKHTPINLVRDLPQGFSALEPLVDLPIGINITRFQTLLALHRSYLTPGDSSSGWTAGAAAYYVGYLQPRTFLLKYNENGTITDAVDCALDPLSETKCTLKSFTVEKGIYQTSNFRVQPTESIVRFPNITNLCPFGEVFNATRFASVYAWNRKRISNCVADYSVLYNSASFSTFKCYGVSPTKLNDLCFTNVYADSFVIRGDEVRQIAPGQTGKIADYNYKLPDDFTGCVIAWNSNNLDSKVGGNYNYLYRLFRKSNLKPFERDISTEIYQAGSTPCNGVEGFNCYFPLQSYGFQPTNGVGYQPYRVVVLSFELLHAPATVCGPKKSTNLVKNKCVNFNFNGLTGTGVLTESNKKFLPFQQFGRDIADTTDAVRDPQTLEILDITPCSFGGVSVITPGTNTSNQVAVLYQDVNCTEVPVAIHADQLTPTWRVYSTGSNVFQTRAGCLIGAEHVNNSYECDIPIGAGICASYQTQTNSPRRARSVASQSIIAYTMSLGAENSVAYSNNSIAIPTNFTISVTTEILPVSMTKTSVDCTMYICGDSTECSNLLLQYGSFCTQLNRALTGIAVEQDKNTQEVFAQVKQIYKTPPIKDFGGFNFSQILPDPSKPSKRSFIEDLLFNKVTLADAGFIKQYGDCLGDIAARDLICAQKFNGLTVLPPLLTDEMIAQYTSALLAGTITSGWTFGCGAALQIPFAMQMAYRFNGIGVTQNVLYENQKLIANQFNSAIGKIQDSLSSTASALGKLQDVVNQNAQALNTLVKQLSSNFGAISSVLNDILSRLDKVEAEVQIDRLITGRLQSLQTYVTQQLIRAAEIRASANLAATKMSECVLGQSKRCDFCGKGYHLMSFPQSAPHGVVFLHVTYVPAQEKNFTTAPAICHDGKAHFPREGVFVSNGTHWFVTQRNFYEPQIITTDNTFVSGNCDVVIGIVNNTVYDPLQPELDSFKEELDKYFKNHTSPDVDLGDISGINASVVNIQKEIDRLNEVAKNLNESLIDLQELGKYEQYIKWPWYIWLGFIAGLIAIVMVTIMLCCMTSCCSCLKGCCSCGSCCKFDEDDSEPVLKGVKLHYT

SEQ ID NO: 1182 - protein, 1273 aa, Artificial Sequence
  SARS-CoV-2/China/WF0028/2020__EPI_ISL_413791 spike protein (1-1273)(A890C_V1040C)
MFVFLVLLPLVSSQCVNLTTRTQLPPAYTNSFTRGVYYPDKVFRSSVLHSTQDLFLPFFSNVTWFHAIHVSGTNGTKRFDNPVLPFNDGVYFASTEKSNIIRGWIFGTTLDSKTQSLLIVNNATNVVIKVCEFQFCNDPFLGVYYHKNNKSWMESEFRVYSSANNCTFEYVSQPFLMDLEGKQGNFKNLREFVFKNIDGYFKIYSKHTPINLVRDLPQGFSALEPLVDLPIGINITRFQTLLALHRSYLTPGDSSSGWTAGAAAYYVGYLQPRTFLLKYNENGTITDAVDCALDPLSETKCTLKSFTVEKGIYQTSNFRVQPTESIVRFPNITNLCPFGEVFNATRFASVYAWNRKRISNCVADYSVLYNSASFSTFKCYGVSPTKLNDLCFTNVYADSFVIRGDEVRQIAPGQTGKIADYNYKLPDDFTGCVIAWNSNNLDSKVGGNYNYLYRLFRKSNLKPFERDISTEIYQAGSTPCNGVEGFNCYFPLQSYGFQPTNGVGYQPYRVVVLSFELLHAPATVCGPKKSTNLVKNKCVNFNFNGLTGTGVLTESNKKFLPFQQFGRDIADTTDAVRDPQTLEILDITPCSFGGVSVITPGTNTSNQVAVLYQDVNCTEVPVAIHADQLTPTWRVYSTGSNVFQTRAGCLIGAEHVNNSYECDIPIGAGICASYQTQTNSPRRARSVASQSIIAYTMSLGAENSVAYSNNSIAIPTNFTISVTTEILPVSMTKTSVDCTMYICGDSTECSNLLLQYGSFCTQLNRALTGIAVEQDKNTQEVFAQVKQIYKTPPIKDFGGFNFSQILPDPSKPSKRSFIEDLLFNKVTLADAGFIKQYGDCLGDIAARDLICAQKFNGLTVLPPLLTDEMIAQYTSALLAGTITSGWTFGCGAALQIPFAMQMAYRFNGIGVTQNVLYENQKLIANQFNSAIGKIQDSLSSTASALGKLQDVVNQNAQALNTLVKQLSSNFGAISSVLNDILSRLDKVEAEVQIDRLITGRLQSLQTYVTQQLIRAAEIRASANLAATKMSECVLGQSKRCDFCGKGYHLMSFPQSAPHGVVFLHVTYVPAQEKNFTTAPAICHDGKAHFPREGVFVSNGTHWFVTQRNFYEPQIITTDNTFVSGNCDVVIGIVNNTVYDPLQPELESFKEELDKYFKNHTSPDVDLGDISGINASVVNIQKEIDRLNEVAKNLNESLIDLQELGKYEQYIKWPWYIWLGFIAGLIAIVMVTIMLCCMTSCCSCLKGCCSCGSCCKFDEDDSEPVLKGVKLHYT

SEQ ID NO: 1183 - protein, 1273 aa, Artificial Sequence
  SARS-CoV-2/2019-nCoV/USA-CruiseA-18/2020__MT159716.1 spike protein (1-1273)(A890C_V1040C)
MFVFLVLLPLVSSQCVNLTTRTQLPPAYTNSFTRGVYYPDKVFRSSVLHSTQDLFLPFFSNVTWFHAIHVSGTNGTKRFDNPVLPFNDGVYFASTEKSNIIRGWIFGTTLDSKTQSLLIVNNATNVVIKVCEFQFCNDPFLGVYYHKNNKSWMESELRVYSSANNCTFEYVSQPFLMDLEGKQGNFKNLREFVFKNIDGYFKIYSKHTPINLVRDLPQGFSALEPLVDLPIGINITRFQTLLALHRSYLTPGDSSSGWTAGAAAYYVGYLQPRTFLLKYNENGTITDAVDCALDPLSETKCTLKSFTVEKGIYQTSNFRVQPTESIVRFPNITNLCPFGEVFNATRFASVYAWNRKRISNCVADYSVLYNSASFSTFKCYGVSPTKLNDLCFTNVYADSFVIRGDEVRQIAPGQTGKIADYNYKLPDDFTGCVIAWNSNNLDSKVGGNYNYLYRLFRKSNLKPFERDISTEIYQAGSTPCNGVEGFNCYFPLQSYGFQPTNGVGYQPYRVVVLSFELLHAPATVCGPKKSTNLVKNKCVNFNFNGLTGTGVLTESNKKFLPFQQFGRDIADTTDAVRDPQTLEILDITPCSFGGVSVITPGTNTSNQVAVLYQDVNCTEVPVAIHADQLTPTWRVYSTGSNVFQTRAGCLIGAEHVNNSYECDIPIGAGICASYQTQTNSPRRARSVASQSIIAYTMSLGAENSVAYSNNSIAIPTNFTISVTTEILPVSMTKTSVDCTMYICGDSTECSNLLLQYGSFCTQLNRALTGIAVEQDKNTQEVFAQVKQIYKTPPIKDFGGFNFSQILPDPSKPSKRSFIEDLLFNKVTLADAGFIKQYGDCLGDIAARDLICAQKFNGLTVLPPLLTDEMIAQYTSALLAGTITSGWTFGCGAALQIPFAMQMAYRFNGIGVTQNVLYENQKLIANQFNSAIGKIQDSLSSTASALGKLQDVVNQNAQALNTLVKQLSSNFGAISSVLNDILSRLDKVEAEVQIDRLITGRLQSLQTYVTQQLIRAAEIRASANLAATKMSECVLGQSKRCDFCGKGYHLMSFPQSAPHGVVFLHVTYVPAQEKNFTTAPAICHDGKAHFPREGVFVSNGTHWFVTQRNFYEPQIITTDNTFVSGNCDVVIGIVNNTVYDPLQPELDSFKEELDKYFKNHTSPDVDLGDISGINASVVNIQKEIDRLNEVAKNLNESLIDLQELGKYEQYIKWPWYIWLGFIAGLIAIVMVTIMLCCMTSCCSCLKGCCSCGSCCKFDEDDSEPVLKGVKLHYT

SEQ ID NO: 1184 - protein, 1273 aa, Artificial Sequence
  SARS-CoV-2/SARS-CoV-2/Yunnan-01/human/2020/CHN__MT049951.1 spike protein (1-1273)(A890C_V1040C)
MFVFLVLLPLVSSQCVNLTTRTQLPPANTNSFTRGVYYPDKVFRSSVLHSTQDLFLPFFSNVTWFHAIHVSGTNGTKRFDNPVLPFNDGVYFASTEKSNIIRGWIFGTTLDSKTQSLLIVNNATNVVIKVCEFQFCNDPFLGVYYHKNNKSWMESEFRVYSSANNCTFEYVSQPFLMDLEGKQGNFKNLREFVFKNIDGYFKIYSKHTPINLVRDLPQGFSALEPLVDLPIGINITRFQTLLALHRSYLTPGDSSSGWTAGAAAYYVGYLQPRTFLLKYNENGTITDAVDCALDPLSETKCTLKSFTVEKGIYQTSNFRVQPTESIVRFPNITNLCPFGEVFNATRFASVYAWNRKRISNCVADYSVLYNSASFSTFKCYGVSPTKLNDLCFTNVYADSFVIRGDEVRQIAPGQTGKIADYNYKLPDDFTGCVIAWNSNNLDSKVGGNYNYLYRLFRKSNLKPFERDISTEIYQAGSTPCNGVEGFNCYFPLQSYGFQPTNGVGYQPYRVVVLSFELLHAPATVCGPKKSTNLVKNKCVNFNFNGLTGTGVLTESNKKFLPFQQFGRDIADTTDAVRDPQTLEILDITPCSFGGVSVITPGTNTSNQVAVLYQDVNCTEVPVAIHADQLTPTWRVYSTGSNVFQTRAGCLIGAEHVNNSYECDIPIGAGICASYQTQTNSPRRARSVASQSIIAYTMSLGAENSVAYSNNSIAIPTNFTISVTTEILPVSMTKTSVDCTMYICGDSTECSNLLLQYGSFCTQLNRALTGIAVEQDKNTQEVFAQVKQIYKTPPIKDFGGFNFSQILPDPSKPSKRSFIEDLLFNKVTLADAGFIKQYGDCLGDIAARDLICAQKFNGLTVLPPLLTDEMIAQYTSALLAGTITSGWTFGCGAALQIPFAMQMAYRFNGIGVTQNVLYENQKLIANQFNSAIGKIQDSLSSTASALGKLQDVVNQNAQALNTLVKQLSSNFGAISSVLNDILSRLDKVEAEVQIDRLITGRLQSLQTYVTQQLIRAAEIRASANLAATKMSECVLGQSKRCDFCGKGYHLMSFPQSAPHGVVFLHVTYVPAQEKNFTTAPAICHDGKAHFPREGVFVSNGTHWFVTQRNFYEPQIITTDNTFVSGNCDVVIGIVNNTVYDPLQPELDSFKEELDKYFKNHTSPDVDLGDISGINASVVNIQKEIDRLNEVAKNLNESLIDLQELGKYEQYIKWPWYIWLGFIAGLIAIVMVTIMLCCMTSCCSCLKGCCSCGSCCKFDEDDSEPVLKGVKLHYT

SEQ ID NO: 1185 - protein, 1273 aa, Artificial Sequence
  SARS-CoV-2/USA/WA-UW292/2020__EPI_ISL_418077 spike protein (1-1273)(A890C_V1040C)
MFVFLVLLPLVSSQCVNLTTRTQLPPAYTNSFTRGVYYPDKVFRSSVLHSTQDLFLPFFSNVTWFHAIHVSGTNGTKRFDNPVLPFNDGVYFASTEKSNIIRGWIFGTTLDSKTQSLLIVNNATNVVIKVCEFQFCNDPFLGVYYHKNNKSWMESEFRVYSSANNCTFEYVSQPFLMDLEGKQGNFKNLREFVFKNIDGYFKIYSKHTPINLVRDLPQGFSALEPLVDLPIGINITRFQTLLALHRSYLTPGDSSSGWTAGAAAYYVGYLQPRTFLLKYNENGTITDAVDCALDPLSETKCTLKSFTVEKGIYQTSNFRVQPTESIVRFPNITNLCPFGEVFNATRFASVYAWNRKRISNCVADYSVLYNSASFSTFKCYGVSPTKLNDLCFTNVYADSFVIRGDEVRQIAPGQTGKIADYNYKLPDDFTGCVIAWNSNNLDSKVGGNYNYLYRLFRKSNLKPFERDISTEIYQASSTPCNGVEGFNCYFPLQSYGFQPTNGVGYQPYRVVVLSFELLHAPATVCGPKKSTNLVKNKCVNFNFNGLTGTGVLTESNKKFLPFQQFGRDIADTTDAVRDPQTLEILDITPCSFGGVSVITPGTNTSNQVAVLYQDVNCTEVPVAIHADQLTPTWRVYSTGSNVFQTRAGCLIGAEHVNNSYECDIPIGAGICASYQTQTNSPRRARSVASQSIIAYTMSLGAENSVAYSNNSIAIPTNFTISVTTEILPVSMTKTSVDCTMYICGDSTECSNLLLQYGSFCTQLNRALTGIAVEQDKNTQEVFAQVKQIYKTPPIKDFGGFNFSQILPDPSKPSKRSFIEDLLFNKVTLADAGFIKQYGDCLGDIAARDLICAQKFNGLTVLPPLLTDEMIAQYTSALLAGTITSGWTFGCGAALQIPFAMQMAYRFNGIGVTQNVLYENQKLIANQFNSAIGKIQDSLSSTASALGKLQDVVNQNAQALNTLVKQLSSNFGAISSVLNDILSRLDKVEAEVQIDRLITGRLQSLQTYVTQQLIRAAEIRASANLAATKMSECVLGQSKRCDFCGKGYHLMSFPQSAPHGVVFLHVTYVPAQEKNFTTAPAICHDGKAHFPREGVFVSNGTHWFVTQRNFYEPQIITTDNTFVSGNCDVVIGIVNNTVYDPLQPELDSFKEELDKYFKNHTSPDVDLGDISGINASVVNIQKEIDRLNEVAKNLNESLIDLQELGKYEQYIKWPWYIWLGFIAGLIAIVMVTIMLCCMTSCCSCLKGCCSCGSCCKFDEDDSEPVLKGVKLHYT

SEQ ID NO: 1186 - protein, 1273 aa, Artificial Sequence
  SARS-CoV-2/Iceland/192/2020__EPI_ISL_417819 spike protein (1-1273)(A890C_V1040C)
MFVFFVLLPLVSSQCVNLTTRTQLPPAYTNSFTRGVYYPDKVFRSSVLHSTQDLFLPFFSNVTWFHAIHVSGTNGTKRFDNPVLPFNDGVYFASTEKSNIIRGWIFGTTLDSKTQSLLIVNNATNVVIKVCEFQFCNDPFLGVYYHKNNKSWMESEFRVYSSANNCTFEYVSQPFLMDLEGKQGNFKNLREFVFKNIDGYFKIYSKHTPINLVRDLPQGFSALEPLVDLPIGINITRFQTLLALHRSYLTPGDSSSGWTAGAAAYYVGYLQPRTFLLKYNENGTITDAVDCALDPLSETKCTLKSFTVEKGIYQTSNFRVQPTESIVRFPNITNLCPFGEVFNATRFASVYAWNRKRISNCVADYSVLYNSASFSTFKCYGVSPTKLNDLCFTNVYADSFVIRGDEVRQIAPGQTGKIADYNYKLPDDFTGCVIAWNSNNLDSKVGGNYNYLYRLFRKSNLKPFERDISTEIYQAGSTPCNGVEGFNCYFPLQSYGFQPTNGVGYQPYRVVVLSFELLHAPATVCGPKKSTNLVKNKCVNFNFNGLTGTGVLTESNKKFLPFQQFGRDIADTTDAVRDPQTLEILDITPCSFGGVSVITPGTNTSNQVAVLYQGVNCTEVPVAIHADQLTPTWRVYSTGSNVFQTRAGCLIGAEHVNNSYECDIPIGAGICASYQTQTNSPRRARSVASQSIIAYTMSLGAENSVAYSNNSIAIPTNFTISVTTEILPVSMTKTSVDCTMYICGDSTECSNLLLQYGSFCTQLNRALTGIAVEQDKNTQEVFAQVKQIYKTPPIKDFGGFNFSQILPDPSKPSKRSFIEDLLFNKVTLADAGFIKQYGDCLGDIAARDLICAQKFNGLTVLPPLLTDEMIAQYTSALLAGTITSGWTFGCGAALQIPFAMQMAYRFNGIGVTQNVLYENQKLIANQFNSAIGKIQDSLSSTASALGKLQDVVNQNAQALNTLVKQLSSNFGAISSVLNDILSRLDKVEAEVQIDRLITGRLQSLQTYVTQQLIRAAEIRASANLAATKMSECVLGQSKRCDFCGKGYHLMSFPQSAPHGVVFLHVTYVPAQEKNFTTAPAICHDGKAHFPREGVFVSNGTHWFVTQRNFYEPQIITTDNTFVSGNCDVVIGIVNNTVYDPLQPELDSFKEELDKYFKNHTSPDVDLGDISGINASVVNIQKEIDRLNEVAKNLNESLIDLQELGKYEQYIKWPWYIWLGFIAGLIAIVMVTIMLCCMTSCCSCLKGCCSCGSCCKFDEDDSEPVLKGVKLHYT

SEQ ID NO: 1187 - protein, 1273 aa, Artificial Sequence
  SARS-CoV-2/Belgium/ULG-6939/2020__EPI_ISL_417020 spike protein (1-1273)(A890C_V1040C)
MFVFLVLLPLVSSQCVNLTTRTQLPPAYTNSFTRGVYYPDKVFRSSVLHSTQDLFLPFFSNVTWFHAIHVSGTNGTKRFDNPVLPFNDGVYFASTEKSNIIRGWIFGTTLDSKTQSLLIVNNATNVVIKVCEFQFCNDPFLGVYYHKNNKSWMESEFRVYSSANNCTFEYVSQPFLMDLEGKQGNFKNLREFVFKNIDGYFKIYSKHTPINLVRDLPQGFSALEPLVDLPIGINITRFQTLLALHRSYLTPGDSSSGWTAGAAAYYVGYLQPRTFLLKYNENGTITDAVDCALDPLSETKCTLKSFTVEKGIYQTSNFRVQPTESIVRFPNITNLCPFGEVFNATRFASVYAWNRKRISNCVADYSVLYNSASFSTFKCYGVSPTKLNDLCFTNVYADSFVIRGDEVRQIAPGQTGKIADYNYKLPDDFTGCVIAWNSNNLDSKVGGNYNYLYRLFRKSNLKPFERDISTEIYQAGSTPCNGVEGFNCYFPLQSYGFQPTNGVGYQPYRVVVLSFELLHAPATVCGPKKSTNLVKNKCVNFNFNGLTGTGVLTESNKKFLPFQQFGRDIADTTDAVRDPQTLEILDITPCSFGGVSVITPGTNTSNQVAVLYQGVNCTEVPVAIHADQLTPTWRVYSTGSNVFQTRAGCLIGAEHVNNSYECDIPIGAGICASYQTQTNSPRRARSVASQSIIAYTMSLGAENSVVYSNNSIAIPTNFTISVTTEILPVSMTKTSVDCTMYICGDSTECSNLLLQYGSFCTQLNRALTGIAVEQDKNTQEVFAQVKQIYKTPPIKDFGGFNFSQILPDPSKPSKRSFIEDLLFNKVTLADAGFIKQYGDCLGDIAARDLICAQKFNGLTVLPPLLTDEMIAQYTSALLAGTITSGWTFGCGAALQIPFAMQMAYRFNGIGVTQNVLYENQKLIANQFNSAIGKIQDSLSSTASALGKLQDVVNQNAQALNTLVKQLSSNFGAISSVLNDILSRLDKVEAEVQIDRLITGRLQSLQTYVTQQLIRAAEIRASANLAATKMSECVLGQSKRCDFCGKGYHLMSFPQSAPHGVVFLHVTYVPAQEKNFTTAPAICHDGKAHFPREGVFVSNGTHWFVTQRNFYEPQIITTDNTFVSGNCDVVIGIVNNTVYDPLQPELDSFKEELDKYFKNHTSPDVDLGDISGINASVVNIQKEIDRLNEVAKNLNESLIDLQELGKYEQYIKWPWYIWLGFIAGLIAIVMVTIMLCCMTSCCSCLKGCCSCGSCCKFDEDDSEPVLKGVKLHYT

SEQ ID NO: 1188 - protein, 1273 aa, Artificial Sequence
  SARS-CoV-2/France/HF2496/2020__EPI_ISL_418231 spike protein (1-1273)(A890C_V1040C)
MFVFLVLLPLVSSQCVNLTTRTQLPPAYTNSFTRGVYYPDKVFRSSVLHSTQDLFLPFFSNVTWFHAIHVSGTNGTKRFDNPVLPFNDGVYFASTEKSNIIRGWIFGTTLDSKTQSLLIVNNATNVVIKVCEFQFCNDPFLGVYYHKNNKSWMESEFRVYSSANNCTFEYVSQPFLMDLEGKQGNFKNLREFVFKNIDGYFKIYSKHTPINLVRDLPQGFSALEPLVDLPIGINITRFQTLLALHRSYLTPGDSSSGWTAGAAAYYVGYLQPRTFLLKYNENGTITDAVDCALDPLSETKCTLKSFTVEKGIYQTSNFRVQPTESIVRFPNITNLCPFGEVFNATRFASVYAWNRKRISNCVADYSVLYNSASFSTFKCYGVSPTKLNDLCFTNVYADSFVIRGDEVRQIAPGQTGKIADYNYKLPDDFTGCVIAWNSNNLDSKVGGNYNYLYRLFRKSNLKPFERDISTEIYQAGSTPCNGVEGFNCYFPLQSYGFQPTNGVGYQPYRVVVLSFELLHAPATVCGPKKSTNLVKNKCVNFNFNGLTGTGVLTESNKKFLPFQQFGRDIADTTDAVRDPQTLEILDITPCSFGGVSVITPGTNTSNQVAVLYQGVNCTEVPVAIHADQLTPTWRVYSTGSNVFQTRAGCLIGAEHVNNSYECDIPIGAGICASYQTQTNSPRRARSVASQSIIAYTMSLGAENSVAYSNNSIAIPTNFTISVTTEILPVSMTKTSVDCTMYICGDSTECSNLLLQYGSFCTQLNRALTGIAVEQDKNTQEVFAQVKQIYKTPPIKDFGGFNFSQILPDPSKPSKRSFIEDLLFNKVTLADAGFIKQYGDCLGDIVARDLICAQKFNGLTVLPPLLTDEMIAQYTSALLAGTITSGWTFGCGAALQIPFAMQMAYRFNGIGVTQNVLYENQKLIANQFNSAIGKIQDSLSSTASALGKLQDVVNQNAQALNTLVKQLSSNFGAISSVLNDILSRLDKVEAEVQIDRLITGRLQSLQTYVTQQLIRAAEIRASANLAATKMSECVLGQSKRCDFCGKGYHLMSFPQSAPHGVVFLHVTYVPAQEKNFTTAPAICHDGKAHFPREGVFVSNGTHWFVTQRNFYEPQIITTDNTFVSGNCDVVIGIVNNTVYDPLQPELDSFKEELDKYFKNHTSPDVDLGDISGINASVVNIQKEIDRLNEVAKNLNESLIDLQELGKYEQYIKWPWYIWLGFIAGLIAIVMVTIMLCCMTSCCSCLKGCCSCGSCCKFDEDDSEPVLKGVKLHYT

SEQ ID NO: 1189 - protein, 1273 aa, Artificial Sequence
  SARS-CoV-2/USA/WA-UW291/2020__EPI_ISL_418076 spike protein (1-1273)(A890C_V1040C)
MFVFLVLLPLVSSQCVNLTTRTQLPPAYTNSFTRGVYYPDKVFRSSVLHSTQDLFLPFFSNVTWFHAIHVSGTNGTKRFDNPVLPFNDGVYFASTEKSNIIRGWIFGTTLDSKTQSLLIVNNATNVVIKVCEFQFCNDPFLGVYYHKNNKSWMESEFRVYSSANNCTFEYVSQPFLMDLEGKQGNFKNLREFVFKNIDGYFKIYSKHTPINLVRDLPQGFSALEPLVDLPIGINITRFQTLLALHRSYLTPGDSSSGWTAGAAAYYVGYLQPRTFLLKYNENGTITDAVDCALDPLSETKCTLKSFTVEKGIYQTSNFRVQPTESIVRFPNITNLCPFGEVFNATRFASVYAWNRKRISNCVADYSVLYNSASFSTFKCYGVSPTKLNDLCFTNVYADSFVIRGDEVRQIAPGQTGKIADYNYKLPDDFTGCVIAWNSNNLDSKVGGNYNYLYRLFRKSNLKPFERDISTEIYQAGSTPCNGVEGFNCYFPLQSYGFQPTNGVGYQPYRVVVLSFELLHAPATVCGPKKSTNLVKNKCVNFNFNGLTGTGVLTESNKKFLPFQQFGRDIADTTDAVRDPQTLEILDITPCSFGGVSVITPGTNTSNQVAVLYQGVNCTEVPVAIHADQLTPTWRVYSTGSNVFQTRAGCLIGAEHVNNSYECDIPIGAGICASYQTQTNSPRRARSVASQSIIAYTMSLGAENSVAYSNNSIAIPTNFTISVTTEILPVSMTKTSVDCTMYICGDSTECSNLLLQYGSFCTQLNRALTGIAVEQDKNTQEVFAQVKQIYKTPPIKDFGGFNFSQILPDPSKPSKRSFIEDLLFNKVTLADAGFIKQYGDCLGDIAARDLICAQKFNGLTVLPPLLTDEMIAQYTSALLAGTITSGWTFGCGAALQIPFAMQMAYRFNGIGVTQNVLYENQKLIANQFNSAIGKIQYSLSSTASALGKLQDVVNQNAQALNTLVKQLSSNFGAISSVLNDILSRLDKVEAEVQIDRLITGRLQSLQTYVTQQLIRAAEIRASANLAATKMSECVLGQSKRCDFCGKGYHLMSFPQSAPHGVVFLHVTYVPAQEKNFTTAPAICHDGKAHFPREGVFVSNGTHWFVTQRNFYEPQIITTDNTFVSGNCDVVIGIVNNTVYDPLQPELDSFKEELDKYFKNHTSPDVDLGDISGINASVVNIQKEIDRLNEVAKNLNESLIDLQELGKYEQYIKWPWYIWLGFIAGLIAIVMVTIMLCCMTSCCSCLKGCCSCGSCCKFDEDDSEPVLKGVKLHYT

SEQ ID NO: 1190 - protein, 1273 aa, Artificial Sequence
  SARS-CoV-2/Portugal/PT0034/2020__EPI_ISL_418019 spike protein (1-1273)(A890C_V1040C)
MFVFLVLLPLVSSQCVNLTTRTQLPPAYTNSFTRGVYYPDKVFRSSVLHSTQDLFLPFFSNVTWFHAIHVSGTNGTKRFDNPVLPFNDGVYFASTEKSNIIRGWIFGTTLDSKTQSLLIVNNATNVVIKVCEFQFCNDPFLGVYYHKNNKSWMESEFRVYSSANNCTFEYVSQPFLMDLEGKQGNFKNLREFVFKNIDGYFKIYSKHTPINLVRDLPQGFSALEPLVDLPIGINITRFQTLLALHRSYLTPGDSSSGWTAGAAAYYVGYLQPRTFLLKYNENGTITDAVDCALDPLSETKCTLKSFTVEKGIYQTSNFRVQPTESIVRFPNITNLCPFGEVFNATRFASVYAWNRKRISNCVADYSVLYNSASFSTFKCYGVSPTKLNDLCFTNVYADSFVIRGDEVRQIAPGQTGKIADYNYKLPDDFTGCVIAWNSNNLDSKVGGNYNYLYRLFRKSNLKPFERDISTEIYQAGSTPCNGVEGFNCYFPLQSYGFQPTNGVGYQPYRVVVLSFELLHAPATVCGPKKSTNLVKNKCVNFNFNGLTGTGVLTESNKKFLPFQQFGRDIADTTDAVRDPQTLEILDITPCSFGGVSVITPGTNTSNQVAVLYQGVNCTEVPVAIHADQLTPTWRVYSTGSNVFQTRAGCLIGAEHVNNSYECDIPIGAGICASYQTQTNSPRRARSVASQSIIAYTMSLGAENSVAYSNNSIAIPTNFTISVTTEILPVSMTKTSVDCTMYICGDSTECSNLLLQYGSFCTQLNRALTGIAVEQDKNTQEVFAQVKQIYKTPPIKDFGGFNFSQILPDPSKPSKRSFIEDLLFNKVTLADAGFIKQYGDCLGDIAARDLICAQKFNGLTVLPPLLTDEMIAQYTSALLAGTITSGWTFGCGAALQIPFAMQMAYRFNGIGVTQNVLYENQKLIANQFNSAIGKIQDSLSSTASALGKLQDVVNQNAQALNTLVKQLSSNFGAISSVLNDILSRLDKVEAEVQIDRLITGRLQSLQTYVTQQLIRAAEIRASANLAATKMSECVLGQSKRCDFCGKGYHLMSFPQSAPHGVVFLHVTYVPAQEKNFTTAPAICHDGKAHFPREGVFVSNGTHWFVTQRNFYEPQIITTDNTFVSGNCDVVIGIVNNTVYDPLQPELDSFKEELDKYFKNHTSPDVDLGDISGINASVVNIQKEIDRLNEVAKNLNESLIDLQELGKYEQYIKWPWYIWLGFIAGLIAIVMVTIMLCCITSCCSCLKGCCSCGSCCKFDEDDSEPVLKGVKLHYT

SEQ ID NO: 1191 - protein, 1273 aa, Artificial Sequence
  SARS-CoV-2/Iceland/202/2020__EPI_ISL_417750 spike protein (1-1273)(A890C_V1040C)
MFVFLVLLPLVSSQCVNLTTRTQLPPAYTNSFTRGVYYPDKVFRSSVLHSTQDLFLPFFSNVTWFHAIHVSGTNGTKRFDNPVLPFNDGVYFASTEKSNIIRGWIFGTTLDSKTQSLLIVNNATNVVIKVCEFQFCNDPFLGVYYHKNNKSWMESEFRVYSSANNCTFEYVSQPFLMDLEGKQGNFKNLREFVFKNIDGYFKIYSKHTPINLVRDLPQGFSALEPLVDLPIGINITRFQTLLALHRSYLTPGDSSSGWTAGAAAYYVGYLQPRTFLLKYNENGTITDAVDCALDPLSETKCTLKSFTVEKGIYQTSNFRVQPTESIVRFPNITNLCPFGEVFNATRFASVYAWNRKRISNCVADYSVLYNSASFSTFKCYGVSPTKLNDLCFTNVYADSFVIRGDEVRQIAPGQTGKIADYNYKLPDDFTGCVIAWNSNNLDSKVGGNYNYLYRLFRKSNLKPFERDISTEIYQAGSTPCNGVEGFNCYFPLQSYGFQPTNGVGYQPYRVVVLSFELLHAPATVCGPKKSTNLVKNKCVNFNFNGLTGTGVLTESNKKFLPFQQFGRDIADTTDAVRDPQTLEILDITPCSFGGVSVITPGTNTSNQVAVLYQDVNCTEVPVAIHADQLTPTWRVYSTGSNVFQTRAGCLIGAEHVNNSYECDIPIGAGICASYQTQTNSPRRARSVASQSIIAYTMSLGAENSVAYSNNSIAIPTNFTISVTTEILPVSMTKTSVDCTMYICGDSTECSNLLLQYGSFCTQLNRALTGIAVEQDKNTQEVFAQVKQIYKTPPIKDFGGFNFSQILPDPSKPSKRSFIEDLLFNKVTLADAGFIKQYGDCLGDIAARDLICAQKFNGLTVLPPLLTDEMIAQYTSALLAGTITSGWTFGCGAALQIPFAMQMAYRFNGIGVTQNVLYENQKLIANQFNSAIGKIQDSLSSTASALGKLQDVVNQNAQALNTLVKQLSSNFGAISSVLNDILSRLDKVEAEVQIDRLITGRLQSLQTYVTQQLIRAAEIRASANLAATKMSECVLGQSKRCDFCGKGYHLMSFPQSAPHGVVFLHVTYVPAQEKNFTTAPAICHDGKAHFPREGVFVSNGTHWFVTQRNFYEPQIITTDNTFVSGNCDVVIGIVNNTVYDPLQPELDSFKEELDKYFKNHTSPDVDLGDIPGINASVVNIQKEIDRLNEVAKNLNESLIDLQELGKYEQYIKWPWYIWLGFIAGLIAIVMVTIMLCCMTSCCSCLKGCCSCGSCCKFDEDDSEPVLKGVKLHYT

SEQ ID NO: 1192 - protein, 1273 aa, Artificial Sequence
  SARS-CoV-2/USA/WA-UW261/2020__EPI_ISL_418046 spike protein (1-1273)(A890C_V1040C)
MFVFLVLLPLVSSQCVNLTTRTQLPPAYTNSFTRGVYYPDKVFRSSVLHSTQDLFLPFFSNVTWFHAIHVSGTNGTKRFDNPVLPFNDGVYFASTEKSNIIRGWIFGTTLDSKTQSLLIVNNATNVVIKVCEFQFCNDPFLGVYYHKNNKSWMESEFRVYSSANNCTFEYVSQPFLMDLEGKQGNFKNLREFVFKNIDGYFKIYSKHTPINLVRDLPQGFSALEPLVDLPIGINITRFQTLLALHRSYLTPGDSSSGWTAGAAAYYVGYLQPRTFLLKYNENGTITDAVDCALDPLSETKCTLKSFTVEKGIYQTSNFRVQPTESIVRFPNITNLCPFGEVFNATRFTSVYAWNRKRISNCVADYSVLYNSASFSTFKCYGVSPTKLNDLCFTNVYADSFVIRGDEVRQIAPGQTGKIADYNYKLPDDFTGCVIAWNSNNLDSKVGGNYNYLYRLFRKSNLKPFERDISTEIYQAGSTPCNGVEGFNCYFPLQSYGFQPTNGVGYQPYRVVVLSFELLHAPATVCGPKKSTNLVKNKCVNFNFNGLTGTGVLTESNKKFLPFQQFGRDIADTTDAVRDPQTLEILDITPCSFGGVSVITPGTNTSNQVAVLYQDVNCTEVPVAIHADQLTPTWRVYSTGSNVFQTRAGCLIGAEHVNNSYECDIPIGAGICASYQTQTNSPRRARSVASQSIIAYTMSLGAENSVAYSNNSIAIPTNFTISVTTEILPVSMTKTSVDCTMYICGDSTECSNLLLQYGSFCTQLNRALTGIAVEQDKNTQEVFAQVKQIYKTPPIKDFGGFNFSQILPDPSKPSKRSFIEDLLFNKVTLADAGFIKQYGDCLGDIAARDLICAQKFNGLTVLPPLLTDEMIAQYTSALLAGTITSGWTFGCGAALQIPFAMQMAYRFNGIGVTQNVLYENQKLIANQFNSAIGKIQDSLSSTASALGKLQDVVNQNAQALNTLVKQLSSNFGAISSVLNDILSRLDKVEAEVQIDRLITGRLQSLQTYVTQQLIRAAEIRASANLAATKMSECVLGQSKRCDFCGKGYHLMSFPQSAPHGVVFLHVTYVPAQEKNFTTAPAICHDGKAHFPREGVFVSNGTHWFVTQRNFYEPQIITTDNTFVSGNCDVVIGIVNNTVYDPLQPELDSFKEELDKYFKNHTSPDVDLGDISGINASVVNIQKEIDRLNEVAKNLNESLIDLQELGKYEQYIKWPWYIWLGFIAGLIAIVMVTIMLCCMTSCCSCLKGCCSCGSCCKFDEDDSEPVLKGVKLHYT

SEQ ID NO: 1193 - protein, 1273 aa, Artificial Sequence
  SARS-CoV-2/Portugal/PT0035/2020__EPI_ISL_418020 spike protein (1-1273)(A890C_V1040C)
MFVFLVLLPLVSSQCVNLTTRTQLPPAYTNSFTRGVYYPDKVFRSSVLHSTQDLFLPFFSNVTWFHAIHVSGTNGTKRFDNPVLPFNDGVYFASTEKSNIIRGWIFGTTLDSKTQSLLIVNNATNVVIKVCEFQFCNDPFLGVYYHKNNKSWMESEFRVYSSANNCTFEYVSQPFLMDLEGKQGNFKNLREFVFKNIDGYFKIYSKHTPINLVRDLPQGFSALEPLVDLPIGINITRFQTLLALHRSYLTPGDSSSGWTAGAAAYYVGYLQPRTFLLKYNENGTITDAVDCALDPLSETKCTLKSFTVEKGIYQTSNFRVQPTESIVRFPNITNLCPFGEVFNATRFASVYAWNRKRISNCVADYSVLYNSASFSTFKCYGVSPTKLNDLCFTNVYADSFVIRGDEVRQIAPGQTGKIADYNYKLPDDFTGCVIAWNSNNLDSKVGGNYNYLYRLFRKSNLKPFERDISTEIYQAGSTPCNGVEGFNCYFPLQSYGFQPTNGVGYQPYRVVVLSFELLHAPATVCGPKKSTNLVKNKCVNFNFNGLTGTGVLTESNKKFLPFQQFGRDIADTTDAVRDPQTLEILDITPCSFGGVSVITPGTNTSNQVAVLYQDVNCTEVPVAIHADQLTPTWRVYSTGSNVFQTRAGCLIGAEHVNNSYECDIPIGAGICASYQTQTNSPRRARSVASQSIIAYTMSLGAENSVAYSNNSIAIPTNFTISVTTEILPVSMTKTSVDCTMYICGDSTECSNLLLQYGSFCTQLNRALTGIAVEQDKNTQEVFAQVKQIYKTPPIKDFGGFNFSQILPDPSKPSKRSFIEDLLFNKVTLADAGFIKQYGDCLGDISARDLICAQKFNGLTVLPPLLTDEMIAQYTSALLAGTITSGWTFGCGAALQIPFAMQMAYRFNGIGVTQNVLYENQKLIANQFNSAIGKIQDSLSSTASALGKLQDVVNQNAQALNTLVKQLSSNFGAISSVLNDILSRLDKVEAEVQIDRLITGRLQSLQTYVTQQLIRAAEIRASANLAATKMSECVLGQSKRCDFCGKGYHLMSFPQSAPHGVVFLHVTYVPAQEKNFTTAPAICHDGKAHFPREGVFVSNGTHWFVTQRNFYEPQIITTDNTFVSGNCDVVIGIVNNTVYDPLQPELDSFKEELDKYFKNHTSPDVDLGDISGINASVVNIQKEIDRLNEVAKNLNESLIDLQELGKYEQYIKWPWYIWLGFIAGLIAIVMVTIMLCCMTSCCSCLKGCCSCGSCCKFDEDDSEPVLKGVKLHYT

SEQ ID NO: 1194 - protein, 1273 aa, Artificial Sequence
  SARS-CoV-2/USA/NY-NYUMC7/2020__EPI_ISL_418192 spike protein (1-1273)(A890C_V1040C)
MFVFLVLLPLVSSQCVNLTTRTQLPPAYTNSFTRGVYYPDKVFRSSVLHSTQDLFLPFFSNVTWFHAIHVSGTNGTKRFDNPVLPFNDGVYFASTEKSNIIRGWIFGTTLDSKTQSLLIVNNATNVVIKVCEFQFCNDPFLGVYHHKNNKSWMESEFRVYSSANNCTFEYVSQPFLMDLEGKQGNFKNLREFVFKNIDGYFKIYSKHTPINLVRDLPQGFSALEPLVDLPIGINITRFQTLLALHRSYLTPGDSSSGWTAGAAAYYVGYLQPRTFLLKYNENGTITDAVDCALDPLSETKCTLKSFTVEKGIYQTSNFRVQPTESIVRFPNITNLCPFGEVFNATRFASVYAWNRKRISNCVADYSVLYNSASFSTFKCYGVSPTKLNDLCFTNVYADSFVIRGDEVRQIAPGQTGKIADYNYKLPDDFTGCVIAWNSNNLDSKVGGNYNYLYRLFRKSNLKPFERDISTEIYQAGSTPCNGVEGFNCYFPLQSYGFQPTNGVGYQPYRVVVLSFELLHAPATVCGPKKSTNLVKNKCVNFNFNGLTGTGVLTESNKKFLPFQQFGRDIADTTDAVRDPQTLEILDITPCSFGGVSVITPGTNTSNQVAVLYQGVNCTEVPVAIHADQLTPTWRVYSTGSNVFQTRAGCLIGAEHVNNSYECDIPIGAGICASYQTQTNSPRRARSVASQSIIAYTMSLGAENSVAYSNNSIAIPTNFTISVTTEILPVSMTKTSVDCTMYICGDSTECSNLLLQYGSFCTQLNRALTGIAVEQDKNTQEVFAQVKQIYKTPPIKDFGGFNFSQILPDPSKPSKRSFIEDLLFNKVTLADAGFIKQYGDCLGDIAARDLICAQKFNGLTVLPPLLTDEMIAQYTSALLAGTITSGWTFGCGAALQIPFAMQMAYRFNGIGVTQNVLYENQKLIANQFNSAIGKIQDSLSSTASALGKLQDVVNQNAQALNTLVKQLSSNFGAISSVLNDILSRLDKVEAEVQIDRLITGRLQSLQTYVTQQLIRAAEIRASANLAATKMSECVLGQSKRCDFCGKGYHLMSFPQSAPHGVVFLHVTYVPAQEKNFTTAPAICHDGKAHFPREGVFVSNGTHWFVTQRNFYEPQIITTDNTFVSGNCDVVIGIVNNTVYDPLQPELDSFKEELDKYFKNHTSPDVDLGDISGINASVVNIQKEIDRLNEVAKNLNESLIDLQELGKYEQYIKWPWYIWLGFIAGLIAIVMVTIMLCCMTSCCSCLKGCCSCGSCCKFDEDDSEPVLKGVKLHYT

SEQ ID NO: 1195 - protein, 1273 aa, Artificial Sequence
  SARS-CoV-2/Iceland/189/2020__EPI_ISL_417709 spike protein (1-1273)(A890C_V1040C)
MFVFLVLLPLVSSQCVNLTTRTQLPPAYTNSFTRGVYYPDKVFRSSVLHSTQDLFLPFFSNVTWFHAIHVSGTNGTKRFDNPVLPFNDGVYFASTEKSNIIRGWIFGTTLDSKTQSLLIVNNATNVVIKVCEFQFCNDPFLGVYYHKNNKSWMESEFRVYSSANNCTFEYVSQPFLMDLEGKQGNFKNLREFVFKNIDGYFKIYSKHTPINLVRDLPQGFSALEPLVDLPIGINITRFQTLLALHRSYLTPGDSSSGWTAGAAAYYVGYLQPRTFLLKYNENGTITDAVDCALDPLSETKCTLKSFTVEKGIYQTSNFRVQPTESIVRFPNITNLCPFGEVFNATRFASVYAWNRKRISNCVADYSVLYNSASFSTFKCYGVSPTKLNDLCFTNVYADSFVIRGDEVRQIAPGQTGKIADYNYKLPDDFTGCVIAWNSNNLDSKVGGNYNYLYRLFRKSNLKPFERDISTEIYQAGSTPCNGVEGFNCYFPLQSYGFQPTNGVGYQPYRVVVLSFELLHAPATVCGPKKSTNLVKNKCVNFNFNGLTGTGVLTESNKKFLPFQQFGRDIADTTDAVRDPQTLEILDITPCSFGGVSVITPGTNTSNQVAVLYQGVNCTEVPVAIHADQLTPTWRVYSTGSNVFQTRAGCLIGAEHVNNSYECDIPIGAGICASYQTQTNSPRRARSVASQSIIAYTMSLGAENSVAYSNNSIAIPTNFTISVTTEILPVSMTKTSVDCTMYICGDSTECSNLLLQYGSFCTQLNRALTGIAVEQDKNTQEVFAQVKQIYKTPPIKDFGGFNFSQILPDPSKPSKRSFIEDLLFNKVTLADAGFTKQYGDCLGDIAARDLICAQKFNGLTVLPPLLTDEMIAQYTSALLAGTITSGWTFGCGAALQIPFAMQMAYRFNGIGVTQNVLYENQKLIANQFNSAIGKIQDSLSSTASALGKLQDVVNQNAQALNTLVKQLSSNFGAISSVLNDILSRLDKVEAEVQIDRLITGRLQSLQTYVTQQLIRAAEIRASANLAATKMSECVLGQSKRCDFCGKGYHLMSFPQSAPHGVVFLHVTYVPAQEKNFTTAPAICHDGKAHFPREGVFVSNGTHWFVTQRNFYEPQIITTDNTFVSGNCDVVIGIVNNTVYDPLQPELDSFKEELDKYFKNHTSPDVDLGDISGINASVVNIQKEIDRLNEVAKNLNESLIDLQELGKYEQYIKWPWYIWLGFIAGLIAIVMVTIMLCCMTSCCSCLKGCCSCGSCCKFDEDDSEPVLKGVKLHYT

SEQ ID NO: 1196 - protein, 1273 aa, Artificial Sequence
  SARS-CoV-2/Australia/NSW56/2020__EPI_ISL_417408 spike protein (1-1273)(A890C_V1040C)
MFVFLVLLPLVSSQCVNLTTRTQLPPAYTNSFTRGVYYPDKVFRSSVLHSTQDLFLPFFSNVTWFHAIHVSGTNGTKRFDNPVLPFNDGVYFASTEKSNIIRGWIFGTTLDSKTQSLLIVNNATNVVIKVCEFQFCNDPFLGVYYHKNNKSWMESEFRVYSSANNCTFEYVSQPFLMDLEGKQGNFKNLREFVFKNIDGYFKIYSKHTPINLVRDLPQGFSALEPLVDLPIGINITRFQTLLALHRSYLTPGDSSSGWTAGAAAYYVGYLQPRTFLLKYNENGTITDAVDCALDPLSETKCTLKSFTVEKGIYQTSNFRVQPTESIVRFPNITNLCPFGEVFNATRFASVYAWNRKRISNCVADYSVLYNSASFSTFKCYGVSPTKLNDLCFTNVYADSFVIRGDEVRQIAPGQTGKIADYNYKLPDDFTGCVIAWNSNNLDSKVGGNYNYLYRLFRKSNLKPFERDISTEIYQAGSTPCNGVEGFNCYFPLQSYGFQPTNGVGYQPYRVVVLSFELLHAPATVCGPKKSTNLVKNKCVNFNFNGLTGTGVLTESNKKFLPFQQFGRDIADTTDAVRDPQTLEILDITPCSFGGVSVITPGTNTSNQVAVLYQDVNCTEVPVAIHADQLTPTWRVYSTGSNVFQTRAGCLIGAEHVNNSYECDIPIGAGICASYQTQTNSPRRARSVASQSIIAYTMSLGAENSVAYSNNSIAIPTNFTISVTTEILPVSMTKTSVDCTMYICGDSTECSNLLLQYGSFCTQLNRALTGIAVEQDKNTQEVFAQVKQIYKTPPIKDFGGFNFSQILPDSSKPSKRSFIEDLLFNKVTLADAGFIKQYGDCLGDIAARDLICAQKFNGLTVLPPLLTDEMIAQYTSALLAGTITSGWTFGCGAALQIPFAMQMAYRFNGIGVTQNVLYENQKLIANQFNSAIGKIQDSLSSTASALGKLQDVVNQNAQALNTLVKQLSSNFGAISSVLNDILSRLDKVEAEVQIDRLITGRLQSLQTYVTQQLIRAAEIRASANLAATKMSECVLGQSKRCDFCGKGYHLMSFPQSAPHGVVFLHVTYVPAQEKNFTTAPAICHDGKAHFPREGVFVSNGTHWFVTQRNFYEPQIITTDNTFVSGNCDVVIGIVNNTVYDPLQPELDSFKEELDKYFKNHTSPDVDLGDISGINASVVNIQKEIDRLNEVAKNLNESLIDLQELGKYEQYIKWPWYIWLGFIAGLIAIVMVTIMLCCMTSCCSCLKGCCSCGSCCKFDEDDSEPVLKGVKLHYT

SEQ ID NO: 1197 - protein, 1273 aa, Artificial Sequence
  SARS-CoV-2/Iceland/280/2020__EPI_ISL_417608 spike protein (1-1273)(A890C_V1040C)
MFVFLVLLPLVSSQCVNLTTRTQLPPAYTNSFTRGVYYPDKVFRSSVLHSTQDLFLPFFSNVTWFHAIHVSGTNGTKRFDNPVLPFNDGVYFASTEKSNIIRGWIFGTTLDSKTQSLLIVNNATNVVIKVCEFQFCNDPFLGVYYHKNNKSWMESEFRVYSSANNCTFEYVSQPFLMDLEGKQGNFKNLREFVFKNIDGYFKIYSKHTPINLVRDLPQGFSALEPLVDLPIGINITRFQTLLALHRSYLTPGDSSSGWTAGAAAYYVGYLQPRTFLLKYNENGTITDAVDCALDPLSETKCTLKSFTVEKGIYQTSNFRVQPTESIVRFPNITNLCPFGEVFNATRFASVYAWNRKRISNCVADYSVLYNSASFSTFKCYGVSPTKLNDLCFTNVYADSFVIRGDEVRQIAPGQTGKIADYNYKLPDDFTGCVIAWNSNNLDSKVGGNYNYLYRLFRKSNLKPFERDISTEIYQAGSTPCNGVEGFNCYFPLQSYGFQPTNGVGYQPYRVVVLSFELLHAPATVCGPKKSTNLVKNKCVNFNFNGLTGTGVLTESNKKFLPFQQFGRDIADTTDAVRDPQTLEILDITPCSFGGVSVITPGTNTSNQVAVLYQGVNCTEVPVAIHADQLTPTWRVYSTGSNVFQTRAGCLIGAEHVNNSYECDIPIGAGICASYHTQTNSPRRARSVASQSIIAYTMSLGAENSVAYSNNSIAIPTNFTISVTTEILPVSMTKTSVDCTMYICGDSTECSNLLLQYGSFCTQLNRALTGIAVEQDKNTQEVFAQVKQIYKTPPIKDFGGFNFSQILPDPSKPSKRSFIEDLLFNKVTLADAGFIKQYGDCLGDIAARDLICAQKFNGLTVLPPLLTDEMIAQYTSALLAGTITSGWTFGCGAALQIPFAMQMAYRFNGIGVTQNVLYENQKLIANQFNSAIGKIQDSLSSTASALGKLQDVVNQNAQALNTLVKQLSSNFGAISSVLNDILSRLDKVEAEVQIDRLITGRLQSLQTYVTQQLIRAAEIRASANLAATKMSECVLGQSKRCDFCGKGYHLMSFPQSAPHGVVFLHVTYVPAQEKNFTTAPAICHDGKAHFPREGVFVSNGTHWFVTQRNFYEPQIITTDNTFVSGNCDVVIGIVNNTVYDPLQPELDSFKEELDKYFKNHTSPDVDLGDISGINASVVNIQKEIDRLNEVAKNLNESLIDLQELGKYEQYIKWPWYIWLGFIAGLIAIVMVTIMLCCMTSCCSCLKGCCSCGSCCKFDEDDSEPVLKGVKLHYT

SEQ ID NO: 1198 - protein, 1273 aa, Artificial Sequence
  SARS-CoV-2/Iceland/247/2020__EPI_ISL_417575 spike protein (1-1273)(A890C_V1040C)
MFVFLVLLPLVSSQCVNLTTRTQLPPAYTNSFTRGVYYPDKVFRSSVLHSTQDLFLPFFSNVTWFHAIHVSGTNGTKRFDNPVLPFNDGVYFASTEKSNIIRGWIFGTTLDSKTQSLLIVNNATNVVIKVCEFQFCNDPFLGVYYHKNNKSWMESEFRVYSSANNCTFEYVSQPFLMDLEGKQGNFKNLREFVFKNIDGYFKIYSKHTPINLVRDLPQGFSALEPLVDLPIGINITRFQTLLALHRSYLTPGDSSSGWTAGAAAYYVGYLQPRTFLLKYNENGTITDAVDCALDPLSETKCTLKSFTVEKGIYQTSNFRVQPTESIVRFPNITNLCPFGEVFNATRFASVYAWNRKRISNCVADYSVLYNSASFSTFKCYGVSPTKLNDLCFTNVYADSFVIRGDEVRQIAPGQTGKIADYNYKLPDDFTGCVIAWNSNNLDSKVGGNYNYLYRLFRKSNLKPFERDISTEIYQAGSTPCNGVEGFNCYFPLQSYGFQPTNGVGYQPYRVVVLSFELLHAPATVCGPKKSTNLVKNKCVNFNFNGLTGTGVLTESNKKFLPFQQFGRDIADTTDAVRDPQTLEILDITPCSFGGVSVITPGTNTSNQVAVLYQGVNCTEVPVAIHADQLTPTWRVYSTGSNVFQTRAGCLIGAEHVNNSYECDIPIGAGICASYQTQTNSPRRARSVASQSIIAYTMSLGAENSVAYSNNSIAIPTNFTISVTTEILPVSMTKTSVDCTMYICGDSTECSNLLLQYGSFCTQLNRALTGIAVEQDKNTQEVFAQVKQIYKTPPIKDFGGFNFSQILPDPSKPSKRSFIEDLLFNKVTLADAGFIKQYGDCLGDIAARDLICAQKFNGLTVLPPLLTDEMIAQYTSALLAGTITSGWTFGCGAALQIPFAMQMAYRFNGIGVTQNVLYENQKLIANQFNSAIGKIQDSLSSTASALGKLQDVVNQNAQALNTLVKQLSSNFGAISSVLNDILSRLDKVEAEVQIDRLITGRLQSLQTYVTQQLIRAAEIRASANLAATKMSECVLGQSKRCDFCGKGYHLMSFPQSAPHGVVFLHVTYVPAQEKNFTTAPAICHDGKAHFPREGVFVSNGTHWFVTQRNFYEPQIITTDNTFVSGNCDVVIGIVNNTVYDPLQPELDSFKEELDKYFKNHTSPDVDLGDISGINASVVNIQKEIDRLNEVAKNLNESLIDLQELGKYEQYIKWPWYIWLGFIAGLIAIVIVTIMLCCMTSCCSCLKGCCSCGSCCKFDEDDSEPVLKGVKLHYT

SEQ ID NO: 1199 - protein, 1273 aa, Artificial Sequence
  SARS-CoV-2/Iceland/238/2020__EPI_ISL_417566 spike protein (1-1273)(A890C_V1040C)
MFVFLVLLPLVSSQCVNLTTRTQLPPAYTNSFTRGVYYPDKVFRSSVLHSTQDLFLPFFSNVTWFHAIHVSGTNGTKRFDNPVLPFNDGVYFASTEKSNIIRGWIFGTTLDSKTQSLLIVNNATNVVIKVCEFQFCNDPFLGVYYHKNNKSWMESEFRVYSSANNCTFEYVSQPFLMDLEGKQGNFKNLREFVFKNIDGYFKIYSKHTPINLVRDLPQGFSALEPLVDLPIGINITRFQTLLALHRSYLTPGDSSSGWTAGAAAYYVGYLQPRTFLLKYNENGTITDAVDCALDPLSETKCTLKSFTVEKGIYQTSNFRVQPTESIVRFPNITNLCPFGEVFNATRFASVYAWNRKRISNCVADYSVLYNSASFSTFKCYGVSPTKLNDLCFTNVYADSFVIRGDEVRQIAPGQTGKIADYNYKLPDDFTGCVIAWNSNNLDSKVGGNYNYLYRLFRKSNLKPFERDISTEIYQAGSTPCNGVEGFNCYFPLQSYGFQPTNGVGYQPYRVVVLSFELLHAPATVCGPKKSTNLVKNKCVNFNFNGLTGTGVLTESNKKFLPFQQFGRDIADTTDAVRDPQTLEILDITPCSFGGVSVITPGTNTSNQVAVLYQGVNCTEVPVAIHADQLTPTWRVYSTGSNVFQTRAGCLIGAEHVNNSYECDIPIGAGICASYQTQTNSPRRARSVASQSIIAYTMSLGAENSVAYSNNSIAIPTNFTISVTTEILPVSMTKTSVDCTMYICGDSTECSNLLLQYGSFCTQLNRALTGIAVEQDKNTQEVFAQVKQIYKTPPIKDFGGFNFSQILPDPSKPSKRSFIEDLLFNKVTLADVGFIKQYGDCLGDIAARDLICAQKFNGLTVLPPLLTDEMIAQYTSALLAGTITSGWTFGCGAALQIPFAMQMAYRFNGIGVTQNVLYENQKLIANQFNSAIGKIQDSLSSTASALGKLQDVVNQNAQALNTLVKQLSSNFGAISSVLNDILSRLDKVEAEVQIDRLITGRLQSLQTYVTQQLIRAAEIRASANLAATKMSECVLGQSKRCDFCGKGYHLMSFPQSAPHGVVFLHVTYVPAQEKNFTTAPAICHDGKAHFPREGVFVSNGTHWFVTQRNFYEPQIITTDNTFVSGNCDVVIGIVNNTVYDPLQPELDSFKEELDKYFKNHTSPDVDLGDISGINASVVNIQKEIDRLNEVAKNLNESLIDLQELGKYEQYIKWPWYIWLGFIAGLIAIVMVTIMLCCMTSCCSCLKGCCSCGSCCKFDEDDSEPVLKGVKLHYT

SEQ ID NO: 1200 - protein, 1273 aa, Artificial Sequence
  SARS-CoV-2/Greece/16/2020__EPI_ISL_418265 spike protein (1-1273)(A890C_V1040C)
MFVFLVLLPLVSSQCVNLTTRTQLPPAYTNSFTRGVYYPDKVFRSSVLHSTQDLFLPFFSNVTWFHAIHVSGTNGTKRFDNPVLPFNDGVYFASTEKSNIIRGWIFGTTLDSKTQSLLIVNNATNVVIKVCEFQFCNDPFLGVYYHKNNKSWMESEFRVYSSANNCTFEYVSQPFLMDLEGKQGNFKNLREFVFKNVDGYFKIYSKHTPINLVRDLPQGFSALEPLVDLPIGINITRFQTLLALHRSYLTPGDSSSGWTAGAAAYYVGYLQPRTFLLKYNENGTITDAVDCALDPLSETKCTLKSFTVEKGIYQTSNFRVQPTESIVRFPNITNLCPFGEVFNATRFASVYAWNRKRISNCVADYSVLYNSASFSTFKCYGVSPTKLNDLCFTNVYADSFVIRGDEVRQIAPGQTGKIADYNYKLPDDFTGCVIAWNSNNLDSKVGGNYNYLYRLFRKSNLKPFERDISTEIYQAGSTPCNGVEGFNCYFPLQSYGFQPTNGVGYQPYRVVVLSFELLHAPATVCGPKKSTNLVKNKCVNFNFNGLTGTGVLTESNKKFLPFQQFGRDIADTTDAVRDPQTLEILDITPCSFGGVSVITPGTNTSNQVAVLYQDVNCTEVPVAIHADQLTPTWRVYSTGSNVFQTRAGCLIGAEHVNNSYECDIPIGAGICASYQTQTNSPRRARSVASQSIIAYTMSLGAENSVAYSNNSIAIPTNFTISVTTEILPVSMTKTSVDCTMYICGDSTECSNLLLQYGSFCTQLNRALTGIAVEQDKNTQEVFAQVKQIYKTPPIKDFGGFNFSQILPDPSKPSKRSFIEDLLFNKVTLADAGFIKQYGDCLGDIAARDLICAQKFNGLTVLPPLLTDEMIAQYTSALLAGTITSGWTFGCGAALQIPFAMQMAYRFNGIGVTQNVLYENQKLIANQFNSAIGKIQDSLSSTASALGKLQDVVNQNAQALNTLVKQLSSNFGAISSVLNDILSRLDKVEAEVQIDRLITGRLQSLQTYVTQQLIRAAEIRASANLAATKMSECVLGQSKRCDFCGKGYHLMSFPQSAPHGVVFLHVTYVPAQEKNFTTAPAICHDGKAHFPREGVFVSNGTHWFVTQRNFYEPQIITTDNTFVSGNCDVVIGIVNNTVYDPLQPELDSFKEELDKYFKNHTSPDVDLGDISGINASVVNIQKEIDRLNEVAKNLNESLIDLQELGKYEQYIKWPWYIWLGFIAGLIAIVMVTIMLCCMTSCCSCLKGCCSCGSCCKFDEDDSEPVLKGVKLHYT

SEQ ID NO: 1201 - protein, 1273 aa, Artificial Sequence
  SARS-CoV-2/Iceland/319/2020__EPI_ISL_417648 spike protein (1-1273)(A890C_V1040C)
MFVFLVLLPLVSSQCVNLTTRTQLPPAYTNSFTRGVYYPDKVFRSSVLHSTQDLFLPFFSNVTWFHAIHVSGTNGTKRFDNPVLPFNDGVYFASTEKSNIIRGWIFGTTLDSKTQSLLIVNNATNVVIKVCEFQFCNDPFLGVYYHKNNKSWMESEFRVYSSANNCTFEYVSQPFLIDLEGKQGNFKNLREFVFKNIDGYFKIYSKHTPINLVRDLPQGFSALEPLVDLPIGINITRFQTLLALHRSYLTPGDSSSGWTAGAAAYYVGYLQPRTFLLKYNENGTITDAVDCALDPLSETKCTLKSFTVEKGIYQTSNFRVQPTESIVRFPNITNLCPFGEVFNATRFASVYAWNRKRISNCVADYSVLYNSASFSTFKCYGVSPTKLNDLCFTNVYADSFVIRGDEVRQIAPGQTGKIADYNYKLPDDFTGCVIAWNSNNLDSKVGGNYNYLYRLFRKSNLKPFERDISTEIYQAGSTPCNGVEGFNCYFPLQSYGFQPTNGVGYQPYRVVVLSFELLHAPATVCGPKKSTNLVKNKCVNFNFNGLTGTGVLTESNKKFLPFQQFGRDIADTTDAVRDPQTLEILDITPCSFGGVSVITPGTNTSNQVAVLYQGVNCTEVPVAIHADQLTPTWRVYSTGSNVFQTRAGCLIGAEHVNNSYECDIPIGAGICASYQTQTNSPRRARSVASQSIIAYTMSLGAENSVAYSNNSIAIPTNFTISVTTEILPVSMTKTSVDCTMYICGDSTECSNLLLQYGSFCTQLNRALTGIAVEQDKNTQEVFAQVKQIYKTPPIKDFGGFNFSQILPDPSKPSKRSFIEDLLFNKVTLADAGFIKQYGDCLGDIAARDLICAQKFNGLTVLPPLLTDEMIAQYTSALLAGTITSGWTFGCGAALQIPFAMQMAYRFNGIGVTQNVLYENQKLIANQFNSAIGKIQDSLSSTASALGKLQDVVNQNAQALNTLVKQLSSNFGAISSVLNDILSRLDKVEAEVQIDRLITGRLQSLQTYVTQQLIRAAEIRASANLAATKMSECVLGQSKRCDFCGKGYHLMSFPQSAPHGVVFLHVTYVPAQEKNFTTAPAICHDGKAHFPREGVFVSNGTHWFVTQRNFYEPQIITTDNTFVSGNCDVVIGIVNNTVYDPLQPELDSFKEELDKYFKNHTSPDVDLGDISGINASVVNIQKEIDRLNEVAKNLNESLIDLQELGKYEQYIKWPWYIWLGFIAGLIAIVMVTIMLCCMTSCCSCLKGCCSCGSCCKFDEDDSEPVLKGVKLHYT

SEQ ID NO: 1202 - protein, 1273 aa, Artificial Sequence
  SARS-CoV-2/Congo/94/2020__EPI_ISL_417947 spike protein (1-1273)(A890C_V1040C)
MFVFLVLLPLVSSQCVNLTTRTQLPPAYTNSFTRGVYYPDKVFRSSVLHSTQDLFLPFFSNVTWFHAIHVSGTNGTKRFDNPVLPFNDGVYFASTEKSNIIRGWIFGTTLDSKTQSLLIVNNATNVVIKVCEFQFCNDPFLGVYYHKNNKSWMESEFRVYSSANNCTFEYVSQPFLMDLEGKQGNFKNLREFVFKNIDGYFKIYSKHTPINLVRDLPQGFSALEPLVDLPIGINITRFQTLLALHRSYLTPGDSSSGWTAGAAAYYVGYLQPRTFLLKYNENGTITDAVDCALDPLSETKCTLKSFTVEKGIYQTSNFRVQPTESIVRFPNITNLCPFGEVFNATRFASVYAWNRKRISNCVADYSVLYNSASFSTFKCYGVSPTKLNDLCFTNVYADSFVIRGDEVRQIAPGQTGKIADYNYKLPDDFTGCVIAWNSNNLDSKVGGNYNYLYRLFRKSNLKPFERDISTEIYQAGSTPCNGVEGFNCYFPLQSYGFQPTNGVGYQPYRVVVLSFELLHAPATVCGPKKSTNLVKNKCVNFNFNGLTGTGVLTESNKKFLPFQQFGRDIADTTDAVRDPQTLEILDITPCSFGGVSVITPGTNTSNQVAVLYQGVNCTEVPVAIHADQLTPTWRVYSTGSNVFQTRAGCLIGAEHVNNSYECDIPIGAGICASYQTQTNSPRRARSVASQSIIAYTMSLGAENSVAYSNNSIAIPTNFTISVTTEILPVSMTKTSVDCTMYICGDSTECSNLLLQYGSFCTQLNRALTGIAVEQDKNTQEVFAQVKQIYKTPPIKDFGGFNFSQILPDPSKPSKRSFIEDILFNKVTLADAGFIKQYGDCLGDIAARDLICAQKFNGLTVLPPLLTDEMIAQYTSALLAGTITSGWTFGCGAALQIPFAMQMAYRFNGIGVTQNVLYENQKLIANQFNSAIGKIQDSLSSTASALGKLQDVVNQNAQALNTLVKQLSSNFGAISSVLNDILSRLDKVEAEVQIDRLITGRLQSLQTYVTQQLIRAAEIRASANLAATKMSECVLGQSKRCDFCGKGYHLMSFPQSAPHGVVFLHVTYVPAQEKNFTTAPAICHDGKAHFPREGVFVSNGTHWFVTQRNFYEPQIITTDNTFVSGNCDVVIGIVNNTVYDPLQPELDSFKEELDKYFKNHTSPDVDLGDISGINASVVNIQKEIDRLNEVAKNLNESLIDLQELGKYEQYIKWPWYIWLGFIAGLIAIVMVTIMLCCMTSCCSCLKGCCSCGSCCKFDEDDSEPVLKGVKLHYT

SEQ ID NO: 1203 - protein, 1273 aa, Artificial Sequence
  SARS-CoV-2/Congo/158/2020__EPI_ISL_417950 spike protein (1-1273)(A890C_V1040C)
MFVFLVLLPLVSSQCVNLTTRTQLPPAYTNSFTRGVYYPDKVFRSSVLHSTQDLFLPFFSNVTWFHAIHVSGTNGTKRFDNPVLPFNDGVYFASTEKSNIIRGWIFGTTLDSKTQSLLIVNNATNVVIKVCEFQFCNDPFLGVYYHKNNKSWMESEFRVYSSANNCTFEYVSQPFLMDLEGKQGNFKNLREFVFKNIDGYFKIYSKHTPINLVRDLPQGFSALEPLVDLPIGINITRFQTLLALHRSYLTPGDSSSGWTAGAAAYYVGYLQPRTFLLKYNENGTITDAVDCALDPLSETKCTLKSFTVEKGIYQTSNFRVQPTESIVRFPNITNLCPFGEVFNATRFASVYAWNRKRISNCVADYSVLYNSASFSTFKCYGVSPTKLNDLCFTNVYADSFVIRGDEVRQIAPGQTGKIADYNYKLPDDFTGCVIAWNSNNLDSKVGGNYNYLYRLFRKSNLKPFERDISTEIYQAGSTPCNGVEGFNCYFPLQSYGFQPTNGVGYQPYRVVVLSFELLHAPATVCGPKKSTNLVKNKCVNFNFNGLTGTGVLTESNKKFLPFQQFGRDIADTTDAVRDPQTLEILDITPCSFGGVSVITPGTNTSNQVAVLYQDVNCTEVPVAIHADQLTPTWRVYSTGSNVFQTRAGCLIGAEHVNNSYECDIPIGAGICASYQTQTNSPRRARSVASQSIIAYTMSLGAENSVAYSNNSIAIPTNFTISVTTEILPVSMTKTSVDCTMYICGDSTECSNLLLQYGSFCTQLNRALTGIAVEQDKNTQEVFAQVKQIYKTPPIKDFGGFNFSQILPDPSKPSKRSFIEDLLFNKVTLADAGFIKQYGDCLGDIAARDLICAQKFNGLTVLPPLLTDEMIAQYTSALLAGTITSGWTFGCGAALQIPFAMQMAYRFNGIGVTQNVLYENQKLIANQFNSAIGKIQDSLSSTASALGKLQDVVNQNAQALNTLVKQLSSNFGAISSVLNDILSRLDKVEAEVQIDRLITGRLQSLQTYVTQQLIRAAEIRASANLAATKMSECVLGQSKRCDFCGKGYHLMSFPQSAPHGVVFLHVTYVPAQEKNFTTAPAICHDGKAHFPREGVFVSNGTHWFVTQRNFYEPQIITTDNTFLSGNCDVVIGIVNNTVYDPLQPELDSFKEELDKYFKNHTSPDVDLGDISGINASVVNIQKEIDRLNEVAKNLNESLIDLQELGKYEQYIKWPWYIWLGFIAGLIAIVMVTIMLCCMTSCCSCLKGCCSCGSCCKFDEDDSEPVLKGVKLHYT

SEQ ID NO: 1204 - protein, 1273 aa, Artificial Sequence
  SARS-CoV-2/USA/UT-00034/2020__EPI_ISL_417977 spike protein (1-1273)(A890C_V1040C)
MFVFLVLLPLVSSQCVNLTTRTQLPPAYTNSFTRGVYYPDKVFRSSVLHSTQDLFLPFFSNVTWFHAIHVSGTNGTKRFDNPVLPFNDGVYFASTEKSNIIRGWIFGTTLDSKTQSLLIVNNATNVVIKVCEFQFCNDPFLGVYYYKNNKSWMESEFRVYSSANNCTFEYVSQPFLMDLEGKQGNFKNLREFVFKNIDGYFKIYSKHTPINLVRDLPQGFSALEPLVDLPIGINITRFQTLLALHRSYLTPGDSSSGWTAGAAAYYVGYLQPRTFLLKYNENGTITDAVDCALDPLSETKCTLKSFTVEKGIYQTSNFRVQPTESIVRFPNITNLCPFGEVFNATRFASVYAWNRKRISNCVADYSVLYNSASFSTFKCYGVSPTKLNDLCFTNVYADSFVIRGDEVRQIAPGQTGKIADYNYKLPDDFTGCVIAWNSNNLDSKVGGNYNYLYRLFRKSNLKPFERDISTEIYQAGSTPCNGVEGFNCYFPLQSYGFQPTNGVGYQPYRVVVLSFELLHAPATVCGPKKSTNLVKNKCVNFNFNGLTGTGVLTESNKKFLPFQQFGRDIADTTDAVRDPQTLEILDITPCSFGGVSVITPGTNTSNQVAVLYQGVNCTEVPVAIHADQLTPTWRVYSTGSNVFQTRAGCLIGAEHVNNSYECDIPIGAGICASYQTQTNSPRRARSVASQSIIAYTMSLGAENSVAYSNNSIAIPTNFTISVTTEILPVSMTKTSVDCTMYICGDSTECSNLLLQYGSFCTQLNRALTGIAVEQDKNTQEVFAQVKQIYKTPPIKDFGGFNFSQILPDPSKPSKRSFIEDLLFNKVTLADAGFIKQYGDCLGDIAARDLICAQKFNGLTVLPPLLTDEMIAQYTSALLAGTITSGWTFGCGAALQIPFAMQMAYRFNGIGVTQNVLYENQKLIANQFNSAIGKIQDSLSSTASALGKLQDVVNQNAQALNTLVKQLSSNFGAISSVLNDILSRLDKVEAEVQIDRLITGRLQSLQTYVTQQLIRAAEIRASANLAATKMSECVLGQSKRCDFCGKGYHLMSFPQSAPHGVVFLHVTYVPAQEKNFTTAPAICHDGKAHFPREGVFVSNGTHWFVTQRNFYEPQIITTDNTFVSGNCDVVIGIVNNTVYDPLQPELDSFKEELDKYFKNHTSPDVDLGDISGINASVVNIQKEIDRLNEVAKNLNESLIDLQELGKYEQYIKWPWYIWLGFIAGLIAIVMVTIMLCCMTSCCSCLKGCCSCGSCCKFDEDDSEPVLKGVKLHYT

SEQ ID NO: 1205 - protein, 1273 aa, Artificial Sequence
  SARS-CoV-2/USA/UT-00033/2020__EPI_ISL_417976 spike protein (1-1273)(A890C_V1040C)
MFVFLVLLPLVSSQCVNLTTRTQLPPAYTNSFTRGVYYPDKVFRSSVLHSTQDLFLPFFSNVTWFHAIHVSGTNGTKRFDNPVLPFNDGVYFASTEKSNIIRGWIFGTTLDSKTQSLLIVNNATNVVIKVCEFQFCNDPFLGVYYHKNNKSWMESEFRVYSSANNCTFEYVSQPFLMDLEGKQGNFKNLREFVFKNIDGYFKIYSKHTPINLVRDLPQGFSALEPLVDLPIGINITRFQTLLALHRSYLTPGDSSSGLTAGAAAYYVGYLQPRTFLLKYNENGTITDAVDCALDPLSETKCTLKSFTVEKGIYQTSNFRVQPTESIVRFPNITNLCPFGEVFNATRFASVYAWNRKRISNCVADYSVLYNSASFSTFKCYGVSPTKLNDLCFTNVYADSFVIRGDEVRQIAPGQTGKIADYNYKLPDDFTGCVIAWNSNNLDSKVGGNYNYLYRLFRKSNLKPFERDISTEIYQAGSTPCNGVEGFNCYFPLQSYGFQPTNGVGYQPYRVVVLSFELLHAPATVCGPKKSTNLVKNKCVNFNFNGLTGTGVLTESNKKFLPFQQFGRDIADTTDAVRDPQTLEILDITPCSFGGVSVITPGTNTSNQVAVLYQGVNCTEVPVAIHADQLTPTWRVYSTGSNVFQTRAGCLIGAEHVNNSYECDIPIGAGICASYQTQTNSPRRARSVASQSIIAYTMSLGAENSVAYSNNSIAIPTNFTISVTTEILPVSMTKTSVDCTMYICGDSTECSNLLLQYGSFCTQLNRALTGIAVEQDKNTQEVFAQVKQIYKTPPIKDFGGFNFSQILPDPSKPSKRSFIEDLLFNKVTLADAGFIKQYGDCLGDIAARDLICAQKFNGLTVLPPLLTDEMIAQYTSALLAGTITSGWTFGCGAALQIPFAMQMAYRFNGIGVTQNVLYENQKLIANQFNSAIGKIQDSLSSTASALGKLQDVVNQNAQALNTLVKQLSSNFGAISSVLNDILSRLDKVEAEVQIDRLITGRLQSLQTYVTQQLIRAAEIRASANLAATKMSECVLGQSKRCDFCGKGYHLMSFPQSAPHGVVFLHVTYVPAQEKNFTTAPAICHDGKAHFPREGVFVSNGTHWFVTQRNFYEPQIITTDNTFVSGNCDVVIGIVNNTVYDPLQPELDSFKEELDKYFKNHTSPDVDLGDISGINASVVNIQKEIDRLNEVAKNLNESLIDLQELGKYEQYIKWPWYIWLGFIAGLIAIVMVTIMLCCMTSCCSCLKGCCSCGSCCKFDEDDSEPVLKGVKLHYT

SEQ ID NO: 1206 - protein, 1273 aa, Artificial Sequence
  SARS-CoV-2/USA/WI-13/2020__EPI_ISL_417516 spike protein (1-1273)(A890C_V1040C)
MFVFLVLLPLVSSQCVNLTTRTQLPPAYTNSFTRGVYYPDKVFRSSVLHSTQDLFLPFFSNVTWFHAIHVSGTNGTKRFDNPVLPFNDGVYFASTEKSNIIRGWIFGTTLDSKTQSLLIVNNATNVVIKVCEFQFCNDPFLGVYYHKNNKSWMESEFRVYSSANNCTFEYVSQPFLMDLEGKQGNFKNLREFVFKNIDGYFKIYSKHTPINLVRDLPQGFSALEPLVDLPIGINITRFQTLLALHRSYLTPGDSSSGWTAGAAAYYVGYLQPRTFLLKYNENGTITDAVDCALDPLSETKCTLKSFTVEKGIYQTSNFRVLPTESIVRFPNITNLCPFGEVFNATRFASVYAWNRKRISNCVADYSVLYNSASFSTFKCYGVSPTKLNDLCFTNVYADSFVIRGDEVRQIAPGQTGKIADYNYKLPDDFTGCVIAWNSNNLDSKVGGNYNYLYRLFRKSNLKPFERDISTEIYQAGSTPCNGVEGFNCYFPLQSYGFQPTNGVGYQPYRVVVLSFELLHAPATVCGPKKSTNLVKNKCVNFNFNGLTGTGVLTESNKKFLPFQQFGRDIADTTDAVRDPQTLEILDITPCSFGGVSVITPGTNTSNQVAVLYQGVNCTEVPVAIHADQLTPTWRVYSTGSNVFQTRAGCLIGAEHVNNSYECDIPIGAGICASYQTQTNSPRRARSVASQSIIAYTMSLGAENSVAYSNNSIAIPTNFTISVTTEILPVSMTKTSVDCTMYICGDSTECSNLLLQYGSFCTQLNRALTGIAVEQDKNTQEVFAQVKQIYKTPPIKDFGGFNFSQILPDPSKPSKRSFIEDLLFNKVTLADAGFIKQYGDCLGDIAARDLICAQKFNGLTVLPPLLTDEMIAQYTSALLAGTITSGWTFGCGAALQIPFAMQMAYRFNGIGVTQNVLYENQKLIANQFNSAIGKIQDSLSSTASALGKLQDVVNQNAQALNTLVKQLSSNFGAISSVLNDILSRLDKVEAEVQIDRLITGRLQSLQTYVTQQLIRAAEIRASANLAATKMSECVLGQSKRCDFCGKGYHLMSFPQSAPHGVVFLHVTYVPAQEKNFTTAPAICHDGKAHFPREGVFVSNGTHWFVTQRNFYEPQIITTDNTFVSGNCDVVIGIVNNTVYDPLQPELDSFKEELDKYFKNHTSPDVDLGDISGINASVVNIQKEIDRLNEVAKNLNESLIDLQELGKYEQYIKWPWYIWLGFIAGLIAIVMVTIMLCCMTSCCSCLKGCCSCGSCCKFDEDDSEPVLKGVKLHYT

SEQ ID NO: 1207 - protein, 1272 aa, Artificial Sequence
  SARS-CoV-2/India/1-27/2020__EPI_ISL_413522 spike protein (1-1272)(A889C_V1039C)
MFVFLVLLPLVSSQCVNLTTRTQLPPAYTNSFTRGVYYPDKVFRSSVLHSTQDLFLPFFSNVTWFHAIHVSGTNGTKRFDNPVLPFNDGVYFASTEKSNIIRGWIFGTTLDSKTQSLLIVNNATNVVIKVCEFQFCNDPFLGVYHKNNKSWMESEFRVYSSANNCTFEYVSQPFLMDLEGKQGNFKNLREFVFKNIDGYFKIYSKHTPINLVRDLPQGFSALEPLVDLPIGINITRFQTLLALHRSYLTPGDSSSGWTAGAAAYYVGYLQPRTFLLKYNENGTITDAVDCALDPLSETKCTLKSFTVEKGIYQTSNFRVQPTESIVRFPNITNLCPFGEVFNATRFASVYAWNRKRISNCVADYSVLYNSASFSTFKCYGVSPTKLNDLCFTNVYADSFVIRGDEVIQIAPGQTGKIADYNYKLPDDFTGCVIAWNSNNLDSKVGGNYNYLYRLFRKSNLKPFERDISTEIYQAGSTPCNGVEGFNCYFPLQSYGFQPTNGVGYQPYRVVVLSFELLHAPATVCGPKKSTNLVKNKCVNFNFNGLTGTGVLTESNKKFLPFQQFGRDIADTTDAVRDPQTLEILDITPCSFGGVSVITPGTNTSNQVAVLYQDVNCTEVPVAIHADQLTPTWRVYSTGSNVFQTRAGCLIGAEHVNNSYECDIPIGAGICASYQTQTNSPRRARSVASQSIIAYTMSLGAENSVAYSNNSIAIPTNFTISVTTEILPVSMTKTSVDCTMYICGDSTECSNLLLQYGSFCTQLNRALTGIAVEQDKNTQEVFAQVKQIYKTPPIKDFGGFNFSQILPDPSKPSKRSFIEDLLFNKVTLADAGFIKQYGDCLGDIAARDLICAQKFNGLTVLPPLLTDEMIAQYTSALLAGTITSGWTFGCGAALQIPFAMQMAYRFNGIGVTQNVLYENQKLIANQFNSAIGKIQDSLSSTASALGKLQDVVNQNAQALNTLVKQLSSNFGAISSVLNDILSRLDKVEAEVQIDRLITGRLQSLQTYVTQQLIRAAEIRASANLAATKMSECVLGQSKRCDFCGKGYHLMSFPQSAPHGVVFLHVTYVPAQEKNFTTAPAICHDGKAHFPREGVFVSNGTHWFVTQRNFYEPQIITTDNTFVSGNCDVVIGIVNNTVYDPLQPELDSFKEELDKYFKNHTSPDVDLGDISGINASVVNIQKEIDRLNEVAKNLNESLIDLQELGKYEQYIKWPWYIWLGFIAGLIAIVMVTIMLCCMTSCCSCLKGCCSCGSCCKFDEDDSEPVLKGVKLHYT

SEQ ID NO: 1208 - protein, 1267 aa, Artificial Sequence
  SARS-CoV-2/pangolin/Guangxi/P4L/2017__EPI_ISL_410538 spike protein (1-1267)(A884C_V1034C)
MFVFLFVLPLVSSQCVNLTTRTGIPPGYTNSSTRGVYYPDKVFRSSILHLTQDLFLPFFSNVTWFNTINYQGGFKKFDNPVLPFNDGVYFASTEKSNIIRGWIFGTTLDARTQSLLIVNNATNVVIKVCEFQFCTDPFLGVYYHNNNKTWVENEFRVYSSANNCTFEYISQPFLMDLEGKQGNFKNLREFVFKNVDGYFKIYSKHTPIDLVRDLPRGFAALEPLVDLPIGINITRFQTLLALHRSYLTPGNLESGWTTGAAAYYVGYLQQRTFLLSYNQNGTITDAVDCSLDPLSETKCTLKSLTVEKGIYQTSNFRVQPTISIVRFPNITNLCPFGEVFNASKFASVYAWNRKRISNCVADYSVLYNSTSFSTFKCYGVSPTKLNDLCFTNVYADSFVVKGDEVRQIAPGQTGVIADYNYKLPDDFTGCVIAWNSVKQDALTGGNYGYLYRLFRKSKLKPFERDISTEIYQAGSTPCNGQVGLNCYYPLERYGFHPTTGVNYQPFRVVVLSFELLNGPATVCGPKLSTTLVKDKCVNFNFNGLTGTGVLTTSKKQFLPFQQFGRDISDTTDAVRDPQTLEILDITPCSFGGVSVITPGTNTSNQVAVLYQDVNCTEVPMAIHAEQLTPAWRVYSAGANVFQTRAGCLVGAEHVNNSYECDIPVGAGICASYHSMSSLRSVNQRSIIAYTMSLGAENSVAYSNNSIAIPTNFTISVTTEILPVSMTKTSVDCTMYICGDSIECSNLLLQYGSFCTQLNRALTGIAVEQDKNTQEVFAQVKQIYKTPPIKDFGGFNFSQILPDPSKPSKRSFIEDLLFNKVTLADAGFIKQYGDCLGDIAARDLICAQKFNGLTVLPPLLTDEMIAQYTSALLAGTITSGWTFGCGAALQIPFAMQMAYRFNGIGVTQNVLYENQKLIANQFNSAIGKIQDSLSSTASALGKLQDVVNQNAQALNTLVKQLSSNFGAISSVLNDILSRLDKVEAEVQIDRLITGRLQSLQTYVTQQLIRAAEIRASANLAATKMSECVLGQSKRCDFCGKGYHLMSFPQSAPHGVVFLHVTYVPAQEKNFTTAPAICHEGKAHFPREGVFVSNGTHWFITQRNFYEPQIITTDNTFVSGSCDVVIGIVNNTVYDPLQPELDSFKEELDKYFKNHTSPDVDLGDISGINASVVNIQKEIDRLNEVAKNLNESPIDLQELGKYEQYIKWPWYIWLGFIAGLIAIIMVTIMLCCMTSCCSCLKGCCSCGSCCKFDEDDSEPVLKGVKLHYT

SEQ ID NO: 1209 - protein, 1267 aa, Artificial Sequence
  SARS-CoV-2/pangolin/Guangxi/P5L/2017__EPI_ISL_410540 spike protein (1-1267)(A884C_V1034C)
MFVFLFVLPLVSSQCVNLTTRTGIPPGYTNSSTRGVYYPDKVFRSSILHLTQDLFLPFFSNVTWFNTINYQGGFKKFDNPVLPFNDGVYFASTEKSNIIRGWIFGTTLDARTQSLLIVNNATNVVIKVCEFQFCTDPFLGVYYHNNNKTWVENEFRVYSSANNCTFEYISQPFLMDLEGKQGNFKNLREFVFKNVDGYFKIYSKHTPIDLVRDLPRGFAALEPLVDLPIGINITRFQTLLALHRSYLTPGKLESGWTTGAAAYYVGYLQQRTFLLSYNQNGTITDAVDCSLDPLSETKCTLKSLTVEKGIYQTSNFRVQPTISIVRFPNITNLCPFGEVFNASKFASVYAWNRKRISNCVADYSVLYNSTSFSTFKCYGVSPTKLNDLCFTNVYADSFVVKGDEVRQIAPGQTGVIADYNYKLPDDFTGCVIAWNSVKQDALTGGNYGYLYRLFRKSKLKPFERDISTEIYQAGSTPCNGQVGLNCYYPLERYGFHPTTGVNYQPFRVVVLSFELLNGPATVCGPKLSTTLVKDKCVNFNFNGLTGTGVLTTSKKQFLPFQQFGRDISDTTDAVRDPQTLEILDITPCSFGGVSVITPGTNTSNQVAVLYQDVNCTEVPMAIHAEQLTPAWRVYSAGANVFQTRAGCLVGAEHVNNSYECDIPVGAGICASYHSMSSFRSVNQRSIIAYTMSLGAENSVAYSNNSIAIPTNFTISVTTEILPVSMTKTSVDCTMYICGDSIECSNLLLQYGSFCTQLNRALTGIAVEQDKNTQEVFAQVKQIYKTPPIKDFGGFNFSQILPDPSKPSKRSFIEDLLFNKVTLADAGFIKQYGDCLGDIAARDLICAQKFNGLTVLPPLLTDEMIAQYTSALLAGTITSGWTFGCGAALQIPFAMQMAYRFNGIGVTQNVLYENQKLIANQFNSAIGKIQDSLSSTASALGKLQDVVNQNAQALNTLVKQLSSNFGAISSVLNDILSRLDKVEAEVQIDRLITGRLQSLQTYVTQQLIRAAEIRASANLAATKMSECVLGQSKRCDFCGKGYHLMSFPQSAPHGVVFLHVTYVPAQEKNFTTAPAICHEGKAHFPREGVFVSNGTHWFITQRNFYEPQIITTDNTFVSGSCDVVIGIVNNTVYDPLQPELDSFKEELDKYFKNHTSPDVDLGDISGINASVVNIQKEIDRLNEVAKNLNESLIDLQELGKYEQYIKWPWYIWLGFIAGLIAIIMVTIMLCCMTSCCSCLKGCCSCGSCCKFDEDDSEPVLKGVKLHYT

SEQ ID NO: 1210 - protein, 1267 aa, Artificial Sequence
  SARS-CoV-2/pangolin/Guangxi/P5E/2017__EPI_ISL_410541 spike protein (1-1267)(A884C_V1034C)
MFVFLFVLPLVSSQCVNLTTRTGIPPGYTNSSTRGVYYPDKVFRSSILHLTQDLFLPFFSNVTWFNTITYQGGSKKFDNPVLPFNDGVYFASTEKSNIIRGWIFGTTLDARTQSLLIVNNATNVVIKVCEFQFCTDPFLGVYYHNNNKTWVENEFRVYSSANNCTFEYISQPFLMDLEGKQGNFKNLREFVFKNVDGYFKIYSKHTPIDLVRDLPRGFAALEPLVDLPIGINITRFQTLLALHRSYLTPGKLESGWTTGAAAYYVGYLQQRTFLLSYNQNGTITDAVDCSLDPLSETKCTLKSLTVEKGIYQTSNFRVQPTISIVRFPNITNLCPFGEVFNASKFASVYAWNRKRISNCVADYSVLYNSTSFSTFKCYGVSPTKLNDLCFTNVYADSFVVKGDEVRQIAPGQTGVIADYNYKLPDDFTGCVIAWNSVKQDALTGDNYGYLYRLFRKSKLKPFERDISTEIYQAGSTPCNGQVGLNCYYPLERYGFHPTTGVNYQPFRVVVLSFELLNGPATVCGPKLSTTLVKDKCVNFNFNGLTGTGVLTTSKKQFLPFQQFGRDISDTTDAVRDPQTLEILDITPCSFGGVSVITPGTNTSNQVAVLYQDVNCTEVPMAIHAEQLTPAWRVYSAGANVFQTRAGCLVGAEHVNNSYECDIPVGAGICASYHSMSSFRSVNQRSIIAYTMSLGAENSVAYSNNSIAIPTNFTISVTTEILPVSMTKTSVDCTMYICGDSIECSNLLLQYGSFCTQLNRALTGIAVEQDKNTQEVFAQVKQIYKTPPIKDFGGFNFSQILPDPSKPSKRSFIEDLLFNKVTLADAGFIKQYGDCLGDIAARDLICAQKFNGLTVLPPLLTDEMIAQYTSALLAGTITSGWTFGCGAALQIPFAMQMAYRFNGIGVTQNVLYENQKLIANQFNSAIGKIQDSLSSTASALGKLQDVVNQNAQALNTLVKQLSSNFGAISSVLNDILSRLDKVEAEVQIDRLITGRLQSLQTYVTQQLIRAAEIRASANLAATKMSECVLGQSKRCDFCGKGYHLMSFPQSAPHGVVFLHVTYVPAQEKNFTTAPAICHEGKAHFPREGVFVSNGTHWFITQRNFYEPQIITTDNTFVSGSCDVVIGIVNNTVYDPLQPELDSFKEELDKYFKNHTSPDVDLGDISGINASVVNIQKEIDRLNEVAKNLNESLIDLQELGKYEQYIKWPWYIWLGFIAGLIAIIMVTIMLCCMTSCCSCLKGCCSCGSCCKFDEDDSEPVLKGVKLHYT

SEQ ID NO: 1211 - protein, 1265 aa, Artificial Sequence
  SARS-CoV-2/pangolin/Guangxi/P1E/2017__EPI_ISL_410539 spike protein (1-1265)(A882C_V1032C)
MFVFLFVLPLVSSQCVNLTTRTGIQPGYTNSSTRGVYYPDKVFRSSILHLTQDLFLPFFSNVTWFNTINYQGGFKKFDNPVLPFNDGVYFASTEKSNIIRGWIFGTTLDARTQSLLIVNNATNVVIKVCEFQFCTDPFLGVYYHNNNKTWVENEFRVYSSANNCTFEYISQPFLMDLEGKQGNFKNLREFVFKNVDGYFKIYSKHTPIDLVRDLPRGFAALEPLVDLPIGINITRFQTLLALHRSYLTPGKLESGWTTGAAAYYVGYLQQRTFLLSYNQNGTITDAVDCSLDPLSETKCTLKSLTVEKGIYQTSNFRVQPTISIVRFPNITNLCPFGEVFNASKFASVYAWNRKRISNCVADYSVLYNSTSFSTFKCYGVSPTKLNDLCFTNVYADSFVVKGDEVRQIAPGQTGVIADYNYKLPDDFTGCVIAWNSVKQDALTGGNYLYRLFRKSKLKPFERDISTEIYQAGSTPCNGQVGLNCYYPLERYGFHPTTGVNYQPFRVVVLSFELLNGPATVCGPKLSTTLVKDKCVNFNFNGLTGTGVLTTSKKQFLPFQQFGRDISDTTDAVRDPQTLEILDITPCSFGGVSVITPGTNTSNQVAVLYQDVNCTEVPMAIHAEQLTPAWRVYSAGANVFQTRAGCLVGAEHVNNSYECDIPVGAGICASYHSMSSLRSVNQRSIIAYTMSLGAENSVAYSNNSIAIPTNFTISVTTEILPVSMTKTSVDCTMYICGDSIECSNLLLQYGSFCTQLNRALTGIAVEQDKNTQEVFAQVKQIYKTPPIKDFGGFNFSQILPDPSKPSKRSFIEDLLFNKVTLADAGFIKQYGDCLGDIAARDLICAQKFNGLTVLPPLLTDEMIAQYTSALLAGTITSGWTFGCGAALQIPFAMQMAYRFNGIGVTQNVLYENQKLIANQFNSAIGKIQDSLSSTASALGKLQDVVNQNAQALNTLVKQLSSNFGAISSVLNDILSRLDKVEAEVQIDRLITGRLQSLQTYVTQQLIRAAEIRASANLAATKMSECVLGQSKRCDFCGKGYHLMSFPQSAPHGVVFLHVTYVPAQEKNFTTAPAICHEGKAHFPREGVFVSNGTHWFITQRNFYEPQIITTDNTFVSGSCDVVIGIVNNTVYDPLQPELDSFKEELDKYFKNHTSPDVDLGDISGINASVVNIQKEIDRLNEVAKNLNESLIDLQELGKYEQYIKWPWYIWLGFIAGLIAIIMVTIMLCCMTSCCSCLKGCCSCGSCCKFDEDDSEPVLKGVKLHYT

SEQ ID NO: 1212 - protein, 1273 aa, Artificial Sequence
  SARS-CoV-2/Wuhan/WIV05/2019__EPI_ISL_402128 spike protein (1-1273)(T874C_S1055C)
MFVFLVLLPLVSSQCVNLTTRTQLPPAYTNSFTRGVYYPDKVFRSSVLHSTQDLFLPFFSNVTWFHAIHVSGTNGTKRFDNPVLPFNDGVYFASTEKSNIIRGWIFGTTLDSKTQSLLIVNNATNVVIKVCEFQFCNDPFLGVYYHKNNKSWMESEFRVYSSANNCTFEYVSQPFLMDLEGKQGNFKNLREFVFKNIDGYFKIYSKHTPINLVRDLPQGFSALEPLVDLPIGINITRFQTLLALHRSYLTPGDSSSGWTAGAAAYYVGYLQPRTFLLKYNENGTITDAVDCALDPLSETKCTLKSFTVEKGIYQTSNFRVQPTESIVRFPNITNLCPFGEVFNATRFASVYAWNRKRISNCVADYSVLYNSASFSTFKCYGVSPTKLNDLCFTNVYADSFVIRGDEVRQIAPGQTGKIADYNYKLPDDFTGCVIAWNSNNLDSKVGGNYNYLYRLFRKSNLKPFERDISTEIYQAGSTPCNGVEGFNCYFPLQSYGFQPTNGVGYQPYRVVVLSFELLHAPATVCGPKKSTNLVKNKCVNFNFNGLTGTGVLTESNKKFLPFQQFGRDIADTTDAVRDPQTLEILDITPCSFGGVSVITPGTNTSNQVAVLYQDVNCTEVPVAIHADQLTPTWRVYSTGSNVFQTRAGCLIGAEHVNNSYECDIPIGAGICASYQTQTNSPRRARSVASQSIIAYTMSLGAENSVAYSNNSIAIPTNFTISVTTEILPVSMTKTSVDCTMYICGDSTECSNLLLQYGSFCTQLNRALTGIAVEQDKNTQEVFAQVKQIYKTPPIKDFGGFNFSQILPDPSKPSKRSFIEDLLFNKVTLADAGFIKQYGDCLGDIAARDLICAQKFNGLTVLPPLLTDEMIAQYCSALLAGTITSGWTFGAGAALQIPFAMQMAYRFNGIGVTQNVLYENQKLIANQFNSAIGKIQDSLSSTASALGKLQDVVNQNAQALNTLVKQLSSNFGAISSVLNDILSRLDKVEAEVQIDRLITGRLQSLQTYVTQQLIRAAEIRASANLAATKMSECVLGQSKRVDFCGKGYHLMSFPQCAPHGVVFLHVTYVPAQEKNFTTAPAICHDGKAHFPREGVFVSNGTHWFVTQRNFYEPQIITTDNTFVSGNCDVVIGIVNNTVYDPLQPELDSFKEELDKYFKNHTSPDVDLGDISGINASVVNIQKEIDRLNEVAKNLNESLIDLQELGKYEQYIKWPWYIWLGFIAGLIAIVMVTIMLCCMTSCCSCLKGCCSCGSCCKFDEDDSEPVLKGVKLHYT

SEQ ID NO: 1213 - protein, 1269 aa, Artificial Sequence
  SARS-CoV-2/bat/Yunnan/RaTG13/2013__EPI_ISL_402131 spike protein (1-1269)(T870C_S1051C)
MFVFLVLLPLVSSQCVNLTTRTQLPPAYTNSSTRGVYYPDKVFRSSVLHLTQDLFLPFFSNVTWFHAIHVSGTNGIKRFDNPVLPFNDGVYFASTEKSNIIRGWIFGTTLDSKTQSLLIVNNATNVVIKVCEFQFCNDPFLGVYYHKNNKSWMESEFRVYSSANNCTFEYVSQPFLMDLEGKQGNFKNLREFVFKNIDGYFKIYSKHTPINLVRDLPPGFSALEPLVDLPIGINITRFQTLLALHRSYLTPGDSSSGWTAGAAAYYVGYLQPRTFLLKYNENGTITDAVDCALDPLSETKCTLKSFTVEKGIYQTSNFRVQPTDSIVRFPNITNLCPFGEVFNATTFASVYAWNRKRISNCVADYSVLYNSTSFSTFKCYGVSPTKLNDLCFTNVYADSFVITGDEVRQIAPGQTGKIADYNYKLPDDFTGCVIAWNSKHIDAKEGGNFNYLYRLFRKANLKPFERDISTEIYQAGSKPCNGQTGLNCYYPLYRYGFYPTDGVGHQPYRVVVLSFELLNAPATVCGPKKSTNLVKNKCVNFNFNGLTGTGVLTESNKKFLPFQQFGRDIADTTDAVRDPQTLEILDITPCSFGGVSVITPGTNASNQVAVLYQDVNCTEVPVAIHADQLTPTWRVYSTGSNVFQTRAGCLIGAEHVNNSYECDIPIGAGICASYQTQTNSRSVASQSIIAYTMSLGAENSVAYSNNSIAIPTNFTISVTTEILPVSMTKTSVDCTMYICGDSTECSNLLLQYGSFCTQLNRALTGIAVEQDKNTQEVFAQVKQIYKTPPIKDFGGFNFSQILPDPSKPSKRSFIEDLLFNKVTLADAGFIKQYGDCLGDIAARDLICAQKFNGLTVLPPLLTDEMIAQYCSALLAGTITSGWTFGAGAALQIPFAMQMAYRFNGIGVTQNVLYENQKLIANQFNSAIGKIQDSLSSTASALGKLQDVVNQNAQALNTLVKQLSSNFGAISSVLNDILSRLDKVEAEVQIDRLITGRLQSLQTYVTQQLIRAAEIRASANLAATKMSECVLGQSKRVDFCGKGYHLMSFPQCAPHGVVFLHVTYVPAQEKNFTTAPAICHDGKAHFPREGVFVSNGTHWFVTQRNFYEPQIITTDNTFVSGSCDVVIGIVNNTVYDPLQPELDSFKEELDKYFKNHTSPDVDLGDISGINASVVNIQKEIDRLNEVAKNLNESLIDLQELGKYEQYIKWPWYIWLGFIAGLIAIIMVTIMLCCMTSCCSCLKGCCSCGSCCKFDEDDSEPVLKGVKLHYT

SEQ ID NO: 1214 - protein, 1273 aa, Artificial Sequence
  SARS-CoV-2/Wuhan/HBCDC-HB-01/2019__EPI_ISL_402132 spike protein (1-1273)(T874C_S1055C)
MFVFLVLLPLVSSQCVNLTTRTQLPPAYTNSITRGVYYPDKVFRSSVLHSTQDLFLPFFSNVTWFHAIHVSGTNGTKRFDNPVLPFNDGVYFASTEKSNIIRGWIFGTTLDSKTQSLLIVNNATNVVIKVCEFQFCNDPFLGVYYHKNNKSWMESEFRVYSSANNCTFEYVSQPFLMDLEGKQGNFKNLREFVFKNIDGYFKIYSKHTPINLVRDLPQGFSALEPLVDLPIGINITRFQTLLALHRSYLTPGDSSSGWTAGAAAYYVGYLQPRTFLLKYNENGTITDAVDCALDPLSETKCTLKSFTVEKGIYQTSNFRVQPTESIVRFPNITNLCPFGEVFNATRFASVYAWNRKRISNCVADYSVLYNSASFSTFKCYGVSPTKLNDLCFTNVYADSFVIRGDEVRQIAPGQTGKIADYNYKLPDDFTGCVIAWNSNNLDSKVGGNYNYLYRLFRKSNLKPFERDISTEIYQAGSTPCNGVEGFNCYFPLQSYGFQPTNGVGYQPYRVVVLSFELLHAPATVCGPKKSTNLVKNKCVNFNFNGLTGTGVLTESNKKFLPFQQFGRDIADTTDAVRDPQTLEILDITPCSFGGVSVITPGTNTSNQVAVLYQDVNCTEVPVAIHADQLTPTWRVYSTGSNVFQTRAGCLIGAEHVNNSYECDIPIGAGICASYQTQTNSPRRARSVASQSIIAYTMSLGAENSVAYSNNSIAIPTNFTISVTTEILPVSMTKTSVDCTMYICGDSTECSNLLLQYGSFCTQLNRALTGIAVEQDKNTQEVFAQVKQIYKTPPIKDFGGFNFSQILPDPSKPSKRSFIEDLLFNKVTLADAGFIKQYGDCLGDIAARDLICAQKFNGLTVLPPLLTDEMIAQYCSALLAGTITSGWTFGAGAALQIPFAMQMAYRFNGIGVTQNVLYENQKLIANQFNSAIGKIQDSLSSTASALGKLQDVVNQNAQALNTLVKQLSSNFGAISSVLNDILSRLDKVEAEVQIDRLITGRLQSLQTYVTQQLIRAAEIRASANLAATKMSECVLGQSKRVDFCGKGYHLMSFPQCAPHGVVFLHVTYVPAQEKNFTTAPAICHDGKAHFPREGVFVSNGTHWFVTQRNFYEPQIITTDNTFVSGNCDVVIGIVNNTVYDPLQPELDSFKEELDKYFKNHTSPDVDLGDISGINASVVNIQKEIDRLNEVAKNLNESLIDLQELGKYEQYIKWPWYIWLGFIAGLIAIVMVTIMLCCMTSCCSCLKGCCSCGSCCKFDEDDSEPVLKGVKLHYT

SEQ ID NO: 1215 - protein, 1273 aa, Artificial Sequence
  SARS-CoV-2/Guangdong/20SF028/2020__EPI_ISL_403936 spike protein (1-1273)(T874C_S1055C)
MFVFLVLLPLVSSQCVNLTTRTQLPPAYTNSFTRGVYYPDKVFRSSVLYSTQDLFLPFFSNVTWFHAIHVSGTNGTKRFDNPVLPFNDGVYFASTEKSNIIRGWIFGTTLDSKTQSLLIVNNATNVVIKVCEFQFCNDPFLGVYYHKNNKSWMESEFRVYSSANNCTFEYVSQPFLMDLEGKQGNFKNLREFVFKNIDGYFKIYSKHTPINLVRDLPQGFSALEPLVDLPIGINITRFQTLLALHRSYLTPGDSSSGWTAGAAAYYVGYLQPRTFLLKYNENGTITDAVDCALDPLSETKCTLKSFTVEKGIYQTSNFRVQPTESIVRFPNITNLCPFGEVFNATRFASVYAWNRKRISNCVADYSVLYNSASFSTFKCYGVSPTKLNDLCFTNVYADSFVIRGDEVRQIAPGQTGKIADYNYKLPDDFTGCVIAWNSNNLDSKVGGNYNYLYRLFRKSNLKPFERDISTEIYQAGSTPCNGVEGFNCYFPLQSYGFQPTNGVGYQPYRVVVLSFELLHAPATVCGPKKSTNLVKNKCVNFNFNGLTGTGVLTESNKKFLPFQQFGRDIADTTDAVRDPQTLEILDITPCSFGGVSVITPGTNTSNQVAVLYQDVNCTEVPVAIHADQLTPTWRVYSTGSNVFQTRAGCLIGAEHVNNSYECDIPIGAGICASYQTQTNSPRRARSVASQSIIAYTMSLGAENSVAYSNNSIAIPTNFTISVTTEILPVSMTKTSVDCTMYICGDSTECSNLLLQYGSFCTQLNRALTGIAVEQDKNTQEVFAQVKQIYKTPPIKDFGGFNFSQILPDPSKPSKRSFIEDLLFNKVTLADAGFIKQYGDCLGDIAARDLICAQKFNGLTVLPPLLTDEMIAQYCSALLAGTITSGWTFGAGAALQIPFAMQMAYRFNGIGVTQNVLYENQKLIANQFNSAIGKIQDSLSSTASALGKLQDVVNQNAQALNTLVKQLSSNFGAISSVLNDILSRLDKVEAEVQIDRLITGRLQSLQTYVTQQLIRAAEIRASANLAATKMSECVLGQSKRVDFCGKGYHLMSFPQCAPHGVVFLHVTYVPAQEKNFTTAPAICHDGKAHFPREGVFVSNGTHWFVTQRNFYEPQIITTDNTFVSGNCDVVIGIVNNTVYDPLQPELDSFKEELDKYFKNHTSPDVDLGDISGINASVVNIQKEIDRLNEVAKNLNESLIDLQELGKYEQYIKWPWYIWLGFIAGLIAIVMVTIMLCCMTSCCSCLKGCCSCGSCCKFDEDDSEPVLKGVKLHYT

SEQ ID NO: 1216 - protein, 1273 aa, Artificial Sequence
  SARS-CoV-2/Shenzhen/SZTH-001/2020__EPI_ISL_406592 spike protein (1-1273)(T874C_S1055C)
MFVFLVLLPLVSSQCVNLTTRTQLPPAYTNSFTRGVYYPDKVFRSSVLHSTQDLFLPFFSNVTWFHAIHVSGTNGTKRFDNPVLPFNDGVYFASTEKSNIIRGWIFGTTLDSKTQSLLIVNNATNVVIKVCEFQFCNDPFLGVYYHKNNKSWMESEFRVYSSANNCTFEYVSQPFLMDLEGKQGNFKNLREFVFKNIDGYFKIYSKHTPINLVRDLPQGFSALEPLVDLPIGINITRFQTLLALHRSYLTPGDSSSGWTAGAAAYYVGYLQPRTFLLKYNENGTITDAVDCALDPLSETKCTLKSFTVEKGIYQTSNFRVQPTESIVRFPNITNLCPFGEVFNATRFASVYAWNRKRISNCVADYSVLYNSASFSTFKCYGVSPTKLNDLCFTNVYADSFVIRGDEVRQIAPGQTGKIADYNYKLPDDFTGCVIAWNSNNLDSKVGGNYNYLYRLFRKSNLKPFERDISTEIYQAGSTPCNGVEGFNCYFPLQSYGFQPTNGVGYQPYRVVVLSFELLHAPATVCGPKKSTNLVKNKCVNFNFNGLTGTGVLTESNKKFLPFQQFGRDIADTTDAVRDPQTLEILDITPCSFGGVSVITPGTNTSNQVAVLYQDVNCTEVPVAIHADQLTPTWRVYSTGSNVFQTRAGCLIGAEHVNNSYECDIPIGAGICASYQTQTNSPRRARSVASQSIIAYTMSLGAENSVAYSNNSIAIPTNFTISVTTEILPVSMTKTSVDCTMYICGDSTECSNLLLQYGSFCTQLNRALTGIAVEQDKNTQEVFAQVKQIYKTPPIKDFGGFNFSQILPDPSKPSKRSFIEDLLFNKVTLADAGFIKQYGDCLGDIAARDLICAQKFNGLTVLPPLLTDEMIAQYCSALLAGTITSGWTFGAGAALQIPFAMQMAYRFNGIGVTQNVLYENQKLIANQFNSAIGKIQDSLSSTASALGKLQDVVNQNAQALNTLVKQLSSNFGAISSVLNDILSRLDKVEAEVQIDRLITGRLQSLQTYVTQQLIRAAEIRASANLAATKMSECVLGQSKRVDFCGKGYHLMSFPQCAPHGVVFLHVTYVPAQEKNFTTAPAICHDGKAHFPREGVFVSNGTHWFVTQRNFYEPQIITTDNTFVSGNCDVLIGIVNNTVYDPLQPELDSFKEELDKYFKNHTSPDVDLGDISGINASVVNIQKEIDRLNEVAKNLNESLIDLQELGKYEQYIKWPWYIWLGFIAGLIAIVMVTIMLCCMTSCCSCLKGCCSCGSCCKFDEDDSGPVLKGVKLHYT

SEQ ID NO: 1217 - protein, 1273 aa, Artificial Sequence
  SARS-CoV-2/Shenzhen/SZTH-004/2020__EPI_ISL_406595 spike protein (1-1273)(T874C_S1055C)
MFVFLVLLPLVSSQCVNLTTRTQLPPAYTNSFTRGVYYPDKVFRSSVLHSTQDLFLPFFSNVTWFHAIHVSGTNGTKRFDNPVLPFNDGVYFASTEKSNIIRGWIFGTTLDSKTQSLLIVNNATNVVIKVCEFQFCNDPFLGVYYHKNNKSWMESEFRVYSSANNCTFEYVSQPFLMDLEGKQGNFKNLREFVFKNIDGYFKIYSKHTPINLVRDLPQGFSALEPLVDLPIGINITRFQTLLALHRSYLTPGDSSSGWTAGAAAYYVGYLQPRTFLLKYNENGTITDAVDCALDPLSETKCTLKSFTVEKGIYQTSNFRVQPTESIVRFPNITNLCPFGEVFNATRFASVYAWDRKRISNCVAYYSVLYNSASFSTFKCYGVSPTKLNDLCFTNVYADSFVIRGDEVRQIAPGQTGKIADYNYKLPDDFTGCVIAWNSNNLDSKVGGNYNYLYRLFRKSNLKPFERDISTEIYQAGSTPCNGVEGFNCYFPLQSYGFQPTNGVGYQPYRVVVLSFELLHAPATVCGPKKSTNLVKNKCVNFNFNGLTGTGVLTESNKKFLPFQQFGRDIADTTDAVRDPQTLEILDITPCSFGGVSVITPGTNTSNQVAVLYQDVNCTEVPVAIHADQLTPTWRVYSTGSNVFQTRAGCLIGAEHVNNSYECDIPIGAGICASYQTQTNSPRRARSVASQSIIAYTMSLGAENSVAYSNNSIAIPTNFTISVTTEILPVSMTKTSVDCTMYICGDSTECSNLLLQYGSFCTQLNRALTGIAVEQDKNTQEVFAQVKQIYKTPPIKDFGGFNFSQILPDPSKPSKRSFIEDLLFNKVTLADAGFIKQYGDCLGDIAARDLICAQKFNGLTVLPPLLTDEMIAQYCSALLAGTITSGWTFGAGAALQIPFAMQMAYRFNGIGVTQNVLYENQKLIANQFNSAIGKIQDSLSSTASALGKLQDVVNQNAQALNTLVKQLSSNFGAISSVLNDILSRLDKVEAEVQIDRLITGRLQSLQTYVTQQLIRAAEIRASANLAATKMSECVLGQSKRVDFCGKGYHLMSFPQCAPHGVVFLHVTYVPAQEKNFTTAPAICHDGKAHFPREGVFVSNGTHWFVTQRNFYEPQIITTDNTFVSGNCDVVIGIVNNTVYDPLQPELDSFKEELDKYFKNHTSPDVDLGDISGINASVVNIQKEIDRLNEVAKNLNESLIDLQELGKYEQYIKWPWYIWLGFIAGLIAIVMVTIMLCCMTSCCSCLKGCCSCGSCCKFDEDDSEPVLKGVKLHYT

SEQ ID NO: 1218 - protein, 1273 aa, Artificial Sequence
  SARS-CoV-2/France/IDF0372/2020__EPI_ISL_406596 spike protein (1-1273)(T874C_S1055C)
MFVFLVLLPLVSSQCVNLTTRTQLPPAYTNSFTRGVYYPDKVFRSSVLHSTQDLFLPFFSNVTWFHAIHVSGTNGTKRFDNPVLPFNDGVYFASTEKSNIIRGWIFGTTLDSKTQSLLIVNNATNVVIKVCEFQFCNDPFLGVYYHKNNKSWMESEFRVYSSANNCTFEYVSQPFLMDLEGKQGNFKNLREFVFKNIDGYFKIYSKHTPINLVRDLPQGFSALEPLVDLPIGINITRFQTLLALHRSYLTPGDSSSGWTAGAAAYYVGYLQPRTFLLKYNENGTITDAVDCALDPLSETKCTLKSFTVEKGIYQTSNFRVQPTESIVRFPNITNLCPFGEVFNATRFASVYAWNRKRISNCVADYSFLYNSASFSTFKCYGVSPTKLNDLCFTNVYADSFVIRGDEVRQIAPGQTGKIADYNYKLPDDFTGCVIAWNSNNLDSKVGGNYNYLYRLFRKSNLKPFERDISTEIYQAGSTPCNGVEGFNCYFPLQSYGFQPTNGVGYQPYRVVVLSFELLHAPATVCGPKKSTNLVKNKCVNFNFNGLTGTGVLTESNKKFLPFQQFGRDIADTTDAVRDPQTLEILDITPCSFGGVSVITPGTNTSNQVAVLYQDVNCTEVPVAIHADQLTPTWRVYSTGSNVFQTRAGCLIGAEHVNNSYECDIPIGAGICASYQTQTNSPRRARSVASQSIIAYTMSLGAENSVAYSNNSIAIPTNFTISVTTEILPVSMTKTSVDCTMYICGDSTECSNLLLQYGSFCTQLNRALTGIAVEQDKNTQEVFAQVKQIYKTPPIKDFGGFNFSQILPDPSKPSKRSFIEDLLFNKVTLADAGFIKQYGDCLGDIAARDLICAQKFNGLTVLPPLLTDEMIAQYCSALLAGTITSGWTFGAGAALQIPFAMQMAYRFNGIGVTQNVLYENQKLIANQFNSAIGKIQDSLSSTASALGKLQDVVNQNAQALNTLVKQLSSNFGAISSVLNDILSRLDKVEAEVQIDRLITGRLQSLQTYVTQQLIRAAEIRASANLAATKMSECVLGQSKRVDFCGKGYHLMSFPQCAPHGVVFLHVTYVPAQEKNFTTAPAICHDGKAHFPREGVFVSNGTHWFVTQRNFYEPQIITTDNTFVSGNCDVVIGIVNNTVYDPLQPELDSFKEELDKYFKNHTSPDVDLGDISGINASVVNIQKEIDRLNEVAKNLNESLIDLQELGKYEQYIKWPWYIWLGFIAGLIAIVMVTIMLCCMTSCCSCLKGCCSCGSCCKFDEDDSEPVLKGVKLHYT

SEQ ID NO: 1219 - protein, 1273 aa, Artificial Sequence
  SARS-CoV-2/Australia/VIC01/2020__EPI_ISL_406844 spike protein (1-1273)(T874C_S1055C)
MFVFLVLLPLVSSQCVNLTTRTQLPPAYTNSFTRGVYYPDKVFRSSVLHSTQDLFLPFFSNVTWFHAIHVSGTNGTKRFDNPVLPFNDGVYFASTEKSNIIRGWIFGTTLDSKTQSLLIVNNATNVVIKVCEFQFCNDPFLGVYYHKNNKSWMESEFRVYSSANNCTFEYVSQPFLMDLEGKQGNFKNLREFVFKNIDGYFKIYSKHTPINLVRDLPQGFSALEPLVDLPIGINITRFQTLLALHRRYLTPGDSSSGWTAGAAAYYVGYLQPRTFLLKYNENGTITDAVDCALDPLSETKCTLKSFTVEKGIYQTSNFRVQPTESIVRFPNITNLCPFGEVFNATRFASVYAWNRKRISNCVADYSVLYNSASFSTFKCYGVSPTKLNDLCFTNVYADSFVIRGDEVRQIAPGQTGKIADYNYKLPDDFTGCVIAWNSNNLDSKVGGNYNYLYRLFRKSNLKPFERDISTEIYQAGSTPCNGVEGFNCYFPLQSYGFQPTNGVGYQPYRVVVLSFELLHAPATVCGPKKSTNLVKNKCVNFNFNGLTGTGVLTESNKKFLPFQQFGRDIADTTDAVRDPQTLEILDITPCSFGGVSVITPGTNTSNQVAVLYQDVNCTEVPVAIHADQLTPTWRVYSTGSNVFQTRAGCLIGAEHVNNSYECDIPIGAGICASYQTQTNSPRRARSVASQSIIAYTMSLGAENSVAYSNNSIAIPTNFTISVTTEILPVSMTKTSVDCTMYICGDSTECSNLLLQYGSFCTQLNRALTGIAVEQDKNTQEVFAQVKQIYKTPPIKDFGGFNFSQILPDPSKPSKRSFIEDLLFNKVTLADAGFIKQYGDCLGDIAARDLICAQKFNGLTVLPPLLTDEMIAQYCSALLAGTITSGWTFGAGAALQIPFAMQMAYRFNGIGVTQNVLYENQKLIANQFNSAIGKIQDSLSSTASALGKLQDVVNQNAQALNTLVKQLSSNFGAISSVLNDILSRLDKVEAEVQIDRLITGRLQSLQTYVTQQLIRAAEIRASANLAATKMSECVLGQSKRVDFCGKGYHLMSFPQCAPHGVVFLHVTYVPAQEKNFTTAPAICHDGKAHFPREGVFVSNGTHWFVTQRNFYEPQIITTDNTFVSGNCDVVIGIVNNTVYDPLQPELDSFKEELDKYFKNHTSPDVDLGDISGINASVVNIQKEIDRLNEVAKNLNESLIDLQELGKYEQYIKWPWYIWLGFIAGLIAIVMVTIMLCCMTSCCSCLKGCCSCGSCCKFDEDDSEPVLKGVKLHYT

SEQ ID NO: 1220 - protein, 1273 aa, Artificial Sequence
  SARS-CoV-2/Germany/BavPat1/2020__EPI_ISL_406862 spike protein (1-1273)(T874C_S1055C)
MFVFLVLLPLVSSQCVNLTTRTQLPPAYTNSFTRGVYYPDKVFRSSVLHSTQDLFLPFFSNVTWFHAIHVSGTNGTKRFDNPVLPFNDGVYFASTEKSNIIRGWIFGTTLDSKTQSLLIVNNATNVVIKVCEFQFCNDPFLGVYYHKNNKSWMESEFRVYSSANNCTFEYVSQPFLMDLEGKQGNFKNLREFVFKNIDGYFKIYSKHTPINLVRDLPQGFSALEPLVDLPIGINITRFQTLLALHRSYLTPGDSSSGWTAGAAAYYVGYLQPRTFLLKYNENGTITDAVDCALDPLSETKCTLKSFTVEKGIYQTSNFRVQPTESIVRFPNITNLCPFGEVFNATRFASVYAWNRKRISNCVADYSVLYNSASFSTFKCYGVSPTKLNDLCFTNVYADSFVIRGDEVRQIAPGQTGKIADYNYKLPDDFTGCVIAWNSNNLDSKVGGNYNYLYRLFRKSNLKPFERDISTEIYQAGSTPCNGVEGFNCYFPLQSYGFQPTNGVGYQPYRVVVLSFELLHAPATVCGPKKSTNLVKNKCVNFNFNGLTGTGVLTESNKKFLPFQQFGRDIADTTDAVRDPQTLEILDITPCSFGGVSVITPGTNTSNQVAVLYQGVNCTEVPVAIHADQLTPTWRVYSTGSNVFQTRAGCLIGAEHVNNSYECDIPIGAGICASYQTQTNSPRRARSVASQSIIAYTMSLGAENSVAYSNNSIAIPTNFTISVTTEILPVSMTKTSVDCTMYICGDSTECSNLLLQYGSFCTQLNRALTGIAVEQDKNTQEVFAQVKQIYKTPPIKDFGGFNFSQILPDPSKPSKRSFIEDLLFNKVTLADAGFIKQYGDCLGDIAARDLICAQKFNGLTVLPPLLTDEMIAQYCSALLAGTITSGWTFGAGAALQIPFAMQMAYRFNGIGVTQNVLYENQKLIANQFNSAIGKIQDSLSSTASALGKLQDVVNQNAQALNTLVKQLSSNFGAISSVLNDILSRLDKVEAEVQIDRLITGRLQSLQTYVTQQLIRAAEIRASANLAATKMSECVLGQSKRVDFCGKGYHLMSFPQCAPHGVVFLHVTYVPAQEKNFTTAPAICHDGKAHFPREGVFVSNGTHWFVTQRNFYEPQIITTDNTFVSGNCDVVIGIVNNTVYDPLQPELDSFKEELDKYFKNHTSPDVDLGDISGINASVVNIQKEIDRLNEVAKNLNESLIDLQELGKYEQYIKWPWYIWLGFIAGLIAIVMVTIMLCCMTSCCSCLKGCCSCGSCCKFDEDDSEPVLKGVKLHYT

SEQ ID NO: 1221 - protein, 1273 aa, Artificial Sequence
  SARS-CoV-2/Wuhan/HBCDC-HB-02/2020__EPI_ISL_412978 spike protein (1-1273)(T874C_S1055C)
MFVFLVLLPLVSSQCVNLTTRTQLPPAYTNSFTRGVYYPDKVFRSSVLHSTQDLFLPFFSNVTWFHAIHVSGTNGTKRFDNPVLPFNDGVYFASTEKSNIIRGWIFGTTLDSKTQSLLIVNNATNVVIKVCEFQFCNDPFLGVYYHKNNKSWMESEFRVYSSANNCTFEYVSQPFLMDLEGKQGNFKNLREFVFKNIDGYFKIYSKHTPINLVRDLPQGFSALEPLVDLPIGINITRFQTLLALHRSYLTPGDSSSGWTAGAAAYYVGYLQPRTFLLKYNENGTITDAVDCALDPLSETKCTLKSFTVEKGIYQTSNFRVQPTESIVRFPNITNLCPFGEVFNATRFASVYAWNRKRISNCVADYSVLYNSASFSTFKCYGVSPTKLNDLCFTNVYADSFVIRGDEVRQIAPGQTGKIADYNYKLPDDFTGCVIAWNSNNLDSKVGGNYNYLYRLFRKSNLKPFERDISTEIYQAGSTPCNGVEGFNCYFPLQSYGFQPTNGVGYQPYRVVVLSFELLHAPATVCGPKKSTNLVKNKCVNFNFNGLTGTGVLTESNKKFLPFQQFGRDIADTTDAVRDPQTLEILDITPCSFGGVSVITPGTNTSNQVAVLYQDVNCTEVPVAIHADQLTPTWRVYSTGSNVFQTRAGCLIGAEHVNNSYECDIPIGAGICASYQTQTNSPRRARSVASQSIIAYTMSLGAENSVAYSNNSIAIPTNFTISVTTEILPVSMTKTSVDCTMYICGDSTECSNFLLQYGSFCTQLNRALTGIAVEQDKNTQEVFAQVKQIYKTPPIKDFGGFNFSQILPDPSKPSKRSFIEDLLFNKVTLADAGFIKQYGDCLGDIAARDLICAQKFNGLTVLPPLLTDEMIAQYCSALLAGTITSGWTFGAGAALQIPFAMQMAYRFNGIGVTQNVLYENQKLIANQFNSAIGKIQDSLSSTASALGKLQDVVNQNAQALNTLVKQLSSNFGAISSVLNDILSRLDKVEAEVQIDRLITGRLQSLQTYVTQQLIRAAEIRASANLAATKMSECVLGQSKRVDFCGKGYHLMSFPQCAPHGVVFLHVTYVPAQEKNFTTAPAICHDGKAHFPREGVFVSNGTHWFVTQRNFYEPQIITTDNTFVSGNCDVVIGIVNNTVYDPLQPELDSFKEELDKYFKNHTSPDVDLGDISGINASVVNIQKEIDRLNEVAKNLNESLIDLQELGKYEQYIKWPWYIWLGFIAGLIAIVMVTIMLCCMTSCCSCLKGCCSCGSCCKFDEDDSEPVLKGVKLHYT

SEQ ID NO: 1222 - protein, 1273 aa, Artificial Sequence
  SARS-CoV-2/Australia/QLD02/2020__EPI_ISL_407896 spike protein (1-1273)(T874C_S1055C)
MFVFLVLLPLVSSQCVNLTTRTQLPPAYTNSFTRGVYYPDKVFRSSVLHSTQDLFLPFFSNVTWFHAIHVSGTNGTKRFDNPVLPFNDGVYFASTEKSNIIRGWIFGTTLDSKTQSLLIVNNATNVVIKVCEFQFCNDPFLGVYYHKNNKSWMESEFRVYSSANNCTFEYVSQPFLMDLEGKQGNFKNLREFVFKNIDGYFKIYSKHTPINLVRDLPQGFSALEPLVDLPIGINITRFQTLLALHRSYLTPGDSSSGWTAGAAAYYVGYLQPRTFLLKYNENGTITDAVDCALDPLSETKCTLKSFTVEKGIYQTSNFRVQPTESIVRFPNITNLCPFGEVFNATRFASVYAWNRKRISNCVADYSVLYNSASFSTFKCYGVSPTKLNDLCFTNVYADSFVIRGDEVRQIAPGQTGKIADYNYKLPDDFTGCVIAWNSNNLDSKVGGNYNYLYRLFRKSNLKPFERDISTEIYQAGSTPCNGVEGFNCYFPLQSYGFQPTNGVGYQPYRVVVLSFELLHAPATVCGPKKSTNLVKNKCVNFNFNGLTGTGVLTESNKKFLPFQQFGRDIADTTDAVRDPQTLEILDITPCSFGGVSVITPGTNTSNQVAVLYQDVNCTEVPVAIHADQLTPTWRVYSTGSNVFQTRAGCLIGAEHVNNSYECDIPIGAGICASYQTQTNSPRRARSVASQSIIAYTMSLGAENSVAYSNNSIAIPTNFTISVTTEILPVSMTKTSVDCTMYICGDSTECSNLLLQYGSFCTQLNRALTGIAVEQDKNTQEVFAQVKQIYKTPPIKDFGGFNFSQILPDPSKPSKRSFIEDLLFNKVTLADAGFIKQYGDCLGDIAARDLICAQKFNGLTVLPPLLTDEMIAQYCSALLAGTITSGWTFGAGAALQIPFAMQMAYRFNGIGVTQNVLYENQKLIANQFNSAIGKIQDSLSSTASALGKLQDVVNQNAQALNTLVKQLSSNFGAISSVLNDILSRLDKVEAEVQIDRLITGRLQSLQTYVTQQLIRAAEIRASANLAATKMSECVLGQSKRVDFCGKGYHLMSFPQCAPHGVVFLHVTYVPAQEKNFTTAPAICHDGKAHFPREGVFVSNGTHWFVTQRNFYEPQIITTDNTFVSGNCDVVIGIVNNTVYDPLQLELDSFKEELDKYFKNHTSPDVDLGDISGINASVVNIQKEIDRLNEVAKNLNESLIDLQELGKYEQYIKWPWYIWLGFIAGLIAIVMVTIMLCCMTSCCSCLKGCCSCGSCCKFDEDDSEPVLKGVKLHYT

SEQ ID NO: 1223 - protein, 1273 aa, Artificial Sequence
  SARS-CoV-2/India/1-31/2020__EPI_ISL_413523 spike protein (1-1273)(T874C_S1055C)
MFVFLVLLPLVSSQCVNLTTRTQLPPAYTNSFTRGVYYPDKVFRSSVLHSTQDLFLPFFSNVTWFHAIHVSGTNGTKRFDNPVLPFNDGVYFASTEKSNIIRGWIFGTTLDSKTQSLLIVNNATNVVIKVCEFQFCNDPFLGVYYHKNNKSWMESEFRVYSSANNCTFEYVSQPFLMDLEGKQGNFKNLREFVFKNIDGYFKIYSKHTPINLVRDLPQGFSALEPLVDLPIGINITRFQTLLALHRSYLTPGDSSSGWTAGAAAYYVGYLQPRTFLLKYNENGTITDAVDCALDPLSETKCTLKSFTVEKGIYQTSNFRVQPTESIVRFPNITNLCPFGEVFNATRFASVYAWNRKRISNCVADYSVLYNSASFSTFKCYGVSPTKLNDLCFTNVYADSFVIRGDEVRQIAPGQTGKIADYNYKLPDDFTGCVIAWNSNNLDSKVGGNYNYLYRLFRKSNLKPFERDISTEIYQAGSTPCNGVEGFNCYFPLQSYGFQPTNGVGYQPYRVVVLSFELLHAPATVCGPKKSTNLVKNKCVNFNFNGLTGTGVLTESNKKFLPFQQFGRDIADTTDAVRDPQTLEILDITPCSFGGVSVITPGTNTSNQVAVLYQDVNCTEVPVAIHADQLTPTWRVYSTGSNVFQTRAGCLIGAEHVNNSYECDIPIGAGICASYQTQTNSPRRARSVASQSIIAYTMSLGAENSVAYSNNSIAIPTNFTISVTTEILPVSMTKTSVDCTMYICGDSTECSNLLLQYGSFCTQLNRALTGIAVEQDKNTQEVFAQVKQIYKTPPIKDFGGFNFSQILPDPSKPSKRSFIEDLLFNKVTLADAGFIKQYGDCLGDIAARDLICAQKFNGLTVLPPLLTDEMIAQYCSALLAGTITSGWTFGAGAALQIPFAMQMAYRFNGIGVTQNVLYENQKLIANQFNSVIGKIQDSLSSTASALGKLQDVVNQNAQALNTLVKQLSSNFGAISSVLNDILSRLDKVEAEVQIDRLITGRLQSLQTYVTQQLIRAAEIRASANLAATKMSECVLGQSKRVDFCGKGYHLMSFPQCAPHGVVFLHVTYVPAQEKNFTTAPAICHDGKAHFPREGVFVSNGTHWFVTQRNFYEPQIITTDNTFVSGNCDVVIGIVNNTVYDPLQPELDSFKEELDKYFKNHTSPDVDLGDISGINASVVNIQKEIDRLNEVAKNLNESLIDLQELGKYEQYIKWPWYIWLGFIAGLIAIVMVTIMLCCMTSCCSCLKGCCSCGSCCKFDEDDSEPVLKGVKLHYT

SEQ ID NO: 1224 - protein, 1273 aa, Artificial Sequence
  SARS-CoV-2/Guangdong/GD2020087-P0008/2020__EPI_ISL_413863 spike protein (1-1273)(T874C_S1055C)
MFVFLVLLPLVSSQCVNLTTRTQLPPAYTNSFTRGVYYPDKVFRSSVLHSTQDLFLPFFSNVTWFHAIHVSGTNGTKRFDNPVLPFNDGVYFASTEKSNIIRGWIFGTTLDSKTQSLLIVNNATNVVIKVCEFQFCNDPFLGVYYHKNNKSWMESEFRVYSSANNCTFEYVSQPFLMDLEGKQGNFKNLREFVFKNIDGYFKIYSKHTPINLVRDLPQGFSALEPLVDLPIGINITRFQTLLALHRSYLTPGDSSSGWTAGAAAYYVGYLQPRTFLLKYNENGTITDAVDCALDPLSETKCTLKSFTVEKGIYQTSNFRVQPTESIVRFPNITNLCPFGEVFNATRFASVYAWNRKRISNCVADYSVLYNSASFSTFKCYGVSPTKLNDLCFTNVYADSFVIRGDEVREIAPGQTGKIADYNYKLPDDFTGCVIAWNSNNLDSKVGGNYNYLYRLFRKSNLKPFERDISTEIYQAGSTPCNGVEGFNCYFPLQSYGFQPTNGVGYQPYRVVVLSFELLHAPATVCGPKKSTNLVKNKCVNFNFNGLTGTGVLTESNKKFLPFQQFGRDIADTTDAVRDPQTLEILDITPCSFGGVSVITPGTNTSNQVAVLYQDVNCTEVPVAIHADQLTPTWRVYSTGSNVFQTRAGCLIGAEHVNNSYECDIPIGAGICASYQTQTNSPRRARSVASQSIIAYTMSLGAENSVAYSNNSIAIPTNFTISVTTEILPVSMTKTSVDCTMYICGDSTECSNLLLQYGSFCTQLNRALTGIAVEQDKNTQEVFAQVKQIYKTPPIKDFGGFNFSQILPDPSKPSKRSFIEDLLFNKVTLADAGFIKQYGDCLGDIAARDLICAQKFNGLTVLPPLLTDEMIAQYCSALLAGTITSGWTFGAGAALQIPFAMQMAYRFNGIGVTQNVLYENQKLIANQFNSAIGKIQDSLSSTASALGKLQDVVNQNAQALNTLVKQLSSNFGAISSVLNDILSRLDKVEAEVQIDRLITGRLQSLQTYVTQQLIRAAEIRASANLAATKMSECVLGQSKRVDFCGKGYHLMSFPQCAPHGVVFLHVTYVPAQEKNFTTAPAICHDGKAHFPREGVFVSNGTHWFVTQRNFYEPQIITTDNTFVSGNCDVVIGIVNNTVYDPLQPELDSFKEELDKYFKNHTSPDVDLGDISGINASVVNIQKEIDRLNEVAKNLNESLIDLQELGKYEQYIKWPWYIWLGFIAGLIAIVMVTIMLCCMTSCCSCLKGCCSCGSCCKFDEDDSEPVLKGVKLHYT

SEQ ID NO: 1225 - protein, 1273 aa, Artificial Sequence
  SARS-CoV-2/Sweden/01/2020__EPI_ISL_411951 spike protein (1-1273)(T874C_S1055C)
MFVFLVLLPLVSSQCVNLTTRTQLPPAYTNSFTRGVYYPDKVFRSSVLHSTQDLFLPFFSNVTWFHAIHVSGTNGTKRFDNPVLPFNDGVYFASTEKSNIIRGWIFGTTLDSKTQSLLIVNNATNVVIKVCEFQFCNDPFLGVYYHKNNKSWMESEFRVYSSANNCTFEYVSQPFLMDLEGKQGNFKNLREFVFKNIDGYFKIYSKHTPINLVRDLPQGFSALEPLVDLPIGINITRFQTLLALHRSYLTPGDSSSGWTAGAAAYYVGYLQPRTFLLKYNENGTITDAVDCALDPLSETKCTLKSFTVEKGIYQTSNFRVQPTESIVRFPNITNLCPFGEVFNATRFASVYAWNRKRISNCVADYSVLYNSASFSTFKCYGVSPTKLNDLCFTNVYADSFVIRGDEVRQIAPGQTGKIADYNYKLPDDFTGCVIAWNSNNLDSKVGGNYNYLYRLFRKSNLKPFERDISTEIYQAGSTPCNGVEGFNCYFPLQSYGFQPTNGVGYQPYRVVVLSFELLHAPATVCGPKKSTNLVKNKCVNFNFNGLTGTGVLTESNKKFLPFQQFGRDIADTTDAVRDPQTLEILDITPCSFGGVSVITPGTNTSNQVAVLYQDVNCTEVPVAIHADQLTPTWRVYSTGSNVFQTRAGCLIGAEHVNNSYECDIPIGAGICASYQTQTNSPRRARSVASQSIIAYTMSLGAENSVAYSNNSIAIPTNFTISVTTEILPVSMTKTSVDCTMYICGDSTECSNLLLQYGSFCTQLNRALTGIAVEQDKNTQEVFAQVKQIYKTPPIKDCGGFNFSQILPDPSKPSKRSFIEDLLFNKVTLADAGFIKQYGDCLGDIAARDLICAQKFNGLTVLPPLLTDEMIAQYCSALLAGTITSGWTFGAGAALQIPFAMQMAYRFNGIGVTQNVLYENQKLIANQFNSAIGKIQDSLSSTASALGKLQDVVNQNAQALNTLVKQLSSNFGAISSVLNDILSRLDKVEAEVQIDRLITGRLQSLQTYVTQQLIRAAEIRASANLAATKMSECVLGQSKRVDFCGKGYHLMSFPQCAPHGVVFLHVTYVPAQEKNFTTAPAICHDGKAHFPREGVFVSNGTHWFVTQRNFYEPQIITTDNTFVSGNCDVVIGIVNNTVYDPLQPELDSFKEELDKYFKNHTSPDVDLGDISGINASVVNIQKEIDRLNEVAKNLNESLIDLQELGKYEQYIKWPWYIWLGFIAGLIAIVMVTIMLCCMTSCCSCLKGCCSCGSCCKFDEDDSEPVLKGVKLHYT

SEQ ID NO: 1226 - protein, 1273 aa, Artificial Sequence
  SARS-CoV-2/Tianmen/HBCDC-HB-07/2020__EPI_ISL_412983 spike protein (1-1273)(T874C_S1055C)
MFVFLVLLPLVSSQCVNLTTRTQLPPAYTNSFTRGVYYPDKVFRSSVLHSTQDLFLPFFSNVTWFHAIHVSGTNGTKRFDNPVLPFNDGVYFASTEKSNIIRGWIFGTTLDSKTQSLLIVNNATNVVIKVCEFQFCNDPFLGVYYHKNNKSWMESEFRVYSSANNCTFEYVSQPFLMDLEGKQGNFKNLREFVFKNIDGYFKIYSKHTPINLVRDLPQGFSALEPLVDLPIGINITRFQTLLALHRSYLTPGDSSSGWTAGAAAYYVGYLQPRTFLLKYNENGTITDAVDCALDPLSETKCTLKSFTVEKGIYQTSNFRVQPTESIVRFPNITNLCPFGEVFNATRFASVYAWNRKRISNCVADYSVLYNSASFSTFKCYGVSPTKLNDLCFTNVYADSFVIRGDEVRQIAPGQTGKIADYNYKLPDDFTGCVIAWNSNNLDSKVGGNYNYLYRLFRKSNLKPFERDISTEIYQAGSTPCNGVEGFNCYFPLQSYGFQPTNGVGYQPYRVVVLSFELLHAPATVCGPKKSTNLVKNKCVNFNFNGLTGTGVLTESNKKFLPFQQFGRDIADTTDAVRDPQTLEILDITPCSFGGVSVITPGTNTSNQVAVLYQDLNCTEVPVAIHADQLTPTWRVYSTGSNVFQTRAGCLIGAEHVNNSYECDIPIGAGICASYQTQTNSPRRARSVASQSIIAYTMSLGAENSVAYSNNSIAIPTNFTISVTTEILPVSMTKTSVDCTMYICGDSTECSNLLLQYGSFCTQLNRALTGIAVEQDKNTQEVFAQVKQIYKTPPIKDFGGFNFSQILPDPSKPSKRSFIEDLLFNKVTLADAGFIKQYGDCLGDIAARDLICAQKFNGLTVLPPLLTDEMIAQYCSALLAGTITSGWTFGAGAALQIPFAMQMAYRFNGIGVTQNVLYENQKLIANQFNSAIGKIQDSLSSTASALGKLQDVVNQNAQALNTLVKQLSSNFGAISSVLNDILSRLDKVEAEVQIDRLITGRLQSLQTYVTQQLIRAAEIRASANLAATKMSECVLGQSKRVDFCGKGYHLMSFPQCAPHGVVFLHVTYVPAQEKNFTTAPAICHDGKAHFPREGVFVSNGTHWFVTQRNFYEPQIITTDNTFVSGNCDVVIGIVNNTVYDPLQPELDSFKEELDKYFKNHTSPDVDLGDISGINASVVNIQKEIDRLNEVAKNLNESLIDLQELGKYEQYIKWPWYIWLGFIAGLIAIVMVTIMLCCMTSCCSCLKGCCSCGSCCKFDEDDSEPVLKGVKLHYT

SEQ ID NO: 1227 - protein, 1273 aa, Artificial Sequence
  SARS-CoV-2/Hong Kong/case42_VM20002493/2020__EPI_ISL_414527 spike protein (1-1273)(T874C_S1055C)
MFVFLVLLPLVSSQCVNLTTRTQLPPAYTNSFTRGVYYPDKVFRSSVLHSTQDLFLPFFSNVTWFHAIHVSGTNGTKRFDNPVLPFNDGVYFASTEKSNIIRGWIFGTTLDSKTQSLLIVNNATNVVIKVCEFQFCNDPFLGVYYHKNNKSWMESEFRVYSSANNCTFEYVSQPFLMDLEGKQGNFKNLREFVFKNIDGYFKIYSKHTPINLVRDLPQGFSALEPLVDLPIGINITRFQTLLALHRSYLTPGDSSSGWTAGAAAYYVGYLQPRTFLLKYNENGTITDAVDCALDPLSETKCTLKSFTVEKGIYQTSNFRVQPTESIVRFPNITNLCPFGEVFNATRFASVYAWNRKRISNCVADYSVLYNSASFSTFKCYGVSPTKLNDLCFTNVYADSFVIRGDEVRQIAPGQTGKIADYNYKLPDDFTGCVIAWNSNNLDSKVGGNYNYLYRLFRKSNLKPFERDISTEIYQAGSTPCNGVEGFNCYFPLQSYGFQPTNGVGYQPYRVVVLSFELLHAPATVCGPKKSTNLVKNKCVNFNFNGLTGTGVLTESNKKFLPFQQFGRDIADTTDAVRDPQTLEILDITPCSFGGVSVITPGTNTSNQVAVLYQDVNCTEVPVAIHADQLTPTWRVYSTGSNVFQTRAGCLIGAEHVNNSYECDIPIGAGICASYQTQTNSPRRARSVASQSIIAYTMSLGAENSVAYSNNSIAIPTNFAISVTTEILPVSMTKTSVDCTMYICGDSTECSNLLLQYGSFCTQLNRALTGIAVEQDKNTQEVFAQVKQIYKTPPIKDFGGFNFSQILPDPSKPSKRSFIEDLLFNKVTLADAGFIKQYGDCLGDIAARDLICAQKFNGLTVLPPLLTDEMIAQYCSALLAGTITSGWTFGAGAALQIPFAMQMAYRFNGIGVTQNVLYENQKLIANQFNSAIGKIQDSLSSTASALGKLQDVVNQNAQALNTLVKQLSSNFGAISSVLNDILSRLDKVEAEVQIDRLITGRLQSLQTYVTQQLIRAAEIRASANLAATKMSECVLGQSKRVDFCGKGYHLMSFPQCAPHGVVFLHVTYVPAQEKNFTTAPAICHDGKAHFPREGVFVSNGTHWFVTQRNFYEPQIITTDNTFVSGNCDVVIGIVNNTVYDPLQPELDSFKEELDKYFKNHTSPDVDLGDISGINASVVNIQKEIDRLNEVAKNLNESLIDLQELGKYEQYIKWPWYIWLGFIAGLIAIVMVTIMLCCMTSCCSCLKGCCSCGSCCKFDEDDSEPVLKGVKLHYT

SEQ ID NO: 1228 - protein, 1273 aa, Artificial Sequence
  SARS-CoV-2/USA/CruiseA-23/2020__EPI_ISL_414482 spike protein (1-1273)(T874C_S1055C)
MFVFLVLLPLVSSQCVNLTTRTQLPPAYTNSFTRGVYYPDKVFRSSVLHSTQDLFLPFFSNVTWFHAIHVSGTNGTKRFDNPVLPFNDGVYFASTEKSNIIRGWIFGTTLDSKTQSLLIVNNATNVVIKVCEFQFCNDPFLGVYYHKNNKSWMESEFRVYSSANNCTFEYVSQPFLMDLEVKQGNFKNLREFVFKNIDGYFKIYSKHTPINLVRDLPQGFSALEPLVDLPIGINITRFQTLLALHRSYLTPGDSSSGWTAGAAAYYVGYLQPRTFLLKYNENGTITDAVDCALDPLSETKCTLKSFTVEKGIYQTSNFRVQPTESIVRFPNITNLCPFGEVFNATRFASVYAWNRKRISNCVADYSVLYNSASFSTFKCYGVSPTKLNDLCFTNVYADSFVIRGDEVRQIAPGQTGKIADYNYKLPDDFTGCVIAWNSNNLDSKVGGNYNYLYRLFRKSNLKPFERDISTEIYQAGSTPCNGVEGFNCYFPLQSYGFQPTNGVGYQPYRVVVLSFELLHAPATVCGPKKSTNLVKNKCVNFNFNGLTGTGVLTESNKKFLPFQQFGRDIADTTDAVRDPQTLEILDITPCSFGGVSVITPGTNTSNQVAVLYQDVNCTEVPVAIHADQLTPTWRVYSTGSNVFQTRAGCLIGAEHVNNSYECDIPIGAGICASYQTQTNSPRRARSVASQSIIAYTMSLGAENSVAYSNNSIAIPTNFTISVTTEILPVSMTKTSVDCTMYICGDSTECSNLLLQYGSFCTQLNRALTGIAVEQDKNTQEVFAQVKQIYKTPPIKDFGGFNFSQILPDPSKPSKRSFIEDLLFNKVTLADAGFIKQYGDCLGDIAARDLICAQKFNGLTVLPPLLTDEMIAQYCSALLAGTITSGWTFGAGAALQIPFAMQMAYRFNGIGVTQNVLYENQKLIANQFNSAIGKIQDSLSSTASALGKLQDVVNQNAQALNTLVKQLSSNFGAISSVLNDILSRLDKVEAEVQIDRLITGRLQSLQTYVTQQLIRAAEIRASANLAATKMSECVLGQSKRVDFCGKGYHLMSFPQCAPHGVVFLHVTYVPAQEKNFTTAPAICHDGKAHFPREGVFVSNGTHWFVTQRNFYEPQIITTDNTFVSGNCDVVIGIVNNTVYDPLQPELDSFKEELDKYFKNHTSPDVDLGDISGINASVVNIQKEIDRLNEVAKNLNESLIDLQELGKYEQYIKWPWYIWLGFIAGLIAIVMVTIMLCCMTSCCSCLKGCCSCGSCCKFDEDDSEPVLKGVKLHYT

SEQ ID NO: 1229 - protein, 1273 aa, Artificial Sequence
  SARS-CoV-2/Hong Kong/case85_VM20002868/2020__EPI_ISL_414519 spike protein (1-1273)(T874C_S1055C)
MFVFLVLVPLVSSQCVNLTTRTQLPPAYTNSFTRGVYYPDKVFRSSVLHSTQDLFLPFFSNVTWFHAIHVSGTNGTKRFDNPVLPFNDGVYFASTEKSNIIRGWIFGTTLDSKTQSLLIVNNATNVVIKVCEFQFCNDPFLGVYYHKNNKSWMESEFRVYSSANNCTFEYVSQPFLMDLEGKQGNFKNLREFVFKNIDGYFKIYSKHTPINLVRDLPQGFSALEPLVDLPIGINITRFQTLLALHRSYLTPGDSSSGWTAGAAAYYVGYLQPRTFLLKYNENGTITDAVDCALDPLSETKCTLKSFTVEKGIYQTSNFRVQPTESIVRFPNITNLCPFGEVFNATRFASVYAWNRKRISNCVADYSVLYNSASFSTFKCYGVSPTKLNDLCFTNVYADSFVIRGDEVRQIAPGQTGKIADYNYKLPDDFTGCVIAWNSNNLDSKVGGNYNYLYRLFRKSNLKPFERDISTEIYQAGSTPCNGVEGFNCYFPLQSYGFQPTNGVGYQPYRVVVLSFELLHAPATVCGPKKSTNLVKNKCVNFNFNGLTGTGVLTESNKKFLPFQQFGRDIADTTDAVRDPQTLEILDITPCSFGGVSVITPGTNTSNQVAVLYQDVNCTEVPVAIHADQLTPTWRVYSTGSNVFQTRAGCLIGAEHVNNSYECDIPIGAGICASYQTQTNSPRRARSVASQSIIAYTMSLGAENSVAYSNNSIAIPTNFTISVTTEILPVSMTKTSVDCTMYICGDSTECSNLLLQYGSFCTQLNRALTGIAVEQDKNTQEVFAQVKQIYKTPPIKDFGGFNFSQILPDPSKPSKRSFIEDLLFNKVTLADAGFIKQYGDCLGDIAARDLICAQKFNGLTVLPPLLTDEMIAQYCSALLAGTITSGWTFGAGAALQIPFAMQMAYRFNGIGVTQNVLYENQKLIANQFNSAIGKIQDSLSSTASALGKLQDVVNQNAQALNTLVKQLSSNFGAISSVLNDILSRLDKVEAEVQIDRLITGRLQSLQTYVTQQLIRAAEIRASANLAATKMSECVLGQSKRVDFCGKGYHLMSFPQCAPHGVVFLHVTYVPAQEKNFTTAPAICHDGKAHFPREGVFVSNGTHWFVTQRNFYEPQIITTDNTFVSGNCDVVIGIVNNTVYDPLQPELDSFKEELDKYFKNHTSPDVDLGDISGINASVVNIQKEIDRLNEVAKNLNESLIDLQELGKYEQYIKWPWYIWLGFIAGLIAIVMVTIMLCCMTSCCSCLKGCCSCGSCCKFDEDDSEPVLKGVKLHYT

SEQ ID NO: 1230 - protein, 1273 aa, Artificial Sequence
  SARS-CoV-2/England/200990660/2020__EPI_ISL_414523 spike protein (1-1273)(T874C_S1055C)
MFVFLVLLPLVSSQCVNLTTRTQLPPAYTNSFTRGVYYPDKVFRSSVLHSTQDLFLPFFSNVTWFHAIHVSGTNGTKRFDNPVLPFNDGVYFASTEKSNIIRGWIFGTTLDSKTQSLLIVNNATNVVIKVCEFQFCNDPFLGVYYHKNNKSWMESEFRVYSSANNCTFEYVSQPFLMDLEGKQGNFKNLREFVFKNIDGYFKIYSKHTPINLVRDLPQGFSALEPLVDLPIGINITRFQTLLALHRSYLTPGDSSSGWTAGAAAYYVGYLQPRTFLLKYNENGTITDAVDCALDPLSETKCTLKSFTVEKGIYQTSNFRVQPTESIVRFPNITNLCPFGEVFNATRFASVYAWNRKRISNCVADYSVLYNSASFSTFKCYGVSPTKLNDLCFTNVYADSFVIRGDEVRQIAPGQTGKIADYNYKLPDDFTGCVIAWNSNNLDSKVGGNYNYLYRLFRKSNLKPFERDISTEIYQAGSTPCNGVEGFNCYFPLQSYGFQPTNGVGYQPYRVVVLSFELLHAPATVCGPKKSTNLVKNKCVNFNFNGLTGTGVLTESNKKFLPFQQFGRDIADTTDAVRDPQTLEILDITPCSFGGVSVITPGTNTSNQVAVLYQGVNCTEVPVAIHADQLTPTWRVYSTGSNVFQTRAGCLIGAEHVNNSYECDIPIGAGICASYQTQTNSPRRARSVASQSIIAYTMSLGAENSVAYSNNSIAIPTNFTISVTTEILPVSMTKTSVDCTMYICGDSTECSNLLLQYGSFCTQLNRALTGIAVEQDKNTQEVFAQVKQIYKTPPIKDFGGFNFSQILPDPSKPSKRSFIEDLLFNKVTLADAGFIKQYGDCLGDIAARDLICAQKFNGLTVLPPLLTDEMIAQYCSALLAGTITSGWTFGAGAALQIPFAMQMAYRFNGIGVTQNVLYENQKLIANQFNSAIGKIQDSLSSTASALGKLQDVVNQNAQALNTLVKQLSSNFGAISSVLNDILSRLDKVEAEVQIDRLITGRLQSLQTYVTQQLIRAAEIRASANLAATKMSECVLGQSKRVDFCGKGYHLMSFPQCAPHGVVFLHVTYVPAQEKNFTTAPAICHDGKAHFPREGVFVSNGTHWFVTQRNFYEPQIITTDNTFVSGNCDVVIGIVNNTVYDPLQPELDSFKEELDKYFKNHTSPDVDLGDISGINASVVNIQKEIDRLNEVAKNLNESLIDLQELGKYEQYIKWPWYIWLGFIAGLIAIVMVTIMLCCMTSCCSCLKGCCSCGSCCKFDEDDSELVLKGVKLHYT

SEQ ID NO: 1231 - protein, 1273 aa, Artificial Sequence
  SARS-CoV-2/Australia/NSW09/2020__EPI_ISL_413595 spike protein (1-1273)(T874C_S1055C)
MFVFLVLLPLVSSQCVNLTTRTQLPPAYTNSFTRGVYYPDKVFRSSVLHSTQDLFLPFFSNVTWFHAIHVSGTNGTKRFDNPVLPFNDGVYFASTEKSNIIRGWIFGTTLDSKTQSLLIVNNATNVVIKVCEFQFCNDPFLGVYYHKNNKSWMESEFRVYSSANNCTFEYVSQPFLMDLEGKQGNFKNLREFVFKNIDGYFKIYSKHTPINLVRDLPQGFSALEPLVDLPIGINITRFQTLLALHRSYLTPGDSSSGWTAGAAAYYVGYLQPRTFLLKYNENGTITDAVDCALDPLSETKCTLKSFTVEKGIYQTSNFRVQPTESIVRFPNITNLCPFGEVFNATRFASVYAWNRKRISNCVADYSVLYNSASFSTFKCYGVSPTKLNDLCFTNVYADSFVIRGDEVRQIAPGQTGKIADYNYKLPDDFTGCVIAWNSNNLDSKVGGNYNYLYRLFRKSNLKPFERDISTEIYQAGSTPCNGVEGFNCYFPLQSYGFQPTNGVGYQPYRVVVLSFELLHAPATVCGPKKSTNLVKNKCVNFNFNGLTGTGVLTESNKKFLPFQQFGRDIADTTDAVRDPQTLEILDITPCSFGGVSVITPGTNTSNQVAVLYQDVNCTEVPVAIHADQLTPTWRVYSTGSNVFQTRAGCLIGAEHVNNSYECDIPIGAGICASYQTQTNSPRRARSVASQSIIAYTMSLGAENSVAYSNNSIAIPTNFTISVTTEILPVSMTKTSVDCTMYICGDSTECSNLLLQYGSFCTQLNRALTGIAVEQDKNTQEVFAQVKQIYKTPPIKDFGGFNFSQILPDPSKPSKRSFIEDLLFNKVTLADAGFIKQYGDCLGDIAARDLICAQKFNGLTVLPPLLTDEMIAQYCSALLAGTITSGWTFGAGAALQIPFAMQMAYRFNGIGVTQNVLYENQKLIANQFNSAIGKIQDSLSFTASALGKLQDVVNQNAQALNTLVKQLSSNFGAISSVLNDILSRLDKVEAEVQIDRLITGRLQSLQTYVTQQLIRAAEIRASANLAATKMSECVLGQSKRVDFCGKGYHLMSFPQCAPHGVVFLHVTYVPAQEKNFTTAPAICHDGKAHFPREGVFVSNGTHWFVTQRNFYEPQIITTDNTFVSGNCDVVIGIVNNTVYDPLQPELDSFKEELDKYFKNHTSPDVDLGDISGINASVVNIQKEIDRLNEVAKNLNESLIDLQELGKYEQYIKWPWYIWLGFIAGLIAIVMVTIMLCCMTSCCSCLKGCCSCGSCCKFDEDDSEPVLKGVKLHYT

SEQ ID NO: 1232 - protein, 1273 aa, Artificial Sequence
  SARS-CoV-2/Australia/NSW10/2020__EPI_ISL_413596 spike protein (1-1273)(T874C_S1055C)
MFVFLVLLPLVSSQCVNLTTRTQLPPAYTNSFTRGVYYPDKVFRSSVLHSTQDLFLPFFSNVTWFHAIHVSGTNGTKRFDNPVLPFNDGVYFASTEKSNIIRGWIFGTTLDSKTQSLLIVNNATNVVIKVCEFQFCNDPFLGVYYHKNNKSWMESEFRVYSSANNCTFEYVSQPFLMDLEGKQGNFKNLREFVFKNIDGYFKIYSKHTPINLVRDLPQGFSALEPLVDLPIGINITRFQTLLALHRSYLTPGDSSSGWTAGAAAYYVGYLQPRTFLLKYNENGTITDAVDCALDPLSETKCTLKSFTVEKGIYQTSNFRVQPTESIVRFPNITNLCPFGEVFNATRFASVYAWNRKRISNCVADYSVLYNSASFSTFKCYGVSPTKLNDLCFTNVYADSFVIRGDEVRQIAPGQTGKIADYNYKLPDDFTGCVIAWNSNNLDSKVGGNYNYLYRLFRKSNLKPFERDISTEIYQAGSTPCNGVEGFNCYFPLQSYGFQPTNGVGYQPYRVVVLSFELLHAPATVCGPKKSTNLVKNKCVNFNFNGLTGTGVLTESNKKFLPFQQFGRDIADTTDAVRDPQTLEILDITPCSFGGVSVITPGTNTSNQVAVLYQDVNCTEVPVAIHADQLTPTWRVYSTGSNVFQTRAGCLIGAEHVNNSYECDIPIGAGICASYQTQTNSPRRARSVASQSIIAYTMSLGAENSVAYSNNSIAIPTNFTISVTTEILPVSMTKTSVDCTMYICGDSTECSNLLLQYGSFCTQLNRALTGIAVEQDKNTQEVFAQVKQIYKTPPIKDFGGFNFSQILPDPSKPSKRSFIEDLLFNKVTLADAGFIKQYGDCLGDIAARDLICAQKFNGLTVLPPLLTDEMIAQYCSALLAGTITSGWTFGAGAALQIPFAMQMAYRFNGIGVTQNVLYENQKLIANQFNSAIGKIQDSLSSTASALGKLQDVVNQNAQALNTLVKQLSSNFGAISSVLNDILSRLDKVEAEVQIDRLITGRLQSLQTYVTQQLIRAAEIRASANLAATKMSECVLGQSKRVDFCGKGYHLMSFPQCAPHGVVFLHVTYVPAQEKNFTTAPAICHDGKAHFPREGVFVSNGTHWFVTQRNFYEPQIITTDNTFVSGNCDVVIGIVNNTVYDPLQPELDSFKEELDKYFKNHTSPDVDLGDISGINASVVNIQKEIDRLNEVAKNLNESLIDLQELGKYEQYIKWPWYIWLGFIAGLIAIVMVTIMLCCMTSCCSCLKGCCSCGSCFKFDEDDSEPVLKGVKLHYT

SEQ ID NO: 1233 - protein, 1273 aa, Artificial Sequence
  SARS-CoV-2/Switzerland/1000477797/2020__EPI_ISL_413023 spike protein (1-1273)(T874C_S1055C)
MFVFLVLLPLVSSQCVNLTTRTQLPPAYTNSFTRGVYYPDKVFRSSVLHSTQDLFLPFFSNVTWFHAIHVSGTNGTKRFDNPVLPFNDGVYFASTEKSNIIRGWIFGTTLDSKTQSLLIVNNATNVVIKVCEFQFCNDPFLGVYYHKNNKSWMESEFRVYSSANNCTFEYVSQPFLMDLEGKQGNFKNLREFVFKNIDGYFNIYSKHTPINLVRDLPQGFSALEPLVDLPIGINITRFQTLLALHRSYLTPGDSSSGWTAGAAAYYVGYLQPRTFLLKYNENGTITDAVDCALDPLSETKCTLKSFTVEKGIYQTSNFRVQPTESIVRFPNITNLCPFGEVFNATRFASVYAWNRKRISNCVADYSVLYNSASFSTFKCYGVSPTKLNDLCFTNVYADSFVIRGDEVRQIAPGQTGKIADYNYKLPDDFTGCVIAWNSNNLDSKVGGNYNYLYRLFRKSNLKPFERDISTEIYQAGSTPCNGVEGFNCYFPLQSYGFQPTNGVGYQPYRVVVLSFELLHAPATVCGPKKSTNLVKNKCVNFNFNGLTGTGVLTESNKKFLPFQQFGRDIADTTDAVRDPQTLEILDITPCSFGGVSVITPGTNTSNQVAVLYQGVNCTEVPVAIHADQLTPTWRVYSTGSNVFQTRAGCLIGAEHVNNSYECDIPIGAGICASYQTQTNSPRRARSVASQSIIAYTMSLGAENSVAYSNNSIAIPTNFTISVTTEILPVSMTKTSVDCTMYICGDSTECSNLLLQYGSFCTQLNRALTGIAVEQDKNTQEVFAQVKQIYKTPPIKDFGGFNFSQILPDPSKPSKRSFIEDLLFNKVTLADAGFIKQYGDCLGDIAARDLICAQKFNGLTVLPPLLTDEMIAQYCSALLAGTITSGWTFGAGAALQIPFAMQMAYRFNGIGVTQNVLYENQKLIANQFNSAIGKIQDSLSSTASALGKLQDVVNQNAQALNTLVKQLSSNFGAISSVLNDILSRLDKVEAEVQIDRLITGRLQSLQTYVTQQLIRAAEIRASANLAATKMSECVLGQSKRVDFCGKGYHLMSFPQCAPHGVVFLHVTYVPAQEKNFTTAPAICHDGKAHFPREGVFVSNGTHWFVTQRNFYEPQIITTDNTFVSGNCDVVIGIVNNTVYDPLQPELDSFKEELDKYFKNHTSPDVDLGDISGINASVVNIQKEIDRLNEVAKNLNESLIDLQELGKYEQYIKWPWYIWLGFIAGLIAIVMVTIMLCCMTSCCSCLKGCCSCGSCCKFDEDDSEPVLKGVKLHYT

SEQ ID NO: 1234 - protein, 1273 aa, Artificial Sequence
  SARS-CoV-2/Belgium/BA-02291/2020__EPI_ISL_415159 spike protein (1-1273)(T874C_S1055C)
MFVFLVLLPLVSSQCVNLTTRTQLPPAYTNSFTRGVYYPDKVFRSSVLHSTQDLFLPFFSNVTWFHAIHVSGTNGTKRFDNPVLPFNDGVYFASTEKSNIIRGWIFGTTLDSKTQSLLIVNNATNVVIKVCEFQFCNDPFLGVYYHKNNKSWMESEFRVYSSANNCTFEYVSQPFLMDLEGKQGNFKNLREFVFKNIDGYFKIYSKHTPINLVRDLPQGFSALEPLVDLPIGINITRFQTLLALHRSYLTPGDSSSGWTAGAAAYYVGYLQPRTFLLKYNENGTITDAVDCALDPLSETKCTLKSFTVEKGIYQTSNFRVQPTESIVRFPNITNLCPFGEVFNATRFASVYAWNRKRISNCVADYSVLYNSASFSTFKCYGVSPTKLNDLCFTNVYADSFVIRGDEVRQIAPGQTGKIADYNYKLPDDFTGCVIAWNSNNLDSKVGGNYNYLYRLFRRSNLKPFERDISTEIYQAGSTPCNGVEGFNCYFPLQSYGFQPTNGVGYQPYRVVVLSFELLPAPATVCGPKKSTNLVKNKCVNFNFNGLTGTGVLTESNKKFLPFQQFGRDIADTTDAVRDPQTLEILDITPCSFGGVSVITPGTNTSNQVAVLYQGVNCTEVPVAIHADQLTPTWRVYSTGSNVFQTRAGCLIGAEHVNNSYECDIPIGAGICASYQTQTNSPRRARSVASQSIIAYTMSLGAENSVAYSNNSIAIPTNFTISVTTEILPVSMTKTSVDCTMYICGDSTECSNLLLQYGSFCTQLNRALTGIAVEQDKNTQEVFAQVKQIYKTPPIKDFGGFNFSQILPDPSKPSKRSFIEDLLFNKVTLADAGFIKQYGDCLGDIAARDLICAQKFNGLTVLPPLLTDEMIAQYCSALLAGTITSGWTFGAGAALQIPFAMQMAYRFNGIGVTQNVLYENQKLIANQFNSAIGKIQDSLSSAAPALGKLQDVVNQNAQALNTLVKQLSSNFGAISSVLNDILSRLDKVEAEVQIDRLITGRLQSLQTYVTQQLIRAAEIRASANLAATKMSECVLGQSKRVDFCGKGYHLMSFPQCAPHGVVFLHVTYVPAQEKNFTTAPAICHDGKAHFPREGVFVSNGTHWFVTQRNFYEPQIITTDNTFVSGNCDVVIGIVNNTVYDPLQPELDSFKEELDKYFKNHTSPDVDLGDISGINASVVNIQKEIDRLNEVAKNLNESLIDLQELGKYEQYIKWPWYIWLGFIAGLIAIVMVTIMLCCMTSCCSCLKGCCSCGSCCKFDEDDSEPVLKGVKLHYT

SEQ ID NO: 1235 - protein, 1273 aa, Artificial Sequence
  SARS-CoV-2/USA/WA8-UW5/2020__EPI_ISL_413486 spike protein (1-1273)(T874C_S1055C)
MFVFLVLLPLVSSQCVNLTTRTQLPPAYTNSFTRGVYYPDKVFRSSVLHSTQDLFLPFFSNVTWFHAIHVSGTNGTKRFDNPVLPFNDGVYFASTEKSNIIRGWIFGTTLDSKTQSLLIVNNATNVVIKVCEFQFCNDPFLGVYYHKNNKSWMESEFRVYSSANNCTFEYVSQPFLMDLEGKQGNFKNLREFVFKNIDGYFKIYSKHTPINLVRDLPQGFSALEPLVDLPIGINITRFQTLLALHRSYLTPGDSSSGWTAGAAAYYVGYLQPRTFLLKYNENGTITDAVDCALDPLSETKCTLKSFTVEKGIYQTSNFRVQPTESIVRFPNITNLCPFGEVFNATRFASVYAWNRKRISNCVADYSVLYNSASFSTFKCYGVSPTKLNDLCFTNVYADSFVIRGDEVRQIAPGQTGKIADYNYKLPDDFTGCVIAWNSNNLDSKVGGNYNYLYRLFRKSNLKPFERDISTEIYQAGSTPCNGVEGFNCYFPLQSYGFQPTNGVGYQPYRVVVLSFELLHAPATVCGPKKSTNLVKNKCVNFNFNGLTGTGVLTESNKKFLPFQQFGRDIADTTDAVRDPQTLEILDITPCSFGGVSVITPGTNTSNQVAVLYQDVNCTEVPVAIHADQLTPTWRVYSTGSNVFQTRAGCLIGAEYVNNSYECDIPIGAGICASYQTQTNSPRRARSVASQSIIAYTMSLGAENSVAYSNNSIAIPTNFTISVTTEILPVSMTKTSVDCTMYICGDSTECSNLLLQYGSFCTQLNRALTGIAVEQDKNTQEVFAQVKQIYKTPPIKDFGGFNFSQILPDPSKPSKRSFIEDLLFNKVTLADAGFIKQYGDCLGDIAARDLICAQKFNGLTVLPPLLTDEMIAQYCSALLAGTITSGWTFGAGAALQIPFAMQMAYRFNGIGVTQNVLYENQKLIANQFNSAIGKIQDSLSSTASALGKLQDVVNQNAQALNTLVKQLSSNFGAISSVLNDILSRLDKVEAEVQIDRLITGRLQSLQTYVTQQLIRAAEIRASANLAATKMSECVLGQSKRVDFCGKGYHLMSFPQCAPHGVVFLHVTYVPAQEKNFTTAPAICHDGKAHFPREGVFVSNGTHWFVTQRNFYEPQIITTDNTFVSGNCDVVIGIVNNTVYDPLQPELDSFKEELDKYFKNHTSPDVDLGDISGINASVVNIQKEIDRLNEVAKNLNESLIDLQELGKYEQYIKWPWYIWLGFIAGLIAIVMVTIMLCCMTSCCSCLKGCCSCGSCCKFDEDDSEPVLKGVKLHYT

SEQ ID NO: 1236 - protein, 1273 aa, Artificial Sequence
  SARS-CoV-2/England/20102000506/2020__EPI_ISL_415147 spike protein (1-1273)(T874C_S1055C)
MFVFLVLLPLVSSQCVNLTTRTQLPPAYTNSFTRGVYYPDKVFRSSVLHSTQDLFLPFFSNVTWFHAIHVSGTNGTKRFDNPVLPFNDGVYFASTEKSNIIRGWIFGTTLDSKTQSLLIVNNATNVVIKVCEFQFCNDPFLGVYYHKNNKSWMESEFRVYSSANNCTFEYVSQPFLMDLEGKQGNFKNLREFVFKNIDGYFKIYSKHTPINLVRDLPQGFSALEPLVDLPIGINITRFQTLLALHRSYLTPGDSSSGWTAGAAAYYVGYLQPRTFLLKYNENGTITDAVDCALDPLSETKCTLKSFTVEKGIYQTSNFRVQPTESIVRFPNITNLCPFGEVFNATRFASVYAWNRKRISNCVADYSVLYNSASFSTFKCYGVSPTKLNDLCFTNVYADSFVIRGDEVRQIAPGQTGKIADYNYKLPDDFTGCVIAWNSNNLDSKVGGNYNYLYRLFRKSNLKPFERDISTEIYQAGSTPCNGVEGFNCYFPLQSYGFQPTNGVGYQPYRVVVLSFELLHAPATVCGPKKSTNLVKNKCVNFNFNGLTGTGVLTESNKKFLPFQQFGRDIADTTDAVRDPQTLEILDITPCSFGGVSVITPGTNTSNQVAVLYQGVNCTEVPVAIHADQLTPTWRVYSTGSNVFQTRAGCLIGAEHVNNSYECDIPIGAGICASYQTQTNSPRRARSVASQSIIAYTMSLGAENSVAYSNNSIAIPTNFTISVTTEILPVSMTKTSVDCTMYICGDSTECSNLLLQYGSFCTQLNRALTGIAVEQDKNTQEVFAQVKQIYKTPPIKDFGGFNFSQILPDPSKPSKRSFIEDLLFNKVTLADAGFIKQYGYCLGDIAARDLICAQKFNGLTVLPPLLTDEMIAQYCSALLAGTITSGWTFGAGAALQIPFAMQMAYRFNGIGVTQNVLYENQKLIANQFNSAIGKIQDSLSSTASALGKLQDVVNQNAQALNTLVKQLSSNFGAISSVLNDILSRLDKVEAEVQIDRLITGRLQSLQTYVTQQLIRAAEIRASANLAATKMSECVLGQSKRVDFCGKGYHLMSFPQCAPHGVVFLHVTYVPAQEKNFTTAPAICHDGKAHFPREGVFVSNGTHWFVTQRNFYEPQIITTDNTFVSGNCDVVIGIVNNTVYDPLQPELDSFKEELDKYFKNHTSPDVDLGDISGINASVVNIQKEIDRLNEVAKNLNESLIDLQELGKYEQYIKWPWYIWLGFIAGLIAIVMVTIMLCCMTSCCSCLKGCCSCGSCCKFDEDDSEPVLKGVKLHYT

SEQ ID NO: 1237 - protein, 1273 aa, Artificial Sequence
  SARS-CoV-2/Belgium/VAG-03013/2020__EPI_ISL_415155 spike protein (1-1273)(T874C_S1055C)
MFVFLVLLPLVSSQCVNLTTRTQLPPAYTNSFTRGVYYPDKVFRSSVLHSTQDLFLPFFSNVTWFHAIHVSGTNGTKRFDNPVLPFNDGVYFASTEKSNIIRGWIFGTTLDSKTQSLLIVNNATNVVIKVCEFQFCNDPFLGVYYHKNNKSWMESEFRVYSSANNCTFEYVSQPFLMDLEGKQGNFKNLREFVFKNIDGYFKIYSKHTPINLVRDLPQGFSALEPLVDLPIGINITRFQTLLALHRSYLTPGDSSSGWTAGAAAYYVGYLQPRTFLLKYNENGTITDAVDCALDPLSETKCTLKSFTVEKGIYQTSNFRVQPTESIVRFPNITNLCPFGEVFNATRFASVYAWNRKRISNCVADYSVLYNSASFSTFKCYGVSPTKLNDLCFTNVYADSFVIRGDEVRQIAPGQTGKIADYNYKLPDDFTGCVIAWNSNNLDSKVGGNYNYLYRLFRKSNLKPFERDISTEIYQAGSTPCNGVEGFNCYFPLQSYGFQPTNGVGYQPYRVVVLSFELLHAPATVCGPKKSTNLVKNKCVNFNFNGLTGTGVLTESNKKFLPFQQFGRDIADTTDAVRDPQTLEILDITPCSFGGVSVITPGTNTSNQVAVLYQGVNCTEVPVAIHADQLTPTWRVYSTGSNVFQTRAGCLIGAEHVNNSYECDIPIGAGICASYQTQTNSPRRARSVASQSIIAYTMSLGAENSVAYSNNSIAIPTNFTISVTTEILPVSMTKTSVDCTMYICGDSTECSNLLLQYGSFCTQLNRALTGIAVEQDKNTQEVFAQVKQIYKTPPIKDFGGFNFSQILPDPSKPSKRSFIEDLLFNKVTLADAGFIKQYGDCLGDIAARDLICAQKFNGLTVLPPLLTDEMIAQYCSALLAGTITSGWTFGAGAALQIPFAMQMAYRFNGIGVTQNVLYENQKLIANQFNSAIGKIQDSLSSTATALGKLQDVVNQNAQALNTLVKQLSSNFGAISSVLNDILSRLDKVEAEVQIDRLITGRLQSLQTYVTQQLIRAAEIRASANLAATKMSECVLGQSKRVDFCGKGYHLMSFPQCAPHGVVFLHVTYVPAQEKNFTTAPAICHDGKAHFPREGVFVSNGTHWFVTQRNFYEPQIITTDNTFVSGNCDVVIGIVNNTVYDPLQPELDSFKEELDKYFKNHTSPDVDLGDISGINASVVNIQKEIDRLNEVAKNLNESLIDLQELGKYEQYIKWPWYIWLGFIAGLIAIVMVTIMLCCMTSCCSCLKGCCSCGSCCKFDEDDSEPVLKGVKLHYT

SEQ ID NO: 1238 - protein, 1273 aa, Artificial Sequence
  SARS-CoV-2/Belgium/BC-03016/2020__EPI_ISL_415157 spike protein (1-1273)(T874C_S1055C)
MFVFLVLLPLVSSQCVNLTTRTQLPPAYTNSFTRGVYYPDKVFRSSVLHSTQDLFLPFFSNVTWFHAIHVSGTNGTKRFDNPVLPFNDGVYFASTEKSNIIRGWIFGTTLDSKTQSLLIVNNATNVVIKVCEFQFCNDPFLGVYYHKNNKSWMESEFRVYSSANNCTFEYVSQPFLMDLEGKQGNFKNLREFVFKNIDGYFKIYSKHTPINLVRDLPQGFSALEPLVDLPIGINITRFQTLLALHRSYLTPGDSSSGWTAGAAAYYVGYLQPRTFLLKYNENGTITDAVDCALDPLSETKCTLKSFTVEKGIYQTSNFRVQPTESIVRFPNITNLCPFGEVFNATRFASVYAWNRKRISNCVADYSVLYNSASFSTFKCYGVSPTKLNDLCFTNVYADSFVIRGDEVRQIAPGQTGKIADYNYKLPDDFTGCVIAWNSNNLDSKVGGNYNYLYRLFRKSNLKPFERDISTEIYQAGSTPCNGVEGFNCYFPLQSYGFQPTNGVGYQPYRVVVLSFELLHAPATVCGPKKSTNLVKNKCVNFNFNGLTGTGVLTESNKKFLPFQQFGRDIADTTDAVRDPQTLEILDITPCSFGGVSVITPGTNTSNQVAVLYQGVNCTEVPVAIHADQLTPTWRVYSTGSNVFQTRAGCLIGAEHVNNSYECDIPIGAGICASYQTQTNSPRRARSVASQSIIAYTMSLGAENSVAYSNNSIAIPTNFTISVTTEILPVSMTKTSVDCTMYICGDSTECSNLLLQYGSFCTQLNRALTGIAVEQDKNTQEVFAQVKQIYKTPPIKDFGGFNFSQILPDPSKPSKRSFIEDLLFNKVTLADAGFIKQYGDCLGDIAARDLICAQKFNGLTVLPPLLTDEMIAQYCSALLAGTITSGWTFGAGAALQIPFAMQMAYRFNGIGVTQNVLYENQKLIANQFNSAIGKIQDSLSSTAPALGKLQDVVNQNAQALNTLVKQLSSNFGAISSVLNDILSRLDKVEAEVQIDRLITGRLQSLQTYVTQQLIRAAEIRASANLAATKMSECVLGQSKRVDFCGKGYHLMSFPQCAPHGVVFLHVTYVPAQEKNFTTAPAICHDGKAHFPREGVFVSNGTHWFVTQRNFYEPQIITTDNTFVSGNCDVVIGIVNNTVYDPLQPELDSFKEELDKYFKNHTSPDVDLGDISGINASVVNIQKEIDRLNEVAKNLNESLIDLQELGKYEQYIKWPWYIWLGFIAGLIAIVMVTIMLCCMTSCCSCLKGCCSCGSCCKFDEDDSEPVLKGVKLHYT

SEQ ID NO: 1239 - protein, 1273 aa, Artificial Sequence
  SARS-CoV-2/Germany/BavPat3/2020__EPI_ISL_414521 spike protein (1-1273)(T874C_S1055C)
MFVFLVLLPLVSSQCVNLTTRTQLPPAYTNSFTRGVYYPDKVFRSSVLHSTQDLFLPFFSNVTWFHAIHVSGTNGTKRFDNPVLPFNDGVYFASTEKSNIIRGWIFGTTLDSKTQSLLIVNNATNVVIKVCEFQFCNDPFLGVYYHKNNKSWMESEFRVYSSANNCTFEYVSQPFLMDLEGKQGNFKNLREFVFKNIDGYFKIYSKHTPINLVRDLPQGFSALEPLVDLPIGINITRFQTLLALHRSYLTPGDSSSGWTAGAAAYYVGYLQPRTFLLKYNENGTITDAVDCALDPLSETKCTLKSFTVEKGIYQTSNFRVQPTESIVRFPNITNLCPFGEVFNATRFASVYAWNRKRISNCVADYSVLYNSASFSTFKCYGVSPTKLNDLCFTNVYADSFVIRGDEVRQIAPGQTGKIADYNYKLPDDFTGCVIAWNSNNLDSKVGGNYNYLYRLFRKSNLKPFERDISTEIYQAGSTPCNGVEGFNCYFPLQSYGFQPTNGVGYQPYRVVVLSFELLHAPATVCGPKKSTNLVKNKCVNFNFNGLTGTGVLTESNKKFLPFQQFGRDIADTTDAVRDPQTLEILDITPCSFGGVSVITPGTNTSNQVAVLYQDVNCTEVPVAIHADQLTPTWRVYSTGSNVFQTRAGCLIGAEHVNNSYECDIPIGAGICASYQTQTNSPRRARSVASQSIIAYTMSLGAENSVAYSNNSIAIPTNFTISVTTEILPVSMTKTSVDCTMYICGDSTECSNLLLQYGSFCTQLNRALTGIAVEQDKNTQQVFAQVKQIYKTPPIKDFGGFNFSQILPDPSKPSKRSFIEDLLFNKVTLADAGFIKQYGDCLGDIAARDLICAQKFNGLTVLPPLLTDEMIAQYCSALLAGTITSGWTFGAGAALQIPFAMQMAYRFNGIGVTQNVLYENQKLIANQFNSAIGKIQDSLSSTASALGKLQDVVNQNAQALNTLVKQLSSNFGAISSVLNDILSRLDKVEAEVQIDRLITGRLQSLQTYVTQQLIRAAEIRASANLAATKMSECVLGQSKRVDFCGKGYHLMSFPQCAPHGVVFLHVTYVPAQEKNFTTAPAICHDGKAHFPREGVFVSNGTHWFVTQRNFYEPQIITTDNTFVSGNCDVVIGIVNNTVYDPLQPELDSFKEELDKYFKNHTSPDVDLGDISGINASVVNIQKEIDRLNEVAKNLNESLIDLQELGKYEQYIKWPWYIWLGFIAGLIAIVMVTIMLCCMTSCCSCLKGCCSCGSCCKFDEDDSEPVLKGVKLHYT

SEQ ID NO: 1240 - protein, 1273 aa, Artificial Sequence
  SARS-CoV-2/France/HF1805/2020__EPI_ISL_414628 spike protein (1-1273)(T874C_S1055C)
MFVFLVLLPLVSSQCVNLTTRTQLPPAYTNSFTRGVYYPDKVFRSSVLHSTQDLFLPFFSNVTWFHAIHVSGTNGTKRFDNPVLPFNDGVYFASTEKSNIIRGWIFGTTLDSKTQSLLIVNNATNVVIKVCEFQFCNDPFLGVYYHKNNKSWMESEFRVYSSANNCTFEYVSQPFLMDLEGKQGNFKNLREFVFKNIDGYFKIYSKHTPINLVRDLPQGFSALEPLVDLPIGINITRFQTLLALHRSYLTPGDSSSGWTAGAAAYYVGYLQPRTFLLKYNENGTITDAVDCALDPLSETKCTLKSFTVEKGIYQTSNFRVQPTESIVRFPNITNLCPFGEVFNATRFASVYAWNRKRISNCVADYSVLYNSASFSTFKCYGVSPTKLNDLCFTNVYADSFVIRGDEVRQIAPGQTGKIADYNYKLPDDFTGCVIAWNSNNLDSKVGGNYNYLYRLFRKSNLKPFERDISTEIYQAGSTPCNGVEGFNCYFPLQSYGFQPTNGVGYQPYRVVVLSFELLHAPATVCGPKKSTNLVKNKCVNFNFNGLTGTGVLTESNKKFLPFQQFGRDIADTTDAVRDPQTLEILDITPCSFGGVSVITPGTNTSNQVAVLYQGVNCTEVPVAIHADQLTPTWRVYSTGSNVFQTRAGCLIGAEHVNNSYECDIPIGAGICASYQTQTNSPRRARSVASQSIIAYTMSLGAENSVAYSNNSIAIPTNFTISVTTEILPVSMTKTSVDCTMYICGDSTECSNLLLQYGSFCTQLNRALTGIAVEQDKNTQEVFAQVKQIYKTPPIKDFGGFNFSQILPDPSKPSKRSFIEDLLFNKVTLADAGFIKQYGDCLGDIAARDLICAQKFNGLTVLPPLLTDEMIAQYCSALLAGTITSGWTFGAGAALQIPFAMQMAYRFNGIGVTQNVLYENQKLIANQFNSAIGKIQDSLSSTASALGKLQDVVNQNAQALNTLVKQLSSNFGAISSVLNDILSRLDKVEAEVQIDRLITGRLQSLQTYVTQQLIRAAEIRASANLAATKMSECVLGQSKRVDFCGKGYHLMSFPQCAPHGVVFLHVTYVPAQEKNFTTAPAICHDGKAHFPREGVFVSNGTHWFVTQRNFYEPQIITTDNTFVSGNCDVVIGVVNNTVYDPLQPELDSFKEELDKYFKNHTSPDVDLGDISGINASVVNIQKEIDRLNEVAKNLNESLIDLQELGKYEQYIKWPWYIWLGFIAGLIAIVMVTIMLCCMTSCCSCLKGCCSCGSCCKFDEDDSEPVLKGVKLHYT

SEQ ID NO: 1241 - protein, 1273 aa, Artificial Sequence
  SARS-CoV-2/Netherlands/ZuidHolland_9/2020__EPI_ISL_414445 spike protein (1-1273)(T874C_S1055C)
MFVFLVLLPLVSSQCVNLTTRTQLPPAYTNSFTRGVYYPDKVFRSSVLHSTQDLFLPFFSNVTWFHAIHVSGTNGTKRFDNPVLPFNDGVYFASTEKSNIIRGWIFGTTLDSKTQSLLIVNNATNVVIKVCEFQFCNDPFLGVYYHKNNKSWMESEFRVYSSANNCTFEYVSQPFLMDLEGKQGNFKNLREFVFKNIDGYFKIYSKHTPINLVRDLPQGFSALEPLVDLPIGINITRFQTLLALHRSYLTPGDSSSGWTAGAAAYYVGYLQPRTFLLKYNENGTITDAVDCALDPLSETKCTLKSFTVEKGIYQTSNFRVQPTESIVRFPNITNLCPFGEVFNATRFASVYAWNRKRISNCVADYSVLYNSASFSTFKCYGVSPTKLNDLCFTNVYADSFVIRGDEVRQIAPGQTGKIADYNYKLPDDFTGCVIAWNSNNLDSKVGGNYNYLYRLFRKSNLKPFERDISTEIYQAGSTPCNGVEGFNCYFPLQSYGFQPTNGVGYQPYRVVVLSFELLHAPATVCGPKKSTNLVKNKCVNFNFNGLTGTGVLTESNKKFLPFQQFGRDIADTTDAVRDPQTLEILDITPCSFGGVSVITPGTNTSNQVAVLYQGVNCTEVPVAIHADQLTPTWRVYSTGSNVFQTRAGCLIGAEHVNNSYECDIPIGAGICASYQTQTNSPRRARSVASQSIIAYTMSLGAENSVAYSNNSIAIPTNFTISVTTEILPVSMTKTSVDCTMYICGDSTECSNLLLQYGSFCTQLNRALTGIAVEQDKNTQEVFAQVKQIYKTPPIKDFGGFNFSQILPDPSKPSKRSFIEDLLFNKVTLADAGFIKQYGDCLGDIAARDLICVQKFNGLTVLPPLLTDEMIAQYCSALLAGTITSGWTFGAGAALQIPFAMQMAYRFNGIGVTQNVLYENQKLIANQFNSAIGKIQDSLSSTASALGKLQDVVNQNAQALNTLVKQLSSNFGAISSVLNDILSRLDKVEAEVQIDRLITGRLQSLQTYVTQQLIRAAEIRASANLAATKMSECVLGQSKRVDFCGKGYHLMSFPQCAPHGVVFLHVTYVPAQEKNFTTAPAICHDGKAHFPREGVFVSNGTHWFVTQRNFYEPQIITTDNTFVSGNCDVVIGIVNNTVYDPLQPELDSFKEELDKYFKNHTSPDVDLGDISGINASVVNIQKEIDRLNEVAKNLNESLIDLQELGKYEQYIKWPWYIWLGFIAGLIAIVMVTIMLCCMTSCCSCLKGCCSCGSCCKFDEDDSEPVLKGVKLHYT

SEQ ID NO: 1242 - protein, 1273 aa, Artificial Sequence
  SARS-CoV-2/Finland/FIN03032020A/2020__EPI_ISL_413602 spike protein (1-1273)(T874C_S1055C)
MFVFLVLLPLVSSQCVNLTTRTQLPPAYTNSFTRGVYYPDKVFRSSVLHSTQDLFLPFFSNVTWFHAIHVSGTNGTKRFDNPVLPFNDGVYFASTEKSNIIRGWIFGTTLDSKTQSLLIVNNATNVVIKVCEFQFCNDPFLGVYYHKNNKSWMESEFRVYSSANNCTFEYVSQPFLMDLEGKQGNFKNLREFVFKNIDGYFKIYSKHTPINLVRDLPQGFSALEPLVDLPIGINITRFQTLLALHRSYLTPGDSSSGWTAGAAAYYVGYLQPRTFLLKYNENGTITDAVDCALDPLSETKCTLKSFTVEKGIYQTSNFRVQPTESIVRFPNITNLCPFGEVFNATRFASVYAWNRKRISNCVADYSVLYNSASFSTFKCYGVSPTKLNDLCFTNVYADSFVIRGDEVRQIAPGQTGKIADYNYKLPDDFTGCVISWNSNNLDSKVGGNYNYLYRLFRKSNLKPFERDISTEIYQAGSTPCNGVEGFNCYFPLQSYGFQPTNGVGYQPYRVVVLSFELLHAPATVCGPKKSTNLVKNKCVNFNFNGLTGTGVLTESNKKFLPFQQFGRDIADTTDAVRDPQTLEILDITPCSFGGVSVITPGTNTSNQVAVLYQGVNCTEVPVAIHADQLTPTWRVYSTGSNVFQTRAGCLIGAEHVNNSYECDIPIGAGICASYQTQTNSPRRARSVASQSIIAYTMSLGAENSVAYSNNSIAIPTNFTISVTTEILPVSMTKTSVDCTMYICGDSTECSNLLLQYGSFCTQLNRALTGIAVEQDKNTQEVFAQVKQIYKTPPIKDFGGFNFSQILPDPSKPSKRSFIEDLLFNKVTLADAGFIKQYGDCLGDIAARDLICAQKFNGLTVLPPLLTDEMIAQYCSALLAGTITSGWTFGAGAALQIPFAMQMAYRFNGIGVTQNVLYENQKLIANQFNSAIGKIQDSLSSTASALGKLQDVVNQNAQALNTLVKQLSSNFGAISSVLNDILSRLDKVEAEVQIDRLITGRLQSLQTYVTQQLIRAAEIRASANLAATKMSECVLGQSKRVDFCGKGYHLMSFPQCAPHGVVFLHVTYVPAQEKNFTTAPAICHDGKAHFPREGVFVSNGTHWFVTQRNFYEPQIITTDNTFVSGNCDVVIGIVNNTVYDPLQPELDSFKEELDKYFKNHTSPDVDLGDISGINASVVNIQKEIDRLNEVAKNLNESLIDLQELGKYEQYIKWPWYIWLGFIAGLIAIVMVTIMLCCMTSCCSCLKGCCSCGSCCKFDEDDSEPVLKGVKLHYT

SEQ ID NO: 1243 - protein, 1273 aa, Artificial Sequence
  SARS-CoV-2/France/GE1977/2020__EPI_ISL_414632 spike protein (1-1273)(T874C_S1055C)
MFVFLVLLPLVSSQCVNLTTRTQLPPAYTNSFTRGVYYPDKVFRSSVLHSTQDLFLPFFSNVTWFHAIHVSGTNGTKRFDNPVLPFNDGVYFASTEKSNIIRGWIFGTTLDSKTQSLLIVNNATNVVIKVCEFQFCNDPFLGVYYHKNNKSWMESEFRVYSSANNCTFEYVSQPFLMDLEGKQGNFKNLREFVFKNIDGYFKIYSKHTPINLVRDLPQGFSALEPLVDLPIGINITRFQTLLALHRSYLTPGDSSSGWTAGAAAYYVGYLQPRTFLLKYNENGTITDAVDCALDPLSETKCTLKSFTVEKGIYQTSNFRVQPTESIVRFPNITNLCPFGEVFNATRFASVYAWNRKRISNCVADYSVLYNSASFSTFKCYGVSPTKLNDLCFTNVYADSFVIRGDEVRQIAPGQTGKIADYNYKLPDDFTGCVIAWNSNNLDSKVGGNYNYLYRLFRKSNLKPFERDISTEIYQAGSTPCNGVEGFNCYFPLQSYGFQPTNGVGYQPYRVVVLSFELLHAPATVCGPKKSTNLVKNKCVNFNFNGLTGTGVLTESNKKFLPFQQFGRDIADTTDAVRDPQTLEILDITPCSFGGVSVITPGTNTSNQVAVLYQGVNCTEVPVAIHADQLTPTWRVYSTGSNVFQTRAGCLIGAEHVNNSYECDIPIGAGICASYQTQTNSPRRARSVASQSIIAYTMSLGAENSVAYSNNSIAIPTNFTISVTTEILPVSMTKTSVDCTMYICGDSTECSNLLLQYGSFCTQLNRALTGIAVEQDKNTQEVFAQVKQIYKTPPIKDFGGFNFSQILPDPSKPSKRSFIEDLLFNKVTLADAGFIKQYGDCLGDIAARDLICAQKFNGLTVLPPLLTDEMIAQYCSALLAGTITSGWTFGAGAALQIPFAMQMAYRFNGIGVTQNVLYENQKLIANQFNSAIGKIQDSLFSTASALGKLQDVVNQNAQALNTLVKQLSSNFGAISSVLNDILSRLDKVEAEVQIDRLITGRLQSLQTYVTQQLIRAAEIRASANLAATKMSECVLGQSKRVDFCGKGYHLMSFPQCAPHGVVFLHVTYVPAQEKNFTTAPAICHDGKAHFPREGVFVSNGTHWFVTQRNFYEPQIITTDNTFVSGNCDVVIGIVNNTVYDPLQPELDSFKEELDKYFKNHTSPDVDLGDISGINASVVNIQKEIDRLNEVAKNLNESLIDLQELGKYEQYIKWPWYIWLGFIAGLIAIVMVTIMLCCMTSCCSCLKGCCSCGSCCKFDEDDSEPVLKGVKLHYT

SEQ ID NO: 1244 - protein, 1273 aa, Artificial Sequence
  SARS-CoV-2/Finland/FIN-313/2020__EPI_ISL_414641 spike protein (1-1273)(T874C_S1055C)
MFVFLVLLPLVSSQCVNLTTRTQLPPAYTNSFTRGVYYPDKVFRSSVLHSTQDLFLPFFSNVTWFHAIHVSGTNGTKRFDNPVLPFNDGVYFASTEKSNIIRGWIFGTTLDSKTQSLLIVNNATNVVIKVCEFQFCNDPFLGVYYHKNNKSWMESEFRVYSSANNCTFEYVSQPFLMDLEGKQGNFKNLREFVFKNIDGYFKIYSKHTPINLVRDLPQGFSALEPLVDLPIGINITRFKTLLALHRSYLTPGDSSSGWTAGAAAYYVGYLQPRTFLLKYNENGTITDAVDCALDPLSETKCTLKSFTVEKGIYQTSNFRVQPTESIVRFPNITNLCPFGEVFNATRFASVYAWNRKRISNCVADYSVLYNSASFSTFKCYGVSPTKLNDLCFTNVYADSFVIRGDEVRQIAPGQTGKIADYNYKLPDDFTGCVIAWNSNNLDSKVGGNYNYLYRLFRKSNLKPFERDISTEIYQAGSTPCNGVEGFNCYFPLQSYGFQPTNGVGYQPYRVVVLSFELLHAPATVCGPKKSTNLVKNKCVNFNFNGLTGTGVLTESNKKFLPFQQFGRDIADTTDAVRDPQTLEILDITPCSFGGVSVITPGTNTSNQVAVLYQGVNCTEVPVAIHADQLTPTWRVYSTGSNVFQTRAGCLIGAEHVNNSYECDIPIGAGICASYQTQTNSPRRARSVASQSIIAYTMSLGAENSVAYSNNSIAIPTNFTISVTTEILPVSMTKTSVDCTMYICGDSTECSNLLLQYGSFCTQLNRALTGIAVEQDKNTQEVFAQVKQIYKTPPIKDFGGFNFSQILPDPSKPSKRSFIEDLLFNKVTLADAGFIKQYGDCLGDIAARDLICAQKFNGLTVLPPLLTDEMIAQYCSALLAGTITSGWTFGAGAALQIPFAMQMAYRFNGIGVTQNVLYENQKLIANQFNSAIGKIQDSLSSTASALGKLQDVVNQNAQALNTLVKQLSSNFGAISSVLNDILSRLDKVEAEVQIDRLITGRLQSLQTYVTQQLIRAAEIRASANLAATKMSECVLGQSKRVDFCGKGYHLMSFPQCAPHGVVFLHVTYVPAQEKNFTTAPAICHDGKAHFPREGVFVSNGTHWFVTQRNFYEPQIITTDNTFVSGNCDVVIGIVNNTVYDPLQPELDSFKEELDKYFKNHTSPDVDLGDISGINASVVNIQKEIDRLNEVAKNLNESLIDLQELGKYEQYIKWPWYIWLGFIAGLIAIVMVTIMLCCMTSCCSCLKGCCSCGSCCKFDEDDSEPVLKGVKLHYT

SEQ ID NO: 1245 - protein, 1273 aa, Artificial Sequence
  SARS-CoV-2/Netherlands/ZuidHolland_2/2020__EPI_ISL_414556 spike protein (1-1273)(T874C_S1055C)
MFVFLVLLPLVSSQCVNLTTRTQLPPAYTNSFTRGVYYPDKVFRSSVLHSTQDLFLPFFSNVTWFHAIHVSGTNGTKRFDNPVLPFNDGVYFASTEKSNIIRGWIFGTTLDSKTQSLLIVNNATNVVIKVCEFQFCNDPFLGVYYHKNNKSWMESEFRVYSSANNCTFEYVSQPFLMDLEGKQGNFKNLREFVFKNIDGYFKIYSKHTPINLVRDLPQGFSALEPLVDLPIGINITRFQTLLALHRSYLTPGDSSSGWTAGAAAYYVGYLQPRTFLLKYNENGTITDAVDCALDPLSETKCTLKSFTVEKGIYQTSNFRVQPTESIVRFPNITNLCPFGEVFNATRFASVYAWNRKRISNCVADYSVLYNSASFSTFKCYGVSPTKLNDLCFTNVYADSFVIRGDEVRQIAPGQTGKIADYNYKLPDDFTGCVIAWNSNNLDSKVGGNYNYLYRLFRKSNLKPFERDISTEIYQAGSTPCNGVEGFNCYFPLQSYGFQPTNGVGYQPYRVVVLSFELLHAPATVCGPKKSTNLVKNKCVNFNFNGLTGTGVLTESNKKFLPFQQFGRDIADTTDAVRDPQTLEILDITPCSFGGVSVITPGTNTSNQVAVLYQGVNCTEVPVAIHADQLTPTWRVYSTGSNVFQTRAGCLIGAEHVNNSYECDIPIGAGICASYQTQTNSPRRARSVASQSIIAYTMSLGAENSVAYSNNSIAIPTNFTISVTTEILPVSMTKTSVDCTMYICGDSTECSNLLLQYGSFCTQLNRALTGIALEQDKNTQEVFAQVKQIYKTPPIKDFGGFNFSQILPDPSKPSKRSFIEDLLFNKVTLADAGFIKQYGDCLGDIAARDLICAQKFNGLTVLPPLLTDEMIAQYCSALLAGTITSGWTFGAGAALQIPFAMQMAYRFNGIGVTQNVLYENQKLIANQFNSAIGKIQDSLSSTASALGKLQDVVNQNAQALNTLVKQLSSNFGAISSVLNDILSRLDKVEAEVQIDRLITGRLQSLQTYVTQQLIRAAEIRASANLAATKMSECVLGQSKRVDFCGKGYHLMSFPQCAPHGVVFLHVTYVPAQEKNFTTAPAICHDGKAHFPREGVFVSNGTHWFVTQRNFYEPQIITTDNTFVSGNCDVVIGIVNNTVYDPLQPELDSFKEELDKYFKNHTSPDVDLGDISGINASVVNIQKEIDRLNEVAKNLNESLIDLQELGKYEQYIKWPWYIWLGFIAGLIAIVMVTIMLCCMTSCCSCLKGCCSCGSCCKFDEDDSEPVLKGVKLHYT

SEQ ID NO: 1246 - protein, 1273 aa, Artificial Sequence
  SARS-CoV-2/USA/WA-UW31/2020__EPI_ISL_414618 spike protein (1-1273)(T874C_S1055C)
MFVFLVLLPLVSSQCVNLTTRTQLPPAYTNSFTRGVYYPDKVFRSSVLHSTQDLFLPFFSNVTWFHAIHVSGTNGTKRFDNPVLPFNDGVYFASTEKSNIIRGWIFGTTLDSKTQSLLIVNNATNVVIKVCEFQFCNDPFLGVYYHKNNKSWMESEFRVYSSANNCTFEYVSQPFLMDLEGKQGNFKNLREFVFKNIDGYFKIYSKHTPINLVRDLPQGFSALEPLVDLPIGINITRFQTLLALHRSYLTPGDSSSGWTAGAAAYYVGYLQPRTFLLKYNENGTITDAVDCALDPLSETKCTLKSFTVEKGIYQTSNFRVQPTESIVRFPNITNLCPFGEVFNATRFASVYAWNRKRISNCVADYSVLYNSASFSTFKCYGVSPTKLNDLCFTNVYADSFVIRGDEVRQIAPGQTGKIADYNYKLPDDFTGCVIAWNSNNLDSKVGGNYNYLYRLFRKSNLKPFERDISTEIYQAGSTPCNGAEGFNCYFPLQSYGFQPTNGVGYQPYRVVVLSFELLHAPATVCGPKKSTNLVKNKCVNFNFNGLTGTGVLTESNKKFLPFQQFGRDIADTTDAVRDPQTLEILDITPCSFGGVSVITPGTNTSNQVAVLYQDVNCTEVPVAIHADQLTPTWRVYSTGSNVFQTRAGCLIGAEHVNNSYECDIPIGAGICASYQTQTNSPRRARSVASQSIIAYTMSLGAENSVAYSNNSIAIPTNFTISVTTEILPVSMTKTSVDCTMYICGDSTECSNLLLQYGSFCTQLNRALTGIAVEQDKNTQEVFAQVKQIYKTPPIKDFGGFNFSQILPDPSKPSKRSFIEDLLFNKVTLADAGFIKQYGDCLGDIAARDLICAQKFNGLTVLPPLLTDEMIAQYCSALLAGTITSGWTFGAGAALQIPFAMQMAYRFNGIGVTQNVLYENQKLIANQFNSAIGKIQDSLSSTASALGKLQDVVNQNAQALNTLVKQLSSNFGAISSVLNDILSRLDKVEAEVQIDRLITGRLQSLQTYVTQQLIRAAEIRASANLAATKMSECVLGQSKRVDFCGKGYHLMSFPQCAPHGVVFLHVTYVPAQEKNFTTAPAICHDGKAHFPREGVFVSNGTHWFVTQRNFYEPQIITTDNTFVSGNCDVVIGIVNNTVYDPLQPELDSFKEELDKYFKNHTSPDVDLGDISGINASVVNIQKEIDRLNEVAKNLNESLIDLQELGKYEQYIKWPWYIWLGFIAGLIAIVMVTIMLCCMTSCCSCLKGCCSCGSCCKFDEDDSEPVLKGVKLHYT

SEQ ID NO: 1247 - protein, 1273 aa, Artificial Sequence
  SARS-CoV-2/South Korea/SNU01/2020__EPI_ISL_411929 spike protein (1-1273)(T874C_S1055C)
MFVFLVLLPLVSSQCVNLTTRTQLPPAYTNSFTRGVYYPDKVFRSSVLHSTQDLFLPFFSNVTWFHAIHVSGTNGTKRFDNPVLPFNDGVYFASTEKSNIIRGWIFGTTLDSKTQSLLIVNNATNVVIKVCEFQFCNDPFLGVYYHKNNKSWMESEFRVYSSANNCTFEYVSQPFLMDLEGKQGNFKNLREFVFKNIDGYFKIYSKHTPINLVRDLPQGFWALEPLVDLPIGINITRFQTLLALHRSYLTPGDSSSGWTAGAAAYYVGYLQPRTFLLKYNENGTITDAVDCALDPLSETKCTLKSFTVEKGIYQTSNFRVQPTESIVRFPNITNLCPFGEVFNATRFASVYAWNRKRISNCVADYSVLYNSASFSTFKCYGVSPTKLNDLCFTNVYADSFVIRGDEVRQIAPGQTGKIADYNYKLPDDFTGCVIAWNSNNLDSKVGGNYNYLYRLFRKSNLKPFERDISTEIYQAGSTPCNGVEGFNCYFPLQSYGFQPTNGVGYQPYRVVVLSFELLHAPATVCGPKKSTNLVKNKCVNFNFNGLTGTGVLTESNKKFLPFQQFGRDIADTTDAVRDPQTLEILDITPCSFGGVSVITPGTNTSNQVAVLYQDVNCTEVPVAIHADQLTPTWRVYSTGSNVFQTRAGCLIGAEHVNNSYECDIPIGAGICASYQTQTNSPRRARSVASQSIIAYTMSLGAENSVAYSNNSIAIPTNFTISVTTEILPVSMTKTSVDCTMYICGDSTECSNLLLQYGSFCTQLNRALTGIAVEQDKNTQEVFAQVKQIYKTPPIKDFGGFNFSQILPDPSKPSKRSFIEDLLFNKVTLADAGFIKQYGDCLGDIAARDLICAQKFNGLTVLPPLLTDEMIAQYCSALLAGTITSGWTFGAGAALQIPFAMQMAYRFNGIGVTQNVLYENQKLIANQFNSAIGKIQDSLSSTASALGKLQDVVNQNAQALNTLVKQLSSNFGAISSVLNDILSRLDKVEAEVQIDRLITGRLQSLQTYVTQQLIRAAEIRASANLAATKMSECVLGQSKRVDFCGKGYHLMSFPQCAPHGVVFLHVTYVPAQEKNFTTAPAICHDGKAHFPREGVFVSNGTHWFVTQRNFYEPQIITTDNTFVSGNCDVVIGIVNNTVYDPLQPELDSFKEELDKYFKNHTSPDVDLGDISGINASVVNIQKEIDRLNEVAKNLNESLIDLQELGKYEQYIKWPWYIWLGFIAGLIAIVMVTIMLCCMTSCCSCLKGCCSCGSCCKFDEDDSEPVLKGVKLHYT

SEQ ID NO: 1248 - protein, 1273 aa, Artificial Sequence
  SARS-CoV-2/China/WF0004/2020__EPI_ISL_413694 spike protein (1-1273)(T874C_S1055C)
MFVFLVLLPLVSSQCVNLTTRTQLPPAYTNSFTRGVYYPDKVFRSSVLHSTQDLFLPFFSNVTWFHAIHVSGTNGTKRFDNPVLPFNDGVYFASTEKSNIIRGWIFGTTLDSKTQSLLIVNNATNVVIKVCEFQFCNDPFLGVYYHKNNKSWTESEFRVYSSANNCTFEYVSQPFLMDLEGKQGNFKNLREFVFKNIDGYFKIYSKHTPINLVRDLPQGFSALEPLVDLPIGINITRFQTLLALHRSYLTPGDSSSGWTAGAAAYYVGYLQPRTFLLKYNENGTITDAVDCALDPLSETKCTLKSFTVEKGIYQTSNFRVQPTESIVRFPNITNLCPFGEVFNATRFASVYAWNRKRISNCVADYSVLYNSASFSTFKCYGVSPTKLNDLCFTNVYADSFVIRGDEVRQIAPGQTGKIADYNYKLPDDFTGCVIAWNSNNLDSKVGGNYNYLYRLFRKSNLKPFERDISTEIYQAGSTPCNGVEGFNCYFPLQSYGFQPTNGVGYQPYRVVVLSFELLHAPATVCGPKKSTNLVKNKCVNFNFNGLTGTGVLTESNKKFLPFQQFGRDIADTTDAVRDPQTLEILDITPCSFGGVSVITPGTNTSNQVAVLYQDVNCTEVPVAIHADQLTPTWRVYSTGSNVFQTRAGCLIGAEHVNNSYECDIPIGAGICASYQTQTNSPRRARSVASQSIIAYTMSLGAENSVAYSNNSIAIPTNFTISVTTEILPVSMTKTSVDCTMYICGDSTECSNLLLQYGSFCTQLNRALTGIAVEQDKNTQEVFAQVKQIYKTPPIKDFGGFNFSQILPDPSKPSKRSFIEDLLFNKVTLADAGFIKQYGDCLGDIAARDLICAQKFNGLTVLPPLLTDEMIAQYCSALLAGTITSGWTFGAGAALQIPFAMQMAYRFNGIGVTQNVLYENQKLIANQFNSAIGKIQDSLSSTASALGKLQDVVNQNAQALNTLVKQLSSNFGAISSVLNDILSRLDKVEAEVQIDRLITGRLQSLQTYVTQQLIRAAEIRASANLAATKMSECVLGQSKRFDFCGKGYHLMSFPQCAPHGVVFLHVTYVPAQEKNFTTAPAICHDGKAHFPREGVFVSNGTHWFVTQRNFYEPQIITTDNTFVSGNCDVVIGIVNNTVYDPLQPELDSFKEELDKYFKNHTSPDVDLGDISGINASVVNIQKEIDRLNEVAKNLNESLIDLQELGKYEQYIKWPWYIWLGFIAGLIAIVMVTIMLCCMTSCCSCLKGCCSCGSCCKFDEDDSEPVLKGVKLHYT

SEQ ID NO: 1249 - protein, 1273 aa, Artificial Sequence
  SARS-CoV-2/China/WF0028/2020__EPI_ISL_413791 spike protein (1-1273)(T874C_S1055C)
MFVFLVLLPLVSSQCVNLTTRTQLPPAYTNSFTRGVYYPDKVFRSSVLHSTQDLFLPFFSNVTWFHAIHVSGTNGTKRFDNPVLPFNDGVYFASTEKSNIIRGWIFGTTLDSKTQSLLIVNNATNVVIKVCEFQFCNDPFLGVYYHKNNKSWMESEFRVYSSANNCTFEYVSQPFLMDLEGKQGNFKNLREFVFKNIDGYFKIYSKHTPINLVRDLPQGFSALEPLVDLPIGINITRFQTLLALHRSYLTPGDSSSGWTAGAAAYYVGYLQPRTFLLKYNENGTITDAVDCALDPLSETKCTLKSFTVEKGIYQTSNFRVQPTESIVRFPNITNLCPFGEVFNATRFASVYAWNRKRISNCVADYSVLYNSASFSTFKCYGVSPTKLNDLCFTNVYADSFVIRGDEVRQIAPGQTGKIADYNYKLPDDFTGCVIAWNSNNLDSKVGGNYNYLYRLFRKSNLKPFERDISTEIYQAGSTPCNGVEGFNCYFPLQSYGFQPTNGVGYQPYRVVVLSFELLHAPATVCGPKKSTNLVKNKCVNFNFNGLTGTGVLTESNKKFLPFQQFGRDIADTTDAVRDPQTLEILDITPCSFGGVSVITPGTNTSNQVAVLYQDVNCTEVPVAIHADQLTPTWRVYSTGSNVFQTRAGCLIGAEHVNNSYECDIPIGAGICASYQTQTNSPRRARSVASQSIIAYTMSLGAENSVAYSNNSIAIPTNFTISVTTEILPVSMTKTSVDCTMYICGDSTECSNLLLQYGSFCTQLNRALTGIAVEQDKNTQEVFAQVKQIYKTPPIKDFGGFNFSQILPDPSKPSKRSFIEDLLFNKVTLADAGFIKQYGDCLGDIAARDLICAQKFNGLTVLPPLLTDEMIAQYCSALLAGTITSGWTFGAGAALQIPFAMQMAYRFNGIGVTQNVLYENQKLIANQFNSAIGKIQDSLSSTASALGKLQDVVNQNAQALNTLVKQLSSNFGAISSVLNDILSRLDKVEAEVQIDRLITGRLQSLQTYVTQQLIRAAEIRASANLAATKMSECVLGQSKRVDFCGKGYHLMSFPQCAPHGVVFLHVTYVPAQEKNFTTAPAICHDGKAHFPREGVFVSNGTHWFVTQRNFYEPQIITTDNTFVSGNCDVVIGIVNNTVYDPLQPELESFKEELDKYFKNHTSPDVDLGDISGINASVVNIQKEIDRLNEVAKNLNESLIDLQELGKYEQYIKWPWYIWLGFIAGLIAIVMVTIMLCCMTSCCSCLKGCCSCGSCCKFDEDDSEPVLKGVKLHYT

SEQ ID NO: 1250 - protein, 1273 aa, Artificial Sequence
  SARS-CoV-2/2019-nCoV/USA-CruiseA-18/2020__MT159716.1 spike protein (1-1273)(T874C_S1055C)
MFVFLVLLPLVSSQCVNLTTRTQLPPAYTNSFTRGVYYPDKVFRSSVLHSTQDLFLPFFSNVTWFHAIHVSGTNGTKRFDNPVLPFNDGVYFASTEKSNIIRGWIFGTTLDSKTQSLLIVNNATNVVIKVCEFQFCNDPFLGVYYHKNNKSWMESELRVYSSANNCTFEYVSQPFLMDLEGKQGNFKNLREFVFKNIDGYFKIYSKHTPINLVRDLPQGFSALEPLVDLPIGINITRFQTLLALHRSYLTPGDSSSGWTAGAAAYYVGYLQPRTFLLKYNENGTITDAVDCALDPLSETKCTLKSFTVEKGIYQTSNFRVQPTESIVRFPNITNLCPFGEVFNATRFASVYAWNRKRISNCVADYSVLYNSASFSTFKCYGVSPTKLNDLCFTNVYADSFVIRGDEVRQIAPGQTGKIADYNYKLPDDFTGCVIAWNSNNLDSKVGGNYNYLYRLFRKSNLKPFERDISTEIYQAGSTPCNGVEGFNCYFPLQSYGFQPTNGVGYQPYRVVVLSFELLHAPATVCGPKKSTNLVKNKCVNFNFNGLTGTGVLTESNKKFLPFQQFGRDIADTTDAVRDPQTLEILDITPCSFGGVSVITPGTNTSNQVAVLYQDVNCTEVPVAIHADQLTPTWRVYSTGSNVFQTRAGCLIGAEHVNNSYECDIPIGAGICASYQTQTNSPRRARSVASQSIIAYTMSLGAENSVAYSNNSIAIPTNFTISVTTEILPVSMTKTSVDCTMYICGDSTECSNLLLQYGSFCTQLNRALTGIAVEQDKNTQEVFAQVKQIYKTPPIKDFGGFNFSQILPDPSKPSKRSFIEDLLFNKVTLADAGFIKQYGDCLGDIAARDLICAQKFNGLTVLPPLLTDEMIAQYCSALLAGTITSGWTFGAGAALQIPFAMQMAYRFNGIGVTQNVLYENQKLIANQFNSAIGKIQDSLSSTASALGKLQDVVNQNAQALNTLVKQLSSNFGAISSVLNDILSRLDKVEAEVQIDRLITGRLQSLQTYVTQQLIRAAEIRASANLAATKMSECVLGQSKRVDFCGKGYHLMSFPQCAPHGVVFLHVTYVPAQEKNFTTAPAICHDGKAHFPREGVFVSNGTHWFVTQRNFYEPQIITTDNTFVSGNCDVVIGIVNNTVYDPLQPELDSFKEELDKYFKNHTSPDVDLGDISGINASVVNIQKEIDRLNEVAKNLNESLIDLQELGKYEQYIKWPWYIWLGFIAGLIAIVMVTIMLCCMTSCCSCLKGCCSCGSCCKFDEDDSEPVLKGVKLHYT

SEQ ID NO: 1251 - protein, 1273 aa, Artificial Sequence
  SARS-CoV-2/SARS-CoV-2/Yunnan-01/human/2020/CHN__MT049951.1 spike protein (1-1273)(T874C_S1055C)
MFVFLVLLPLVSSQCVNLTTRTQLPPANTNSFTRGVYYPDKVFRSSVLHSTQDLFLPFFSNVTWFHAIHVSGTNGTKRFDNPVLPFNDGVYFASTEKSNIIRGWIFGTTLDSKTQSLLIVNNATNVVIKVCEFQFCNDPFLGVYYHKNNKSWMESEFRVYSSANNCTFEYVSQPFLMDLEGKQGNFKNLREFVFKNIDGYFKIYSKHTPINLVRDLPQGFSALEPLVDLPIGINITRFQTLLALHRSYLTPGDSSSGWTAGAAAYYVGYLQPRTFLLKYNENGTITDAVDCALDPLSETKCTLKSFTVEKGIYQTSNFRVQPTESIVRFPNITNLCPFGEVFNATRFASVYAWNRKRISNCVADYSVLYNSASFSTFKCYGVSPTKLNDLCFTNVYADSFVIRGDEVRQIAPGQTGKIADYNYKLPDDFTGCVIAWNSNNLDSKVGGNYNYLYRLFRKSNLKPFERDISTEIYQAGSTPCNGVEGFNCYFPLQSYGFQPTNGVGYQPYRVVVLSFELLHAPATVCGPKKSTNLVKNKCVNFNFNGLTGTGVLTESNKKFLPFQQFGRDIADTTDAVRDPQTLEILDITPCSFGGVSVITPGTNTSNQVAVLYQDVNCTEVPVAIHADQLTPTWRVYSTGSNVFQTRAGCLIGAEHVNNSYECDIPIGAGICASYQTQTNSPRRARSVASQSIIAYTMSLGAENSVAYSNNSIAIPTNFTISVTTEILPVSMTKTSVDCTMYICGDSTECSNLLLQYGSFCTQLNRALTGIAVEQDKNTQEVFAQVKQIYKTPPIKDFGGFNFSQILPDPSKPSKRSFIEDLLFNKVTLADAGFIKQYGDCLGDIAARDLICAQKFNGLTVLPPLLTDEMIAQYCSALLAGTITSGWTFGAGAALQIPFAMQMAYRFNGIGVTQNVLYENQKLIANQFNSAIGKIQDSLSSTASALGKLQDVVNQNAQALNTLVKQLSSNFGAISSVLNDILSRLDKVEAEVQIDRLITGRLQSLQTYVTQQLIRAAEIRASANLAATKMSECVLGQSKRVDFCGKGYHLMSFPQCAPHGVVFLHVTYVPAQEKNFTTAPAICHDGKAHFPREGVFVSNGTHWFVTQRNFYEPQIITTDNTFVSGNCDVVIGIVNNTVYDPLQPELDSFKEELDKYFKNHTSPDVDLGDISGINASVVNIQKEIDRLNEVAKNLNESLIDLQELGKYEQYIKWPWYIWLGFIAGLIAIVMVTIMLCCMTSCCSCLKGCCSCGSCCKFDEDDSEPVLKGVKLHYT

SEQ ID NO: 1252 - protein, 1273 aa, Artificial Sequence
  SARS-CoV-2/USA/WA-UW292/2020__EPI_ISL_418077 spike protein (1-1273)(T874C_S1055C)
MFVFLVLLPLVSSQCVNLTTRTQLPPAYTNSFTRGVYYPDKVFRSSVLHSTQDLFLPFFSNVTWFHAIHVSGTNGTKRFDNPVLPFNDGVYFASTEKSNIIRGWIFGTTLDSKTQSLLIVNNATNVVIKVCEFQFCNDPFLGVYYHKNNKSWMESEFRVYSSANNCTFEYVSQPFLMDLEGKQGNFKNLREFVFKNIDGYFKIYSKHTPINLVRDLPQGFSALEPLVDLPIGINITRFQTLLALHRSYLTPGDSSSGWTAGAAAYYVGYLQPRTFLLKYNENGTITDAVDCALDPLSETKCTLKSFTVEKGIYQTSNFRVQPTESIVRFPNITNLCPFGEVFNATRFASVYAWNRKRISNCVADYSVLYNSASFSTFKCYGVSPTKLNDLCFTNVYADSFVIRGDEVRQIAPGQTGKIADYNYKLPDDFTGCVIAWNSNNLDSKVGGNYNYLYRLFRKSNLKPFERDISTEIYQASSTPCNGVEGFNCYFPLQSYGFQPTNGVGYQPYRVVVLSFELLHAPATVCGPKKSTNLVKNKCVNFNFNGLTGTGVLTESNKKFLPFQQFGRDIADTTDAVRDPQTLEILDITPCSFGGVSVITPGTNTSNQVAVLYQDVNCTEVPVAIHADQLTPTWRVYSTGSNVFQTRAGCLIGAEHVNNSYECDIPIGAGICASYQTQTNSPRRARSVASQSIIAYTMSLGAENSVAYSNNSIAIPTNFTISVTTEILPVSMTKTSVDCTMYICGDSTECSNLLLQYGSFCTQLNRALTGIAVEQDKNTQEVFAQVKQIYKTPPIKDFGGFNFSQILPDPSKPSKRSFIEDLLFNKVTLADAGFIKQYGDCLGDIAARDLICAQKFNGLTVLPPLLTDEMIAQYCSALLAGTITSGWTFGAGAALQIPFAMQMAYRFNGIGVTQNVLYENQKLIANQFNSAIGKIQDSLSSTASALGKLQDVVNQNAQALNTLVKQLSSNFGAISSVLNDILSRLDKVEAEVQIDRLITGRLQSLQTYVTQQLIRAAEIRASANLAATKMSECVLGQSKRVDFCGKGYHLMSFPQCAPHGVVFLHVTYVPAQEKNFTTAPAICHDGKAHFPREGVFVSNGTHWFVTQRNFYEPQIITTDNTFVSGNCDVVIGIVNNTVYDPLQPELDSFKEELDKYFKNHTSPDVDLGDISGINASVVNIQKEIDRLNEVAKNLNESLIDLQELGKYEQYIKWPWYIWLGFIAGLIAIVMVTIMLCCMTSCCSCLKGCCSCGSCCKFDEDDSEPVLKGVKLHYT

SEQ ID NO: 1253 - protein, 1273 aa, Artificial Sequence
  SARS-CoV-2/Iceland/192/2020__EPI_ISL_417819 spike protein (1-1273)(T874C_S1055C)
MFVFFVLLPLVSSQCVNLTTRTQLPPAYTNSFTRGVYYPDKVFRSSVLHSTQDLFLPFFSNVTWFHAIHVSGTNGTKRFDNPVLPFNDGVYFASTEKSNIIRGWIFGTTLDSKTQSLLIVNNATNVVIKVCEFQFCNDPFLGVYYHKNNKSWMESEFRVYSSANNCTFEYVSQPFLMDLEGKQGNFKNLREFVFKNIDGYFKIYSKHTPINLVRDLPQGFSALEPLVDLPIGINITRFQTLLALHRSYLTPGDSSSGWTAGAAAYYVGYLQPRTFLLKYNENGTITDAVDCALDPLSETKCTLKSFTVEKGIYQTSNFRVQPTESIVRFPNITNLCPFGEVFNATRFASVYAWNRKRISNCVADYSVLYNSASFSTFKCYGVSPTKLNDLCFTNVYADSFVIRGDEVRQIAPGQTGKIADYNYKLPDDFTGCVIAWNSNNLDSKVGGNYNYLYRLFRKSNLKPFERDISTEIYQAGSTPCNGVEGFNCYFPLQSYGFQPTNGVGYQPYRVVVLSFELLHAPATVCGPKKSTNLVKNKCVNFNFNGLTGTGVLTESNKKFLPFQQFGRDIADTTDAVRDPQTLEILDITPCSFGGVSVITPGTNTSNQVAVLYQGVNCTEVPVAIHADQLTPTWRVYSTGSNVFQTRAGCLIGAEHVNNSYECDIPIGAGICASYQTQTNSPRRARSVASQSIIAYTMSLGAENSVAYSNNSIAIPTNFTISVTTEILPVSMTKTSVDCTMYICGDSTECSNLLLQYGSFCTQLNRALTGIAVEQDKNTQEVFAQVKQIYKTPPIKDFGGFNFSQILPDPSKPSKRSFIEDLLFNKVTLADAGFIKQYGDCLGDIAARDLICAQKFNGLTVLPPLLTDEMIAQYCSALLAGTITSGWTFGAGAALQIPFAMQMAYRFNGIGVTQNVLYENQKLIANQFNSAIGKIQDSLSSTASALGKLQDVVNQNAQALNTLVKQLSSNFGAISSVLNDILSRLDKVEAEVQIDRLITGRLQSLQTYVTQQLIRAAEIRASANLAATKMSECVLGQSKRVDFCGKGYHLMSFPQCAPHGVVFLHVTYVPAQEKNFTTAPAICHDGKAHFPREGVFVSNGTHWFVTQRNFYEPQIITTDNTFVSGNCDVVIGIVNNTVYDPLQPELDSFKEELDKYFKNHTSPDVDLGDISGINASVVNIQKEIDRLNEVAKNLNESLIDLQELGKYEQYIKWPWYIWLGFIAGLIAIVMVTIMLCCMTSCCSCLKGCCSCGSCCKFDEDDSEPVLKGVKLHYT

SEQ ID NO: 1254 - protein, 1273 aa, Artificial Sequence
  SARS-CoV-2/Belgium/ULG-6939/2020__EPI_ISL_417020 spike protein (1-1273)(T874C_S1055C)
MFVFLVLLPLVSSQCVNLTTRTQLPPAYTNSFTRGVYYPDKVFRSSVLHSTQDLFLPFFSNVTWFHAIHVSGTNGTKRFDNPVLPFNDGVYFASTEKSNIIRGWIFGTTLDSKTQSLLIVNNATNVVIKVCEFQFCNDPFLGVYYHKNNKSWMESEFRVYSSANNCTFEYVSQPFLMDLEGKQGNFKNLREFVFKNIDGYFKIYSKHTPINLVRDLPQGFSALEPLVDLPIGINITRFQTLLALHRSYLTPGDSSSGWTAGAAAYYVGYLQPRTFLLKYNENGTITDAVDCALDPLSETKCTLKSFTVEKGIYQTSNFRVQPTESIVRFPNITNLCPFGEVFNATRFASVYAWNRKRISNCVADYSVLYNSASFSTFKCYGVSPTKLNDLCFTNVYADSFVIRGDEVRQIAPGQTGKIADYNYKLPDDFTGCVIAWNSNNLDSKVGGNYNYLYRLFRKSNLKPFERDISTEIYQAGSTPCNGVEGFNCYFPLQSYGFQPTNGVGYQPYRVVVLSFELLHAPATVCGPKKSTNLVKNKCVNFNFNGLTGTGVLTESNKKFLPFQQFGRDIADTTDAVRDPQTLEILDITPCSFGGVSVITPGTNTSNQVAVLYQGVNCTEVPVAIHADQLTPTWRVYSTGSNVFQTRAGCLIGAEHVNNSYECDIPIGAGICASYQTQTNSPRRARSVASQSIIAYTMSLGAENSVVYSNNSIAIPTNFTISVTTEILPVSMTKTSVDCTMYICGDSTECSNLLLQYGSFCTQLNRALTGIAVEQDKNTQEVFAQVKQIYKTPPIKDFGGFNFSQILPDPSKPSKRSFIEDLLFNKVTLADAGFIKQYGDCLGDIAARDLICAQKFNGLTVLPPLLTDEMIAQYCSALLAGTITSGWTFGAGAALQIPFAMQMAYRFNGIGVTQNVLYENQKLIANQFNSAIGKIQDSLSSTASALGKLQDVVNQNAQALNTLVKQLSSNFGAISSVLNDILSRLDKVEAEVQIDRLITGRLQSLQTYVTQQLIRAAEIRASANLAATKMSECVLGQSKRVDFCGKGYHLMSFPQCAPHGVVFLHVTYVPAQEKNFTTAPAICHDGKAHFPREGVFVSNGTHWFVTQRNFYEPQIITTDNTFVSGNCDVVIGIVNNTVYDPLQPELDSFKEELDKYFKNHTSPDVDLGDISGINASVVNIQKEIDRLNEVAKNLNESLIDLQELGKYEQYIKWPWYIWLGFIAGLIAIVMVTIMLCCMTSCCSCLKGCCSCGSCCKFDEDDSEPVLKGVKLHYT

SEQ ID NO: 1255 - protein, 1273 aa, Artificial Sequence
  SARS-CoV-2/France/HF2496/2020__EPI_ISL_418231 spike protein (1-1273)(T874C_S1055C)
MFVFLVLLPLVSSQCVNLTTRTQLPPAYTNSFTRGVYYPDKVFRSSVLHSTQDLFLPFFSNVTWFHAIHVSGTNGTKRFDNPVLPFNDGVYFASTEKSNIIRGWIFGTTLDSKTQSLLIVNNATNVVIKVCEFQFCNDPFLGVYYHKNNKSWMESEFRVYSSANNCTFEYVSQPFLMDLEGKQGNFKNLREFVFKNIDGYFKIYSKHTPINLVRDLPQGFSALEPLVDLPIGINITRFQTLLALHRSYLTPGDSSSGWTAGAAAYYVGYLQPRTFLLKYNENGTITDAVDCALDPLSETKCTLKSFTVEKGIYQTSNFRVQPTESIVRFPNITNLCPFGEVFNATRFASVYAWNRKRISNCVADYSVLYNSASFSTFKCYGVSPTKLNDLCFTNVYADSFVIRGDEVRQIAPGQTGKIADYNYKLPDDFTGCVIAWNSNNLDSKVGGNYNYLYRLFRKSNLKPFERDISTEIYQAGSTPCNGVEGFNCYFPLQSYGFQPTNGVGYQPYRVVVLSFELLHAPATVCGPKKSTNLVKNKCVNFNFNGLTGTGVLTESNKKFLPFQQFGRDIADTTDAVRDPQTLEILDITPCSFGGVSVITPGTNTSNQVAVLYQGVNCTEVPVAIHADQLTPTWRVYSTGSNVFQTRAGCLIGAEHVNNSYECDIPIGAGICASYQTQTNSPRRARSVASQSIIAYTMSLGAENSVAYSNNSIAIPTNFTISVTTEILPVSMTKTSVDCTMYICGDSTECSNLLLQYGSFCTQLNRALTGIAVEQDKNTQEVFAQVKQIYKTPPIKDFGGFNFSQILPDPSKPSKRSFIEDLLFNKVTLADAGFIKQYGDCLGDIVARDLICAQKFNGLTVLPPLLTDEMIAQYCSALLAGTITSGWTFGAGAALQIPFAMQMAYRFNGIGVTQNVLYENQKLIANQFNSAIGKIQDSLSSTASALGKLQDVVNQNAQALNTLVKQLSSNFGAISSVLNDILSRLDKVEAEVQIDRLITGRLQSLQTYVTQQLIRAAEIRASANLAATKMSECVLGQSKRVDFCGKGYHLMSFPQCAPHGVVFLHVTYVPAQEKNFTTAPAICHDGKAHFPREGVFVSNGTHWFVTQRNFYEPQIITTDNTFVSGNCDVVIGIVNNTVYDPLQPELDSFKEELDKYFKNHTSPDVDLGDISGINASVVNIQKEIDRLNEVAKNLNESLIDLQELGKYEQYIKWPWYIWLGFIAGLIAIVMVTIMLCCMTSCCSCLKGCCSCGSCCKFDEDDSEPVLKGVKLHYT

SEQ ID NO: 1256 - protein, 1273 aa, Artificial Sequence
  SARS-CoV-2/USA/WA-UW291/2020__EPI_ISL_418076 spike protein (1-1273)(T874C_S1055C)
MFVFLVLLPLVSSQCVNLTTRTQLPPAYTNSFTRGVYYPDKVFRSSVLHSTQDLFLPFFSNVTWFHAIHVSGTNGTKRFDNPVLPFNDGVYFASTEKSNIIRGWIFGTTLDSKTQSLLIVNNATNVVIKVCEFQFCNDPFLGVYYHKNNKSWMESEFRVYSSANNCTFEYVSQPFLMDLEGKQGNFKNLREFVFKNIDGYFKIYSKHTPINLVRDLPQGFSALEPLVDLPIGINITRFQTLLALHRSYLTPGDSSSGWTAGAAAYYVGYLQPRTFLLKYNENGTITDAVDCALDPLSETKCTLKSFTVEKGIYQTSNFRVQPTESIVRFPNITNLCPFGEVFNATRFASVYAWNRKRISNCVADYSVLYNSASFSTFKCYGVSPTKLNDLCFTNVYADSFVIRGDEVRQIAPGQTGKIADYNYKLPDDFTGCVIAWNSNNLDSKVGGNYNYLYRLFRKSNLKPFERDISTEIYQAGSTPCNGVEGFNCYFPLQSYGFQPTNGVGYQPYRVVVLSFELLHAPATVCGPKKSTNLVKNKCVNFNFNGLTGTGVLTESNKKFLPFQQFGRDIADTTDAVRDPQTLEILDITPCSFGGVSVITPGTNTSNQVAVLYQGVNCTEVPVAIHADQLTPTWRVYSTGSNVFQTRAGCLIGAEHVNNSYECDIPIGAGICASYQTQTNSPRRARSVASQSIIAYTMSLGAENSVAYSNNSIAIPTNFTISVTTEILPVSMTKTSVDCTMYICGDSTECSNLLLQYGSFCTQLNRALTGIAVEQDKNTQEVFAQVKQIYKTPPIKDFGGFNFSQILPDPSKPSKRSFIEDLLFNKVTLADAGFIKQYGDCLGDIAARDLICAQKFNGLTVLPPLLTDEMIAQYCSALLAGTITSGWTFGAGAALQIPFAMQMAYRFNGIGVTQNVLYENQKLIANQFNSAIGKIQYSLSSTASALGKLQDVVNQNAQALNTLVKQLSSNFGAISSVLNDILSRLDKVEAEVQIDRLITGRLQSLQTYVTQQLIRAAEIRASANLAATKMSECVLGQSKRVDFCGKGYHLMSFPQCAPHGVVFLHVTYVPAQEKNFTTAPAICHDGKAHFPREGVFVSNGTHWFVTQRNFYEPQIITTDNTFVSGNCDVVIGIVNNTVYDPLQPELDSFKEELDKYFKNHTSPDVDLGDISGINASVVNIQKEIDRLNEVAKNLNESLIDLQELGKYEQYIKWPWYIWLGFIAGLIAIVMVTIMLCCMTSCCSCLKGCCSCGSCCKFDEDDSEPVLKGVKLHYT

SEQ ID NO: 1257 - protein, 1273 aa, Artificial Sequence
  SARS-CoV-2/Portugal/PT0034/2020__EPI_ISL_418019 spike protein (1-1273)(T874C_S1055C)
MFVFLVLLPLVSSQCVNLTTRTQLPPAYTNSFTRGVYYPDKVFRSSVLHSTQDLFLPFFSNVTWFHAIHVSGTNGTKRFDNPVLPFNDGVYFASTEKSNIIRGWIFGTTLDSKTQSLLIVNNATNVVIKVCEFQFCNDPFLGVYYHKNNKSWMESEFRVYSSANNCTFEYVSQPFLMDLEGKQGNFKNLREFVFKNIDGYFKIYSKHTPINLVRDLPQGFSALEPLVDLPIGINITRFQTLLALHRSYLTPGDSSSGWTAGAAAYYVGYLQPRTFLLKYNENGTITDAVDCALDPLSETKCTLKSFTVEKGIYQTSNFRVQPTESIVRFPNITNLCPFGEVFNATRFASVYAWNRKRISNCVADYSVLYNSASFSTFKCYGVSPTKLNDLCFTNVYADSFVIRGDEVRQIAPGQTGKIADYNYKLPDDFTGCVIAWNSNNLDSKVGGNYNYLYRLFRKSNLKPFERDISTEIYQAGSTPCNGVEGFNCYFPLQSYGFQPTNGVGYQPYRVVVLSFELLHAPATVCGPKKSTNLVKNKCVNFNFNGLTGTGVLTESNKKFLPFQQFGRDIADTTDAVRDPQTLEILDITPCSFGGVSVITPGTNTSNQVAVLYQGVNCTEVPVAIHADQLTPTWRVYSTGSNVFQTRAGCLIGAEHVNNSYECDIPIGAGICASYQTQTNSPRRARSVASQSIIAYTMSLGAENSVAYSNNSIAIPTNFTISVTTEILPVSMTKTSVDCTMYICGDSTECSNLLLQYGSFCTQLNRALTGIAVEQDKNTQEVFAQVKQIYKTPPIKDFGGFNFSQILPDPSKPSKRSFIEDLLFNKVTLADAGFIKQYGDCLGDIAARDLICAQKFNGLTVLPPLLTDEMIAQYCSALLAGTITSGWTFGAGAALQIPFAMQMAYRFNGIGVTQNVLYENQKLIANQFNSAIGKIQDSLSSTASALGKLQDVVNQNAQALNTLVKQLSSNFGAISSVLNDILSRLDKVEAEVQIDRLITGRLQSLQTYVTQQLIRAAEIRASANLAATKMSECVLGQSKRVDFCGKGYHLMSFPQCAPHGVVFLHVTYVPAQEKNFTTAPAICHDGKAHFPREGVFVSNGTHWFVTQRNFYEPQIITTDNTFVSGNCDVVIGIVNNTVYDPLQPELDSFKEELDKYFKNHTSPDVDLGDISGINASVVNIQKEIDRLNEVAKNLNESLIDLQELGKYEQYIKWPWYIWLGFIAGLIAIVMVTIMLCCITSCCSCLKGCCSCGSCCKFDEDDSEPVLKGVKLHYT

SEQ ID NO: 1258 - protein, 1273 aa, Artificial Sequence
  SARS-CoV-2/Iceland/202/2020__EPI_ISL_417750 spike protein (1-1273)(T874C_S1055C)
MFVFLVLLPLVSSQCVNLTTRTQLPPAYTNSFTRGVYYPDKVFRSSVLHSTQDLFLPFFSNVTWFHAIHVSGTNGTKRFDNPVLPFNDGVYFASTEKSNIIRGWIFGTTLDSKTQSLLIVNNATNVVIKVCEFQFCNDPFLGVYYHKNNKSWMESEFRVYSSANNCTFEYVSQPFLMDLEGKQGNFKNLREFVFKNIDGYFKIYSKHTPINLVRDLPQGFSALEPLVDLPIGINITRFQTLLALHRSYLTPGDSSSGWTAGAAAYYVGYLQPRTFLLKYNENGTITDAVDCALDPLSETKCTLKSFTVEKGIYQTSNFRVQPTESIVRFPNITNLCPFGEVFNATRFASVYAWNRKRISNCVADYSVLYNSASFSTFKCYGVSPTKLNDLCFTNVYADSFVIRGDEVRQIAPGQTGKIADYNYKLPDDFTGCVIAWNSNNLDSKVGGNYNYLYRLFRKSNLKPFERDISTEIYQAGSTPCNGVEGFNCYFPLQSYGFQPTNGVGYQPYRVVVLSFELLHAPATVCGPKKSTNLVKNKCVNFNFNGLTGTGVLTESNKKFLPFQQFGRDIADTTDAVRDPQTLEILDITPCSFGGVSVITPGTNTSNQVAVLYQDVNCTEVPVAIHADQLTPTWRVYSTGSNVFQTRAGCLIGAEHVNNSYECDIPIGAGICASYQTQTNSPRRARSVASQSIIAYTMSLGAENSVAYSNNSIAIPTNFTISVTTEILPVSMTKTSVDCTMYICGDSTECSNLLLQYGSFCTQLNRALTGIAVEQDKNTQEVFAQVKQIYKTPPIKDFGGFNFSQILPDPSKPSKRSFIEDLLFNKVTLADAGFIKQYGDCLGDIAARDLICAQKFNGLTVLPPLLTDEMIAQYCSALLAGTITSGWTFGAGAALQIPFAMQMAYRFNGIGVTQNVLYENQKLIANQFNSAIGKIQDSLSSTASALGKLQDVVNQNAQALNTLVKQLSSNFGAISSVLNDILSRLDKVEAEVQIDRLITGRLQSLQTYVTQQLIRAAEIRASANLAATKMSECVLGQSKRVDFCGKGYHLMSFPQCAPHGVVFLHVTYVPAQEKNFTTAPAICHDGKAHFPREGVFVSNGTHWFVTQRNFYEPQIITTDNTFVSGNCDVVIGIVNNTVYDPLQPELDSFKEELDKYFKNHTSPDVDLGDIPGINASVVNIQKEIDRLNEVAKNLNESLIDLQELGKYEQYIKWPWYIWLGFIAGLIAIVMVTIMLCCMTSCCSCLKGCCSCGSCCKFDEDDSEPVLKGVKLHYT

SEQ ID NO: 1259 - protein, 1273 aa, Artificial Sequence
  SARS-CoV-2/USA/WA-UW261/2020__EPI_ISL_418046 spike protein (1-1273)(T874C_S1055C)
MFVFLVLLPLVSSQCVNLTTRTQLPPAYTNSFTRGVYYPDKVFRSSVLHSTQDLFLPFFSNVTWFHAIHVSGTNGTKRFDNPVLPFNDGVYFASTEKSNIIRGWIFGTTLDSKTQSLLIVNNATNVVIKVCEFQFCNDPFLGVYYHKNNKSWMESEFRVYSSANNCTFEYVSQPFLMDLEGKQGNFKNLREFVFKNIDGYFKIYSKHTPINLVRDLPQGFSALEPLVDLPIGINITRFQTLLALHRSYLTPGDSSSGWTAGAAAYYVGYLQPRTFLLKYNENGTITDAVDCALDPLSETKCTLKSFTVEKGIYQTSNFRVQPTESIVRFPNITNLCPFGEVFNATRFTSVYAWNRKRISNCVADYSVLYNSASFSTFKCYGVSPTKLNDLCFTNVYADSFVIRGDEVRQIAPGQTGKIADYNYKLPDDFTGCVIAWNSNNLDSKVGGNYNYLYRLFRKSNLKPFERDISTEIYQAGSTPCNGVEGFNCYFPLQSYGFQPTNGVGYQPYRVVVLSFELLHAPATVCGPKKSTNLVKNKCVNFNFNGLTGTGVLTESNKKFLPFQQFGRDIADTTDAVRDPQTLEILDITPCSFGGVSVITPGTNTSNQVAVLYQDVNCTEVPVAIHADQLTPTWRVYSTGSNVFQTRAGCLIGAEHVNNSYECDIPIGAGICASYQTQTNSPRRARSVASQSIIAYTMSLGAENSVAYSNNSIAIPTNFTISVTTEILPVSMTKTSVDCTMYICGDSTECSNLLLQYGSFCTQLNRALTGIAVEQDKNTQEVFAQVKQIYKTPPIKDFGGFNFSQILPDPSKPSKRSFIEDLLFNKVTLADAGFIKQYGDCLGDIAARDLICAQKFNGLTVLPPLLTDEMIAQYCSALLAGTITSGWTFGAGAALQIPFAMQMAYRFNGIGVTQNVLYENQKLIANQFNSAIGKIQDSLSSTASALGKLQDVVNQNAQALNTLVKQLSSNFGAISSVLNDILSRLDKVEAEVQIDRLITGRLQSLQTYVTQQLIRAAEIRASANLAATKMSECVLGQSKRVDFCGKGYHLMSFPQCAPHGVVFLHVTYVPAQEKNFTTAPAICHDGKAHFPREGVFVSNGTHWFVTQRNFYEPQIITTDNTFVSGNCDVVIGIVNNTVYDPLQPELDSFKEELDKYFKNHTSPDVDLGDISGINASVVNIQKEIDRLNEVAKNLNESLIDLQELGKYEQYIKWPWYIWLGFIAGLIAIVMVTIMLCCMTSCCSCLKGCCSCGSCCKFDEDDSEPVLKGVKLHYT

SEQ ID NO: 1260 - protein, 1273 aa, Artificial Sequence
  SARS-CoV-2/Portugal/PT0035/2020__EPI_ISL_418020 spike protein (1-1273)(T874C_S1055C)
MFVFLVLLPLVSSQCVNLTTRTQLPPAYTNSFTRGVYYPDKVFRSSVLHSTQDLFLPFFSNVTWFHAIHVSGTNGTKRFDNPVLPFNDGVYFASTEKSNIIRGWIFGTTLDSKTQSLLIVNNATNVVIKVCEFQFCNDPFLGVYYHKNNKSWMESEFRVYSSANNCTFEYVSQPFLMDLEGKQGNFKNLREFVFKNIDGYFKIYSKHTPINLVRDLPQGFSALEPLVDLPIGINITRFQTLLALHRSYLTPGDSSSGWTAGAAAYYVGYLQPRTFLLKYNENGTITDAVDCALDPLSETKCTLKSFTVEKGIYQTSNFRVQPTESIVRFPNITNLCPFGEVFNATRFASVYAWNRKRISNCVADYSVLYNSASFSTFKCYGVSPTKLNDLCFTNVYADSFVIRGDEVRQIAPGQTGKIADYNYKLPDDFTGCVIAWNSNNLDSKVGGNYNYLYRLFRKSNLKPFERDISTEIYQAGSTPCNGVEGFNCYFPLQSYGFQPTNGVGYQPYRVVVLSFELLHAPATVCGPKKSTNLVKNKCVNFNFNGLTGTGVLTESNKKFLPFQQFGRDIADTTDAVRDPQTLEILDITPCSFGGVSVITPGTNTSNQVAVLYQDVNCTEVPVAIHADQLTPTWRVYSTGSNVFQTRAGCLIGAEHVNNSYECDIPIGAGICASYQTQTNSPRRARSVASQSIIAYTMSLGAENSVAYSNNSIAIPTNFTISVTTEILPVSMTKTSVDCTMYICGDSTECSNLLLQYGSFCTQLNRALTGIAVEQDKNTQEVFAQVKQIYKTPPIKDFGGFNFSQILPDPSKPSKRSFIEDLLFNKVTLADAGFIKQYGDCLGDISARDLICAQKFNGLTVLPPLLTDEMIAQYCSALLAGTITSGWTFGAGAALQIPFAMQMAYRFNGIGVTQNVLYENQKLIANQFNSAIGKIQDSLSSTASALGKLQDVVNQNAQALNTLVKQLSSNFGAISSVLNDILSRLDKVEAEVQIDRLITGRLQSLQTYVTQQLIRAAEIRASANLAATKMSECVLGQSKRVDFCGKGYHLMSFPQCAPHGVVFLHVTYVPAQEKNFTTAPAICHDGKAHFPREGVFVSNGTHWFVTQRNFYEPQIITTDNTFVSGNCDVVIGIVNNTVYDPLQPELDSFKEELDKYFKNHTSPDVDLGDISGINASVVNIQKEIDRLNEVAKNLNESLIDLQELGKYEQYIKWPWYIWLGFIAGLIAIVMVTIMLCCMTSCCSCLKGCCSCGSCCKFDEDDSEPVLKGVKLHYT

SEQ ID NO: 1261 - protein, 1273 aa, Artificial Sequence
  SARS-CoV-2/USA/NY-NYUMC7/2020__EPI_ISL_418192 spike protein (1-1273)(T874C_S1055C)
MFVFLVLLPLVSSQCVNLTTRTQLPPAYTNSFTRGVYYPDKVFRSSVLHSTQDLFLPFFSNVTWFHAIHVSGTNGTKRFDNPVLPFNDGVYFASTEKSNIIRGWIFGTTLDSKTQSLLIVNNATNVVIKVCEFQFCNDPFLGVYHHKNNKSWMESEFRVYSSANNCTFEYVSQPFLMDLEGKQGNFKNLREFVFKNIDGYFKIYSKHTPINLVRDLPQGFSALEPLVDLPIGINITRFQTLLALHRSYLTPGDSSSGWTAGAAAYYVGYLQPRTFLLKYNENGTITDAVDCALDPLSETKCTLKSFTVEKGIYQTSNFRVQPTESIVRFPNITNLCPFGEVFNATRFASVYAWNRKRISNCVADYSVLYNSASFSTFKCYGVSPTKLNDLCFTNVYADSFVIRGDEVRQIAPGQTGKIADYNYKLPDDFTGCVIAWNSNNLDSKVGGNYNYLYRLFRKSNLKPFERDISTEIYQAGSTPCNGVEGFNCYFPLQSYGFQPTNGVGYQPYRVVVLSFELLHAPATVCGPKKSTNLVKNKCVNFNFNGLTGTGVLTESNKKFLPFQQFGRDIADTTDAVRDPQTLEILDITPCSFGGVSVITPGTNTSNQVAVLYQGVNCTEVPVAIHADQLTPTWRVYSTGSNVFQTRAGCLIGAEHVNNSYECDIPIGAGICASYQTQTNSPRRARSVASQSIIAYTMSLGAENSVAYSNNSIAIPTNFTISVTTEILPVSMTKTSVDCTMYICGDSTECSNLLLQYGSFCTQLNRALTGIAVEQDKNTQEVFAQVKQIYKTPPIKDFGGFNFSQILPDPSKPSKRSFIEDLLFNKVTLADAGFIKQYGDCLGDIAARDLICAQKFNGLTVLPPLLTDEMIAQYCSALLAGTITSGWTFGAGAALQIPFAMQMAYRFNGIGVTQNVLYENQKLIANQFNSAIGKIQDSLSSTASALGKLQDVVNQNAQALNTLVKQLSSNFGAISSVLNDILSRLDKVEAEVQIDRLITGRLQSLQTYVTQQLIRAAEIRASANLAATKMSECVLGQSKRVDFCGKGYHLMSFPQCAPHGVVFLHVTYVPAQEKNFTTAPAICHDGKAHFPREGVFVSNGTHWFVTQRNFYEPQIITTDNTFVSGNCDVVIGIVNNTVYDPLQPELDSFKEELDKYFKNHTSPDVDLGDISGINASVVNIQKEIDRLNEVAKNLNESLIDLQELGKYEQYIKWPWYIWLGFIAGLIAIVMVTIMLCCMTSCCSCLKGCCSCGSCCKFDEDDSEPVLKGVKLHYT

SEQ ID NO: 1262 - protein, 1273 aa, Artificial Sequence
  SARS-CoV-2/Iceland/189/2020__EPI_ISL_417709 spike protein (1-1273)(T874C_S1055C)
MFVFLVLLPLVSSQCVNLTTRTQLPPAYTNSFTRGVYYPDKVFRSSVLHSTQDLFLPFFSNVTWFHAIHVSGTNGTKRFDNPVLPFNDGVYFASTEKSNIIRGWIFGTTLDSKTQSLLIVNNATNVVIKVCEFQFCNDPFLGVYYHKNNKSWMESEFRVYSSANNCTFEYVSQPFLMDLEGKQGNFKNLREFVFKNIDGYFKIYSKHTPINLVRDLPQGFSALEPLVDLPIGINITRFQTLLALHRSYLTPGDSSSGWTAGAAAYYVGYLQPRTFLLKYNENGTITDAVDCALDPLSETKCTLKSFTVEKGIYQTSNFRVQPTESIVRFPNITNLCPFGEVFNATRFASVYAWNRKRISNCVADYSVLYNSASFSTFKCYGVSPTKLNDLCFTNVYADSFVIRGDEVRQIAPGQTGKIADYNYKLPDDFTGCVIAWNSNNLDSKVGGNYNYLYRLFRKSNLKPFERDISTEIYQAGSTPCNGVEGFNCYFPLQSYGFQPTNGVGYQPYRVVVLSFELLHAPATVCGPKKSTNLVKNKCVNFNFNGLTGTGVLTESNKKFLPFQQFGRDIADTTDAVRDPQTLEILDITPCSFGGVSVITPGTNTSNQVAVLYQGVNCTEVPVAIHADQLTPTWRVYSTGSNVFQTRAGCLIGAEHVNNSYECDIPIGAGICASYQTQTNSPRRARSVASQSIIAYTMSLGAENSVAYSNNSIAIPTNFTISVTTEILPVSMTKTSVDCTMYICGDSTECSNLLLQYGSFCTQLNRALTGIAVEQDKNTQEVFAQVKQIYKTPPIKDFGGFNFSQILPDPSKPSKRSFIEDLLFNKVTLADAGFTKQYGDCLGDIAARDLICAQKFNGLTVLPPLLTDEMIAQYCSALLAGTITSGWTFGAGAALQIPFAMQMAYRFNGIGVTQNVLYENQKLIANQFNSAIGKIQDSLSSTASALGKLQDVVNQNAQALNTLVKQLSSNFGAISSVLNDILSRLDKVEAEVQIDRLITGRLQSLQTYVTQQLIRAAEIRASANLAATKMSECVLGQSKRVDFCGKGYHLMSFPQCAPHGVVFLHVTYVPAQEKNFTTAPAICHDGKAHFPREGVFVSNGTHWFVTQRNFYEPQIITTDNTFVSGNCDVVIGIVNNTVYDPLQPELDSFKEELDKYFKNHTSPDVDLGDISGINASVVNIQKEIDRLNEVAKNLNESLIDLQELGKYEQYIKWPWYIWLGFIAGLIAIVMVTIMLCCMTSCCSCLKGCCSCGSCCKFDEDDSEPVLKGVKLHYT

SEQ ID NO: 1263 - protein, 1273 aa, Artificial Sequence
  SARS-CoV-2/Australia/NSW56/2020__EPI_ISL_417408 spike protein (1-1273)(T874C_S1055C)
MFVFLVLLPLVSSQCVNLTTRTQLPPAYTNSFTRGVYYPDKVFRSSVLHSTQDLFLPFFSNVTWFHAIHVSGTNGTKRFDNPVLPFNDGVYFASTEKSNIIRGWIFGTTLDSKTQSLLIVNNATNVVIKVCEFQFCNDPFLGVYYHKNNKSWMESEFRVYSSANNCTFEYVSQPFLMDLEGKQGNFKNLREFVFKNIDGYFKIYSKHTPINLVRDLPQGFSALEPLVDLPIGINITRFQTLLALHRSYLTPGDSSSGWTAGAAAYYVGYLQPRTFLLKYNENGTITDAVDCALDPLSETKCTLKSFTVEKGIYQTSNFRVQPTESIVRFPNITNLCPFGEVFNATRFASVYAWNRKRISNCVADYSVLYNSASFSTFKCYGVSPTKLNDLCFTNVYADSFVIRGDEVRQIAPGQTGKIADYNYKLPDDFTGCVIAWNSNNLDSKVGGNYNYLYRLFRKSNLKPFERDISTEIYQAGSTPCNGVEGFNCYFPLQSYGFQPTNGVGYQPYRVVVLSFELLHAPATVCGPKKSTNLVKNKCVNFNFNGLTGTGVLTESNKKFLPFQQFGRDIADTTDAVRDPQTLEILDITPCSFGGVSVITPGTNTSNQVAVLYQDVNCTEVPVAIHADQLTPTWRVYSTGSNVFQTRAGCLIGAEHVNNSYECDIPIGAGICASYQTQTNSPRRARSVASQSIIAYTMSLGAENSVAYSNNSIAIPTNFTISVTTEILPVSMTKTSVDCTMYICGDSTECSNLLLQYGSFCTQLNRALTGIAVEQDKNTQEVFAQVKQIYKTPPIKDFGGFNFSQILPDSSKPSKRSFIEDLLFNKVTLADAGFIKQYGDCLGDIAARDLICAQKFNGLTVLPPLLTDEMIAQYCSALLAGTITSGWTFGAGAALQIPFAMQMAYRFNGIGVTQNVLYENQKLIANQFNSAIGKIQDSLSSTASALGKLQDVVNQNAQALNTLVKQLSSNFGAISSVLNDILSRLDKVEAEVQIDRLITGRLQSLQTYVTQQLIRAAEIRASANLAATKMSECVLGQSKRVDFCGKGYHLMSFPQCAPHGVVFLHVTYVPAQEKNFTTAPAICHDGKAHFPREGVFVSNGTHWFVTQRNFYEPQIITTDNTFVSGNCDVVIGIVNNTVYDPLQPELDSFKEELDKYFKNHTSPDVDLGDISGINASVVNIQKEIDRLNEVAKNLNESLIDLQELGKYEQYIKWPWYIWLGFIAGLIAIVMVTIMLCCMTSCCSCLKGCCSCGSCCKFDEDDSEPVLKGVKLHYT

SEQ ID NO: 1264 - protein, 1273 aa, Artificial Sequence
  SARS-CoV-2/Iceland/280/2020__EPI_ISL_417608 spike protein (1-1273)(T874C_S1055C)
MFVFLVLLPLVSSQCVNLTTRTQLPPAYTNSFTRGVYYPDKVFRSSVLHSTQDLFLPFFSNVTWFHAIHVSGTNGTKRFDNPVLPFNDGVYFASTEKSNIIRGWIFGTTLDSKTQSLLIVNNATNVVIKVCEFQFCNDPFLGVYYHKNNKSWMESEFRVYSSANNCTFEYVSQPFLMDLEGKQGNFKNLREFVFKNIDGYFKIYSKHTPINLVRDLPQGFSALEPLVDLPIGINITRFQTLLALHRSYLTPGDSSSGWTAGAAAYYVGYLQPRTFLLKYNENGTITDAVDCALDPLSETKCTLKSFTVEKGIYQTSNFRVQPTESIVRFPNITNLCPFGEVFNATRFASVYAWNRKRISNCVADYSVLYNSASFSTFKCYGVSPTKLNDLCFTNVYADSFVIRGDEVRQIAPGQTGKIADYNYKLPDDFTGCVIAWNSNNLDSKVGGNYNYLYRLFRKSNLKPFERDISTEIYQAGSTPCNGVEGFNCYFPLQSYGFQPTNGVGYQPYRVVVLSFELLHAPATVCGPKKSTNLVKNKCVNFNFNGLTGTGVLTESNKKFLPFQQFGRDIADTTDAVRDPQTLEILDITPCSFGGVSVITPGTNTSNQVAVLYQGVNCTEVPVAIHADQLTPTWRVYSTGSNVFQTRAGCLIGAEHVNNSYECDIPIGAGICASYHTQTNSPRRARSVASQSIIAYTMSLGAENSVAYSNNSIAIPTNFTISVTTEILPVSMTKTSVDCTMYICGDSTECSNLLLQYGSFCTQLNRALTGIAVEQDKNTQEVFAQVKQIYKTPPIKDFGGFNFSQILPDPSKPSKRSFIEDLLFNKVTLADAGFIKQYGDCLGDIAARDLICAQKFNGLTVLPPLLTDEMIAQYCSALLAGTITSGWTFGAGAALQIPFAMQMAYRFNGIGVTQNVLYENQKLIANQFNSAIGKIQDSLSSTASALGKLQDVVNQNAQALNTLVKQLSSNFGAISSVLNDILSRLDKVEAEVQIDRLITGRLQSLQTYVTQQLIRAAEIRASANLAATKMSECVLGQSKRVDFCGKGYHLMSFPQCAPHGVVFLHVTYVPAQEKNFTTAPAICHDGKAHFPREGVFVSNGTHWFVTQRNFYEPQIITTDNTFVSGNCDVVIGIVNNTVYDPLQPELDSFKEELDKYFKNHTSPDVDLGDISGINASVVNIQKEIDRLNEVAKNLNESLIDLQELGKYEQYIKWPWYIWLGFIAGLIAIVMVTIMLCCMTSCCSCLKGCCSCGSCCKFDEDDSEPVLKGVKLHYT

SEQ ID NO: 1265 - protein, 1273 aa, Artificial Sequence
  SARS-CoV-2/Iceland/247/2020__EPI_ISL_417575 spike protein (1-1273)(T874C_S1055C)
MFVFLVLLPLVSSQCVNLTTRTQLPPAYTNSFTRGVYYPDKVFRSSVLHSTQDLFLPFFSNVTWFHAIHVSGTNGTKRFDNPVLPFNDGVYFASTEKSNIIRGWIFGTTLDSKTQSLLIVNNATNVVIKVCEFQFCNDPFLGVYYHKNNKSWMESEFRVYSSANNCTFEYVSQPFLMDLEGKQGNFKNLREFVFKNIDGYFKIYSKHTPINLVRDLPQGFSALEPLVDLPIGINITRFQTLLALHRSYLTPGDSSSGWTAGAAAYYVGYLQPRTFLLKYNENGTITDAVDCALDPLSETKCTLKSFTVEKGIYQTSNFRVQPTESIVRFPNITNLCPFGEVFNATRFASVYAWNRKRISNCVADYSVLYNSASFSTFKCYGVSPTKLNDLCFTNVYADSFVIRGDEVRQIAPGQTGKIADYNYKLPDDFTGCVIAWNSNNLDSKVGGNYNYLYRLFRKSNLKPFERDISTEIYQAGSTPCNGVEGFNCYFPLQSYGFQPTNGVGYQPYRVVVLSFELLHAPATVCGPKKSTNLVKNKCVNFNFNGLTGTGVLTESNKKFLPFQQFGRDIADTTDAVRDPQTLEILDITPCSFGGVSVITPGTNTSNQVAVLYQGVNCTEVPVAIHADQLTPTWRVYSTGSNVFQTRAGCLIGAEHVNNSYECDIPIGAGICASYQTQTNSPRRARSVASQSIIAYTMSLGAENSVAYSNNSIAIPTNFTISVTTEILPVSMTKTSVDCTMYICGDSTECSNLLLQYGSFCTQLNRALTGIAVEQDKNTQEVFAQVKQIYKTPPIKDFGGFNFSQILPDPSKPSKRSFIEDLLFNKVTLADAGFIKQYGDCLGDIAARDLICAQKFNGLTVLPPLLTDEMIAQYCSALLAGTITSGWTFGAGAALQIPFAMQMAYRFNGIGVTQNVLYENQKLIANQFNSAIGKIQDSLSSTASALGKLQDVVNQNAQALNTLVKQLSSNFGAISSVLNDILSRLDKVEAEVQIDRLITGRLQSLQTYVTQQLIRAAEIRASANLAATKMSECVLGQSKRVDFCGKGYHLMSFPQCAPHGVVFLHVTYVPAQEKNFTTAPAICHDGKAHFPREGVFVSNGTHWFVTQRNFYEPQIITTDNTFVSGNCDVVIGIVNNTVYDPLQPELDSFKEELDKYFKNHTSPDVDLGDISGINASVVNIQKEIDRLNEVAKNLNESLIDLQELGKYEQYIKWPWYIWLGFIAGLIAIVIVTIMLCCMTSCCSCLKGCCSCGSCCKFDEDDSEPVLKGVKLHYT

SEQ ID NO: 1266 - protein, 1273 aa, Artificial Sequence
  SARS-CoV-2/Iceland/238/2020__EPI_ISL_417566 spike protein (1-1273)(T874C_S1055C)
MFVFLVLLPLVSSQCVNLTTRTQLPPAYTNSFTRGVYYPDKVFRSSVLHSTQDLFLPFFSNVTWFHAIHVSGTNGTKRFDNPVLPFNDGVYFASTEKSNIIRGWIFGTTLDSKTQSLLIVNNATNVVIKVCEFQFCNDPFLGVYYHKNNKSWMESEFRVYSSANNCTFEYVSQPFLMDLEGKQGNFKNLREFVFKNIDGYFKIYSKHTPINLVRDLPQGFSALEPLVDLPIGINITRFQTLLALHRSYLTPGDSSSGWTAGAAAYYVGYLQPRTFLLKYNENGTITDAVDCALDPLSETKCTLKSFTVEKGIYQTSNFRVQPTESIVRFPNITNLCPFGEVFNATRFASVYAWNRKRISNCVADYSVLYNSASFSTFKCYGVSPTKLNDLCFTNVYADSFVIRGDEVRQIAPGQTGKIADYNYKLPDDFTGCVIAWNSNNLDSKVGGNYNYLYRLFRKSNLKPFERDISTEIYQAGSTPCNGVEGFNCYFPLQSYGFQPTNGVGYQPYRVVVLSFELLHAPATVCGPKKSTNLVKNKCVNFNFNGLTGTGVLTESNKKFLPFQQFGRDIADTTDAVRDPQTLEILDITPCSFGGVSVITPGTNTSNQVAVLYQGVNCTEVPVAIHADQLTPTWRVYSTGSNVFQTRAGCLIGAEHVNNSYECDIPIGAGICASYQTQTNSPRRARSVASQSIIAYTMSLGAENSVAYSNNSIAIPTNFTISVTTEILPVSMTKTSVDCTMYICGDSTECSNLLLQYGSFCTQLNRALTGIAVEQDKNTQEVFAQVKQIYKTPPIKDFGGFNFSQILPDPSKPSKRSFIEDLLFNKVTLADVGFIKQYGDCLGDIAARDLICAQKFNGLTVLPPLLTDEMIAQYCSALLAGTITSGWTFGAGAALQIPFAMQMAYRFNGIGVTQNVLYENQKLIANQFNSAIGKIQDSLSSTASALGKLQDVVNQNAQALNTLVKQLSSNFGAISSVLNDILSRLDKVEAEVQIDRLITGRLQSLQTYVTQQLIRAAEIRASANLAATKMSECVLGQSKRVDFCGKGYHLMSFPQCAPHGVVFLHVTYVPAQEKNFTTAPAICHDGKAHFPREGVFVSNGTHWFVTQRNFYEPQIITTDNTFVSGNCDVVIGIVNNTVYDPLQPELDSFKEELDKYFKNHTSPDVDLGDISGINASVVNIQKEIDRLNEVAKNLNESLIDLQELGKYEQYIKWPWYIWLGFIAGLIAIVMVTIMLCCMTSCCSCLKGCCSCGSCCKFDEDDSEPVLKGVKLHYT

SEQ ID NO: 1267 - protein, 1273 aa, Artificial Sequence
  SARS-CoV-2/Greece/16/2020__EPI_ISL_418265 spike protein (1-1273)(T874C_S1055C)
MFVFLVLLPLVSSQCVNLTTRTQLPPAYTNSFTRGVYYPDKVFRSSVLHSTQDLFLPFFSNVTWFHAIHVSGTNGTKRFDNPVLPFNDGVYFASTEKSNIIRGWIFGTTLDSKTQSLLIVNNATNVVIKVCEFQFCNDPFLGVYYHKNNKSWMESEFRVYSSANNCTFEYVSQPFLMDLEGKQGNFKNLREFVFKNVDGYFKIYSKHTPINLVRDLPQGFSALEPLVDLPIGINITRFQTLLALHRSYLTPGDSSSGWTAGAAAYYVGYLQPRTFLLKYNENGTITDAVDCALDPLSETKCTLKSFTVEKGIYQTSNFRVQPTESIVRFPNITNLCPFGEVFNATRFASVYAWNRKRISNCVADYSVLYNSASFSTFKCYGVSPTKLNDLCFTNVYADSFVIRGDEVRQIAPGQTGKIADYNYKLPDDFTGCVIAWNSNNLDSKVGGNYNYLYRLFRKSNLKPFERDISTEIYQAGSTPCNGVEGFNCYFPLQSYGFQPTNGVGYQPYRVVVLSFELLHAPATVCGPKKSTNLVKNKCVNFNFNGLTGTGVLTESNKKFLPFQQFGRDIADTTDAVRDPQTLEILDITPCSFGGVSVITPGTNTSNQVAVLYQDVNCTEVPVAIHADQLTPTWRVYSTGSNVFQTRAGCLIGAEHVNNSYECDIPIGAGICASYQTQTNSPRRARSVASQSIIAYTMSLGAENSVAYSNNSIAIPTNFTISVTTEILPVSMTKTSVDCTMYICGDSTECSNLLLQYGSFCTQLNRALTGIAVEQDKNTQEVFAQVKQIYKTPPIKDFGGFNFSQILPDPSKPSKRSFIEDLLFNKVTLADAGFIKQYGDCLGDIAARDLICAQKFNGLTVLPPLLTDEMIAQYCSALLAGTITSGWTFGAGAALQIPFAMQMAYRFNGIGVTQNVLYENQKLIANQFNSAIGKIQDSLSSTASALGKLQDVVNQNAQALNTLVKQLSSNFGAISSVLNDILSRLDKVEAEVQIDRLITGRLQSLQTYVTQQLIRAAEIRASANLAATKMSECVLGQSKRVDFCGKGYHLMSFPQCAPHGVVFLHVTYVPAQEKNFTTAPAICHDGKAHFPREGVFVSNGTHWFVTQRNFYEPQIITTDNTFVSGNCDVVIGIVNNTVYDPLQPELDSFKEELDKYFKNHTSPDVDLGDISGINASVVNIQKEIDRLNEVAKNLNESLIDLQELGKYEQYIKWPWYIWLGFIAGLIAIVMVTIMLCCMTSCCSCLKGCCSCGSCCKFDEDDSEPVLKGVKLHYT

SEQ ID NO: 1268 - protein, 1273 aa, Artificial Sequence
  SARS-CoV-2/Iceland/319/2020__EPI_ISL_417648 spike protein (1-1273)(T874C_S1055C)
MFVFLVLLPLVSSQCVNLTTRTQLPPAYTNSFTRGVYYPDKVFRSSVLHSTQDLFLPFFSNVTWFHAIHVSGTNGTKRFDNPVLPFNDGVYFASTEKSNIIRGWIFGTTLDSKTQSLLIVNNATNVVIKVCEFQFCNDPFLGVYYHKNNKSWMESEFRVYSSANNCTFEYVSQPFLIDLEGKQGNFKNLREFVFKNIDGYFKIYSKHTPINLVRDLPQGFSALEPLVDLPIGINITRFQTLLALHRSYLTPGDSSSGWTAGAAAYYVGYLQPRTFLLKYNENGTITDAVDCALDPLSETKCTLKSFTVEKGIYQTSNFRVQPTESIVRFPNITNLCPFGEVFNATRFASVYAWNRKRISNCVADYSVLYNSASFSTFKCYGVSPTKLNDLCFTNVYADSFVIRGDEVRQIAPGQTGKIADYNYKLPDDFTGCVIAWNSNNLDSKVGGNYNYLYRLFRKSNLKPFERDISTEIYQAGSTPCNGVEGFNCYFPLQSYGFQPTNGVGYQPYRVVVLSFELLHAPATVCGPKKSTNLVKNKCVNFNFNGLTGTGVLTESNKKFLPFQQFGRDIADTTDAVRDPQTLEILDITPCSFGGVSVITPGTNTSNQVAVLYQGVNCTEVPVAIHADQLTPTWRVYSTGSNVFQTRAGCLIGAEHVNNSYECDIPIGAGICASYQTQTNSPRRARSVASQSIIAYTMSLGAENSVAYSNNSIAIPTNFTISVTTEILPVSMTKTSVDCTMYICGDSTECSNLLLQYGSFCTQLNRALTGIAVEQDKNTQEVFAQVKQIYKTPPIKDFGGFNFSQILPDPSKPSKRSFIEDLLFNKVTLADAGFIKQYGDCLGDIAARDLICAQKFNGLTVLPPLLTDEMIAQYCSALLAGTITSGWTFGAGAALQIPFAMQMAYRFNGIGVTQNVLYENQKLIANQFNSAIGKIQDSLSSTASALGKLQDVVNQNAQALNTLVKQLSSNFGAISSVLNDILSRLDKVEAEVQIDRLITGRLQSLQTYVTQQLIRAAEIRASANLAATKMSECVLGQSKRVDFCGKGYHLMSFPQCAPHGVVFLHVTYVPAQEKNFTTAPAICHDGKAHFPREGVFVSNGTHWFVTQRNFYEPQIITTDNTFVSGNCDVVIGIVNNTVYDPLQPELDSFKEELDKYFKNHTSPDVDLGDISGINASVVNIQKEIDRLNEVAKNLNESLIDLQELGKYEQYIKWPWYIWLGFIAGLIAIVMVTIMLCCMTSCCSCLKGCCSCGSCCKFDEDDSEPVLKGVKLHYT

SEQ ID NO: 1269 - protein, 1273 aa, Artificial Sequence
  SARS-CoV-2/Congo/94/2020__EPI_ISL_417947 spike protein (1-1273)(T874C_S1055C)
MFVFLVLLPLVSSQCVNLTTRTQLPPAYTNSFTRGVYYPDKVFRSSVLHSTQDLFLPFFSNVTWFHAIHVSGTNGTKRFDNPVLPFNDGVYFASTEKSNIIRGWIFGTTLDSKTQSLLIVNNATNVVIKVCEFQFCNDPFLGVYYHKNNKSWMESEFRVYSSANNCTFEYVSQPFLMDLEGKQGNFKNLREFVFKNIDGYFKIYSKHTPINLVRDLPQGFSALEPLVDLPIGINITRFQTLLALHRSYLTPGDSSSGWTAGAAAYYVGYLQPRTFLLKYNENGTITDAVDCALDPLSETKCTLKSFTVEKGIYQTSNFRVQPTESIVRFPNITNLCPFGEVFNATRFASVYAWNRKRISNCVADYSVLYNSASFSTFKCYGVSPTKLNDLCFTNVYADSFVIRGDEVRQIAPGQTGKIADYNYKLPDDFTGCVIAWNSNNLDSKVGGNYNYLYRLFRKSNLKPFERDISTEIYQAGSTPCNGVEGFNCYFPLQSYGFQPTNGVGYQPYRVVVLSFELLHAPATVCGPKKSTNLVKNKCVNFNFNGLTGTGVLTESNKKFLPFQQFGRDIADTTDAVRDPQTLEILDITPCSFGGVSVITPGTNTSNQVAVLYQGVNCTEVPVAIHADQLTPTWRVYSTGSNVFQTRAGCLIGAEHVNNSYECDIPIGAGICASYQTQTNSPRRARSVASQSIIAYTMSLGAENSVAYSNNSIAIPTNFTISVTTEILPVSMTKTSVDCTMYICGDSTECSNLLLQYGSFCTQLNRALTGIAVEQDKNTQEVFAQVKQIYKTPPIKDFGGFNFSQILPDPSKPSKRSFIEDILFNKVTLADAGFIKQYGDCLGDIAARDLICAQKFNGLTVLPPLLTDEMIAQYCSALLAGTITSGWTFGAGAALQIPFAMQMAYRFNGIGVTQNVLYENQKLIANQFNSAIGKIQDSLSSTASALGKLQDVVNQNAQALNTLVKQLSSNFGAISSVLNDILSRLDKVEAEVQIDRLITGRLQSLQTYVTQQLIRAAEIRASANLAATKMSECVLGQSKRVDFCGKGYHLMSFPQCAPHGVVFLHVTYVPAQEKNFTTAPAICHDGKAHFPREGVFVSNGTHWFVTQRNFYEPQIITTDNTFVSGNCDVVIGIVNNTVYDPLQPELDSFKEELDKYFKNHTSPDVDLGDISGINASVVNIQKEIDRLNEVAKNLNESLIDLQELGKYEQYIKWPWYIWLGFIAGLIAIVMVTIMLCCMTSCCSCLKGCCSCGSCCKFDEDDSEPVLKGVKLHYT

SEQ ID NO: 1270 - protein, 1273 aa, Artificial Sequence
  SARS-CoV-2/Congo/158/2020__EPI_ISL_417950 spike protein (1-1273)(T874C_S1055C)
MFVFLVLLPLVSSQCVNLTTRTQLPPAYTNSFTRGVYYPDKVFRSSVLHSTQDLFLPFFSNVTWFHAIHVSGTNGTKRFDNPVLPFNDGVYFASTEKSNIIRGWIFGTTLDSKTQSLLIVNNATNVVIKVCEFQFCNDPFLGVYYHKNNKSWMESEFRVYSSANNCTFEYVSQPFLMDLEGKQGNFKNLREFVFKNIDGYFKIYSKHTPINLVRDLPQGFSALEPLVDLPIGINITRFQTLLALHRSYLTPGDSSSGWTAGAAAYYVGYLQPRTFLLKYNENGTITDAVDCALDPLSETKCTLKSFTVEKGIYQTSNFRVQPTESIVRFPNITNLCPFGEVFNATRFASVYAWNRKRISNCVADYSVLYNSASFSTFKCYGVSPTKLNDLCFTNVYADSFVIRGDEVRQIAPGQTGKIADYNYKLPDDFTGCVIAWNSNNLDSKVGGNYNYLYRLFRKSNLKPFERDISTEIYQAGSTPCNGVEGFNCYFPLQSYGFQPTNGVGYQPYRVVVLSFELLHAPATVCGPKKSTNLVKNKCVNFNFNGLTGTGVLTESNKKFLPFQQFGRDIADTTDAVRDPQTLEILDITPCSFGGVSVITPGTNTSNQVAVLYQDVNCTEVPVAIHADQLTPTWRVYSTGSNVFQTRAGCLIGAEHVNNSYECDIPIGAGICASYQTQTNSPRRARSVASQSIIAYTMSLGAENSVAYSNNSIAIPTNFTISVTTEILPVSMTKTSVDCTMYICGDSTECSNLLLQYGSFCTQLNRALTGIAVEQDKNTQEVFAQVKQIYKTPPIKDFGGFNFSQILPDPSKPSKRSFIEDLLFNKVTLADAGFIKQYGDCLGDIAARDLICAQKFNGLTVLPPLLTDEMIAQYCSALLAGTITSGWTFGAGAALQIPFAMQMAYRFNGIGVTQNVLYENQKLIANQFNSAIGKIQDSLSSTASALGKLQDVVNQNAQALNTLVKQLSSNFGAISSVLNDILSRLDKVEAEVQIDRLITGRLQSLQTYVTQQLIRAAEIRASANLAATKMSECVLGQSKRVDFCGKGYHLMSFPQCAPHGVVFLHVTYVPAQEKNFTTAPAICHDGKAHFPREGVFVSNGTHWFVTQRNFYEPQIITTDNTFLSGNCDVVIGIVNNTVYDPLQPELDSFKEELDKYFKNHTSPDVDLGDISGINASVVNIQKEIDRLNEVAKNLNESLIDLQELGKYEQYIKWPWYIWLGFIAGLIAIVMVTIMLCCMTSCCSCLKGCCSCGSCCKFDEDDSEPVLKGVKLHYT

SEQ ID NO: 1271 - protein, 1273 aa, Artificial Sequence
  SARS-CoV-2/USA/UT-00034/2020__EPI_ISL_417977 spike protein (1-1273)(T874C_S1055C)
MFVFLVLLPLVSSQCVNLTTRTQLPPAYTNSFTRGVYYPDKVFRSSVLHSTQDLFLPFFSNVTWFHAIHVSGTNGTKRFDNPVLPFNDGVYFASTEKSNIIRGWIFGTTLDSKTQSLLIVNNATNVVIKVCEFQFCNDPFLGVYYYKNNKSWMESEFRVYSSANNCTFEYVSQPFLMDLEGKQGNFKNLREFVFKNIDGYFKIYSKHTPINLVRDLPQGFSALEPLVDLPIGINITRFQTLLALHRSYLTPGDSSSGWTAGAAAYYVGYLQPRTFLLKYNENGTITDAVDCALDPLSETKCTLKSFTVEKGIYQTSNFRVQPTESIVRFPNITNLCPFGEVFNATRFASVYAWNRKRISNCVADYSVLYNSASFSTFKCYGVSPTKLNDLCFTNVYADSFVIRGDEVRQIAPGQTGKIADYNYKLPDDFTGCVIAWNSNNLDSKVGGNYNYLYRLFRKSNLKPFERDISTEIYQAGSTPCNGVEGFNCYFPLQSYGFQPTNGVGYQPYRVVVLSFELLHAPATVCGPKKSTNLVKNKCVNFNFNGLTGTGVLTESNKKFLPFQQFGRDIADTTDAVRDPQTLEILDITPCSFGGVSVITPGTNTSNQVAVLYQGVNCTEVPVAIHADQLTPTWRVYSTGSNVFQTRAGCLIGAEHVNNSYECDIPIGAGICASYQTQTNSPRRARSVASQSIIAYTMSLGAENSVAYSNNSIAIPTNFTISVTTEILPVSMTKTSVDCTMYICGDSTECSNLLLQYGSFCTQLNRALTGIAVEQDKNTQEVFAQVKQIYKTPPIKDFGGFNFSQILPDPSKPSKRSFIEDLLFNKVTLADAGFIKQYGDCLGDIAARDLICAQKFNGLTVLPPLLTDEMIAQYCSALLAGTITSGWTFGAGAALQIPFAMQMAYRFNGIGVTQNVLYENQKLIANQFNSAIGKIQDSLSSTASALGKLQDVVNQNAQALNTLVKQLSSNFGAISSVLNDILSRLDKVEAEVQIDRLITGRLQSLQTYVTQQLIRAAEIRASANLAATKMSECVLGQSKRVDFCGKGYHLMSFPQCAPHGVVFLHVTYVPAQEKNFTTAPAICHDGKAHFPREGVFVSNGTHWFVTQRNFYEPQIITTDNTFVSGNCDVVIGIVNNTVYDPLQPELDSFKEELDKYFKNHTSPDVDLGDISGINASVVNIQKEIDRLNEVAKNLNESLIDLQELGKYEQYIKWPWYIWLGFIAGLIAIVMVTIMLCCMTSCCSCLKGCCSCGSCCKFDEDDSEPVLKGVKLHYT

SEQ ID NO: 1272 - protein, 1273 aa, Artificial Sequence
  SARS-CoV-2/USA/UT-00033/2020__EPI_ISL_417976 spike protein (1-1273)(T874C_S1055C)
MFVFLVLLPLVSSQCVNLTTRTQLPPAYTNSFTRGVYYPDKVFRSSVLHSTQDLFLPFFSNVTWFHAIHVSGTNGTKRFDNPVLPFNDGVYFASTEKSNIIRGWIFGTTLDSKTQSLLIVNNATNVVIKVCEFQFCNDPFLGVYYHKNNKSWMESEFRVYSSANNCTFEYVSQPFLMDLEGKQGNFKNLREFVFKNIDGYFKIYSKHTPINLVRDLPQGFSALEPLVDLPIGINITRFQTLLALHRSYLTPGDSSSGLTAGAAAYYVGYLQPRTFLLKYNENGTITDAVDCALDPLSETKCTLKSFTVEKGIYQTSNFRVQPTESIVRFPNITNLCPFGEVFNATRFASVYAWNRKRISNCVADYSVLYNSASFSTFKCYGVSPTKLNDLCFTNVYADSFVIRGDEVRQIAPGQTGKIADYNYKLPDDFTGCVIAWNSNNLDSKVGGNYNYLYRLFRKSNLKPFERDISTEIYQAGSTPCNGVEGFNCYFPLQSYGFQPTNGVGYQPYRVVVLSFELLHAPATVCGPKKSTNLVKNKCVNFNFNGLTGTGVLTESNKKFLPFQQFGRDIADTTDAVRDPQTLEILDITPCSFGGVSVITPGTNTSNQVAVLYQGVNCTEVPVAIHADQLTPTWRVYSTGSNVFQTRAGCLIGAEHVNNSYECDIPIGAGICASYQTQTNSPRRARSVASQSIIAYTMSLGAENSVAYSNNSIAIPTNFTISVTTEILPVSMTKTSVDCTMYICGDSTECSNLLLQYGSFCTQLNRALTGIAVEQDKNTQEVFAQVKQIYKTPPIKDFGGFNFSQILPDPSKPSKRSFIEDLLFNKVTLADAGFIKQYGDCLGDIAARDLICAQKFNGLTVLPPLLTDEMIAQYCSALLAGTITSGWTFGAGAALQIPFAMQMAYRFNGIGVTQNVLYENQKLIANQFNSAIGKIQDSLSSTASALGKLQDVVNQNAQALNTLVKQLSSNFGAISSVLNDILSRLDKVEAEVQIDRLITGRLQSLQTYVTQQLIRAAEIRASANLAATKMSECVLGQSKRVDFCGKGYHLMSFPQCAPHGVVFLHVTYVPAQEKNFTTAPAICHDGKAHFPREGVFVSNGTHWFVTQRNFYEPQIITTDNTFVSGNCDVVIGIVNNTVYDPLQPELDSFKEELDKYFKNHTSPDVDLGDISGINASVVNIQKEIDRLNEVAKNLNESLIDLQELGKYEQYIKWPWYIWLGFIAGLIAIVMVTIMLCCMTSCCSCLKGCCSCGSCCKFDEDDSEPVLKGVKLHYT

SEQ ID NO: 1273 - protein, 1273 aa, Artificial Sequence
  SARS-CoV-2/USA/WI-13/2020__EPI_ISL_417516 spike protein (1-1273)(T874C_S1055C)
MFVFLVLLPLVSSQCVNLTTRTQLPPAYTNSFTRGVYYPDKVFRSSVLHSTQDLFLPFFSNVTWFHAIHVSGTNGTKRFDNPVLPFNDGVYFASTEKSNIIRGWIFGTTLDSKTQSLLIVNNATNVVIKVCEFQFCNDPFLGVYYHKNNKSWMESEFRVYSSANNCTFEYVSQPFLMDLEGKQGNFKNLREFVFKNIDGYFKIYSKHTPINLVRDLPQGFSALEPLVDLPIGINITRFQTLLALHRSYLTPGDSSSGWTAGAAAYYVGYLQPRTFLLKYNENGTITDAVDCALDPLSETKCTLKSFTVEKGIYQTSNFRVLPTESIVRFPNITNLCPFGEVFNATRFASVYAWNRKRISNCVADYSVLYNSASFSTFKCYGVSPTKLNDLCFTNVYADSFVIRGDEVRQIAPGQTGKIADYNYKLPDDFTGCVIAWNSNNLDSKVGGNYNYLYRLFRKSNLKPFERDISTEIYQAGSTPCNGVEGFNCYFPLQSYGFQPTNGVGYQPYRVVVLSFELLHAPATVCGPKKSTNLVKNKCVNFNFNGLTGTGVLTESNKKFLPFQQFGRDIADTTDAVRDPQTLEILDITPCSFGGVSVITPGTNTSNQVAVLYQGVNCTEVPVAIHADQLTPTWRVYSTGSNVFQTRAGCLIGAEHVNNSYECDIPIGAGICASYQTQTNSPRRARSVASQSIIAYTMSLGAENSVAYSNNSIAIPTNFTISVTTEILPVSMTKTSVDCTMYICGDSTECSNLLLQYGSFCTQLNRALTGIAVEQDKNTQEVFAQVKQIYKTPPIKDFGGFNFSQILPDPSKPSKRSFIEDLLFNKVTLADAGFIKQYGDCLGDIAARDLICAQKFNGLTVLPPLLTDEMIAQYCSALLAGTITSGWTFGAGAALQIPFAMQMAYRFNGIGVTQNVLYENQKLIANQFNSAIGKIQDSLSSTASALGKLQDVVNQNAQALNTLVKQLSSNFGAISSVLNDILSRLDKVEAEVQIDRLITGRLQSLQTYVTQQLIRAAEIRASANLAATKMSECVLGQSKRVDFCGKGYHLMSFPQCAPHGVVFLHVTYVPAQEKNFTTAPAICHDGKAHFPREGVFVSNGTHWFVTQRNFYEPQIITTDNTFVSGNCDVVIGIVNNTVYDPLQPELDSFKEELDKYFKNHTSPDVDLGDISGINASVVNIQKEIDRLNEVAKNLNESLIDLQELGKYEQYIKWPWYIWLGFIAGLIAIVMVTIMLCCMTSCCSCLKGCCSCGSCCKFDEDDSEPVLKGVKLHYT

SEQ ID NO: 1274 - protein, 1272 aa, Artificial Sequence
  SARS-CoV-2/India/1-27/2020__EPI_ISL_413522 spike protein (1-1272)(T873C_S1054C)
MFVFLVLLPLVSSQCVNLTTRTQLPPAYTNSFTRGVYYPDKVFRSSVLHSTQDLFLPFFSNVTWFHAIHVSGTNGTKRFDNPVLPFNDGVYFASTEKSNIIRGWIFGTTLDSKTQSLLIVNNATNVVIKVCEFQFCNDPFLGVYHKNNKSWMESEFRVYSSANNCTFEYVSQPFLMDLEGKQGNFKNLREFVFKNIDGYFKIYSKHTPINLVRDLPQGFSALEPLVDLPIGINITRFQTLLALHRSYLTPGDSSSGWTAGAAAYYVGYLQPRTFLLKYNENGTITDAVDCALDPLSETKCTLKSFTVEKGIYQTSNFRVQPTESIVRFPNITNLCPFGEVFNATRFASVYAWNRKRISNCVADYSVLYNSASFSTFKCYGVSPTKLNDLCFTNVYADSFVIRGDEVIQIAPGQTGKIADYNYKLPDDFTGCVIAWNSNNLDSKVGGNYNYLYRLFRKSNLKPFERDISTEIYQAGSTPCNGVEGFNCYFPLQSYGFQPTNGVGYQPYRVVVLSFELLHAPATVCGPKKSTNLVKNKCVNFNFNGLTGTGVLTESNKKFLPFQQFGRDIADTTDAVRDPQTLEILDITPCSFGGVSVITPGTNTSNQVAVLYQDVNCTEVPVAIHADQLTPTWRVYSTGSNVFQTRAGCLIGAEHVNNSYECDIPIGAGICASYQTQTNSPRRARSVASQSIIAYTMSLGAENSVAYSNNSIAIPTNFTISVTTEILPVSMTKTSVDCTMYICGDSTECSNLLLQYGSFCTQLNRALTGIAVEQDKNTQEVFAQVKQIYKTPPIKDFGGFNFSQILPDPSKPSKRSFIEDLLFNKVTLADAGFIKQYGDCLGDIAARDLICAQKFNGLTVLPPLLTDEMIAQYCSALLAGTITSGWTFGAGAALQIPFAMQMAYRFNGIGVTQNVLYENQKLIANQFNSAIGKIQDSLSSTASALGKLQDVVNQNAQALNTLVKQLSSNFGAISSVLNDILSRLDKVEAEVQIDRLITGRLQSLQTYVTQQLIRAAEIRASANLAATKMSECVLGQSKRVDFCGKGYHLMSFPQCAPHGVVFLHVTYVPAQEKNFTTAPAICHDGKAHFPREGVFVSNGTHWFVTQRNFYEPQIITTDNTFVSGNCDVVIGIVNNTVYDPLQPELDSFKEELDKYFKNHTSPDVDLGDISGINASVVNIQKEIDRLNEVAKNLNESLIDLQELGKYEQYIKWPWYIWLGFIAGLIAIVMVTIMLCCMTSCCSCLKGCCSCGSCCKFDEDDSEPVLKGVKLHYT

SEQ ID NO: 1275 - protein, 1267 aa, Artificial Sequence
  SARS-CoV-2/pangolin/Guangxi/P4L/2017__EPI_ISL_410538 spike protein (1-1267)(T868C_S1049C)
MFVFLFVLPLVSSQCVNLTTRTGIPPGYTNSSTRGVYYPDKVFRSSILHLTQDLFLPFFSNVTWFNTINYQGGFKKFDNPVLPFNDGVYFASTEKSNIIRGWIFGTTLDARTQSLLIVNNATNVVIKVCEFQFCTDPFLGVYYHNNNKTWVENEFRVYSSANNCTFEYISQPFLMDLEGKQGNFKNLREFVFKNVDGYFKIYSKHTPIDLVRDLPRGFAALEPLVDLPIGINITRFQTLLALHRSYLTPGNLESGWTTGAAAYYVGYLQQRTFLLSYNQNGTITDAVDCSLDPLSETKCTLKSLTVEKGIYQTSNFRVQPTISIVRFPNITNLCPFGEVFNASKFASVYAWNRKRISNCVADYSVLYNSTSFSTFKCYGVSPTKLNDLCFTNVYADSFVVKGDEVRQIAPGQTGVIADYNYKLPDDFTGCVIAWNSVKQDALTGGNYGYLYRLFRKSKLKPFERDISTEIYQAGSTPCNGQVGLNCYYPLERYGFHPTTGVNYQPFRVVVLSFELLNGPATVCGPKLSTTLVKDKCVNFNFNGLTGTGVLTTSKKQFLPFQQFGRDISDTTDAVRDPQTLEILDITPCSFGGVSVITPGTNTSNQVAVLYQDVNCTEVPMAIHAEQLTPAWRVYSAGANVFQTRAGCLVGAEHVNNSYECDIPVGAGICASYHSMSSLRSVNQRSIIAYTMSLGAENSVAYSNNSIAIPTNFTISVTTEILPVSMTKTSVDCTMYICGDSIECSNLLLQYGSFCTQLNRALTGIAVEQDKNTQEVFAQVKQIYKTPPIKDFGGFNFSQILPDPSKPSKRSFIEDLLFNKVTLADAGFIKQYGDCLGDIAARDLICAQKFNGLTVLPPLLTDEMIAQYCSALLAGTITSGWTFGAGAALQIPFAMQMAYRFNGIGVTQNVLYENQKLIANQFNSAIGKIQDSLSSTASALGKLQDVVNQNAQALNTLVKQLSSNFGAISSVLNDILSRLDKVEAEVQIDRLITGRLQSLQTYVTQQLIRAAEIRASANLAATKMSECVLGQSKRVDFCGKGYHLMSFPQCAPHGVVFLHVTYVPAQEKNFTTAPAICHEGKAHFPREGVFVSNGTHWFITQRNFYEPQIITTDNTFVSGSCDVVIGIVNNTVYDPLQPELDSFKEELDKYFKNHTSPDVDLGDISGINASVVNIQKEIDRLNEVAKNLNESPIDLQELGKYEQYIKWPWYIWLGFIAGLIAIIMVTIMLCCMTSCCSCLKGCCSCGSCCKFDEDDSEPVLKGVKLHYT

SEQ ID NO: 1276 - protein, 1267 aa, Artificial Sequence
  SARS-CoV-2/pangolin/Guangxi/P5L/2017__EPI_ISL_410540 spike protein (1-1267)(T868C_S1049C)
MFVFLFVLPLVSSQCVNLTTRTGIPPGYTNSSTRGVYYPDKVFRSSILHLTQDLFLPFFSNVTWFNTINYQGGFKKFDNPVLPFNDGVYFASTEKSNIIRGWIFGTTLDARTQSLLIVNNATNVVIKVCEFQFCTDPFLGVYYHNNNKTWVENEFRVYSSANNCTFEYISQPFLMDLEGKQGNFKNLREFVFKNVDGYFKIYSKHTPIDLVRDLPRGFAALEPLVDLPIGINITRFQTLLALHRSYLTPGKLESGWTTGAAAYYVGYLQQRTFLLSYNQNGTITDAVDCSLDPLSETKCTLKSLTVEKGIYQTSNFRVQPTISIVRFPNITNLCPFGEVFNASKFASVYAWNRKRISNCVADYSVLYNSTSFSTFKCYGVSPTKLNDLCFTNVYADSFVVKGDEVRQIAPGQTGVIADYNYKLPDDFTGCVIAWNSVKQDALTGGNYGYLYRLFRKSKLKPFERDISTEIYQAGSTPCNGQVGLNCYYPLERYGFHPTTGVNYQPFRVVVLSFELLNGPATVCGPKLSTTLVKDKCVNFNFNGLTGTGVLTTSKKQFLPFQQFGRDISDTTDAVRDPQTLEILDITPCSFGGVSVITPGTNTSNQVAVLYQDVNCTEVPMAIHAEQLTPAWRVYSAGANVFQTRAGCLVGAEHVNNSYECDIPVGAGICASYHSMSSFRSVNQRSIIAYTMSLGAENSVAYSNNSIAIPTNFTISVTTEILPVSMTKTSVDCTMYICGDSIECSNLLLQYGSFCTQLNRALTGIAVEQDKNTQEVFAQVKQIYKTPPIKDFGGFNFSQILPDPSKPSKRSFIEDLLFNKVTLADAGFIKQYGDCLGDIAARDLICAQKFNGLTVLPPLLTDEMIAQYCSALLAGTITSGWTFGAGAALQIPFAMQMAYRFNGIGVTQNVLYENQKLIANQFNSAIGKIQDSLSSTASALGKLQDVVNQNAQALNTLVKQLSSNFGAISSVLNDILSRLDKVEAEVQIDRLITGRLQSLQTYVTQQLIRAAEIRASANLAATKMSECVLGQSKRVDFCGKGYHLMSFPQCAPHGVVFLHVTYVPAQEKNFTTAPAICHEGKAHFPREGVFVSNGTHWFITQRNFYEPQIITTDNTFVSGSCDVVIGIVNNTVYDPLQPELDSFKEELDKYFKNHTSPDVDLGDISGINASVVNIQKEIDRLNEVAKNLNESLIDLQELGKYEQYIKWPWYIWLGFIAGLIAIIMVTIMLCCMTSCCSCLKGCCSCGSCCKFDEDDSEPVLKGVKLHYT

SEQ ID NO: 1277 - protein, 1267 aa, Artificial Sequence
  SARS-CoV-2/pangolin/Guangxi/P5E/2017__EPI_ISL_410541 spike protein (1-1267)(T868C_S1049C)
MFVFLFVLPLVSSQCVNLTTRTGIPPGYTNSSTRGVYYPDKVFRSSILHLTQDLFLPFFSNVTWFNTITYQGGSKKFDNPVLPFNDGVYFASTEKSNIIRGWIFGTTLDARTQSLLIVNNATNVVIKVCEFQFCTDPFLGVYYHNNNKTWVENEFRVYSSANNCTFEYISQPFLMDLEGKQGNFKNLREFVFKNVDGYFKIYSKHTPIDLVRDLPRGFAALEPLVDLPIGINITRFQTLLALHRSYLTPGKLESGWTTGAAAYYVGYLQQRTFLLSYNQNGTITDAVDCSLDPLSETKCTLKSLTVEKGIYQTSNFRVQPTISIVRFPNITNLCPFGEVFNASKFASVYAWNRKRISNCVADYSVLYNSTSFSTFKCYGVSPTKLNDLCFTNVYADSFVVKGDEVRQIAPGQTGVIADYNYKLPDDFTGCVIAWNSVKQDALTGDNYGYLYRLFRKSKLKPFERDISTEIYQAGSTPCNGQVGLNCYYPLERYGFHPTTGVNYQPFRVVVLSFELLNGPATVCGPKLSTTLVKDKCVNFNFNGLTGTGVLTTSKKQFLPFQQFGRDISDTTDAVRDPQTLEILDITPCSFGGVSVITPGTNTSNQVAVLYQDVNCTEVPMAIHAEQLTPAWRVYSAGANVFQTRAGCLVGAEHVNNSYECDIPVGAGICASYHSMSSFRSVNQRSIIAYTMSLGAENSVAYSNNSIAIPTNFTISVTTEILPVSMTKTSVDCTMYICGDSIECSNLLLQYGSFCTQLNRALTGIAVEQDKNTQEVFAQVKQIYKTPPIKDFGGFNFSQILPDPSKPSKRSFIEDLLFNKVTLADAGFIKQYGDCLGDIAARDLICAQKFNGLTVLPPLLTDEMIAQYCSALLAGTITSGWTFGAGAALQIPFAMQMAYRFNGIGVTQNVLYENQKLIANQFNSAIGKIQDSLSSTASALGKLQDVVNQNAQALNTLVKQLSSNFGAISSVLNDILSRLDKVEAEVQIDRLITGRLQSLQTYVTQQLIRAAEIRASANLAATKMSECVLGQSKRVDFCGKGYHLMSFPQCAPHGVVFLHVTYVPAQEKNFTTAPAICHEGKAHFPREGVFVSNGTHWFITQRNFYEPQIITTDNTFVSGSCDVVIGIVNNTVYDPLQPELDSFKEELDKYFKNHTSPDVDLGDISGINASVVNIQKEIDRLNEVAKNLNESLIDLQELGKYEQYIKWPWYIWLGFIAGLIAIIMVTIMLCCMTSCCSCLKGCCSCGSCCKFDEDDSEPVLKGVKLHYT

SEQ ID NO: 1278 - protein, 1265 aa, Artificial Sequence
  SARS-CoV-2/pangolin/Guangxi/P1E/2017__EPI_ISL_410539 spike protein (1-1265)(T866C_S1047C)
MFVFLFVLPLVSSQCVNLTTRTGIQPGYTNSSTRGVYYPDKVFRSSILHLTQDLFLPFFSNVTWFNTINYQGGFKKFDNPVLPFNDGVYFASTEKSNIIRGWIFGTTLDARTQSLLIVNNATNVVIKVCEFQFCTDPFLGVYYHNNNKTWVENEFRVYSSANNCTFEYISQPFLMDLEGKQGNFKNLREFVFKNVDGYFKIYSKHTPIDLVRDLPRGFAALEPLVDLPIGINITRFQTLLALHRSYLTPGKLESGWTTGAAAYYVGYLQQRTFLLSYNQNGTITDAVDCSLDPLSETKCTLKSLTVEKGIYQTSNFRVQPTISIVRFPNITNLCPFGEVFNASKFASVYAWNRKRISNCVADYSVLYNSTSFSTFKCYGVSPTKLNDLCFTNVYADSFVVKGDEVRQIAPGQTGVIADYNYKLPDDFTGCVIAWNSVKQDALTGGNYLYRLFRKSKLKPFERDISTEIYQAGSTPCNGQVGLNCYYPLERYGFHPTTGVNYQPFRVVVLSFELLNGPATVCGPKLSTTLVKDKCVNFNFNGLTGTGVLTTSKKQFLPFQQFGRDISDTTDAVRDPQTLEILDITPCSFGGVSVITPGTNTSNQVAVLYQDVNCTEVPMAIHAEQLTPAWRVYSAGANVFQTRAGCLVGAEHVNNSYECDIPVGAGICASYHSMSSLRSVNQRSIIAYTMSLGAENSVAYSNNSIAIPTNFTISVTTEILPVSMTKTSVDCTMYICGDSIECSNLLLQYGSFCTQLNRALTGIAVEQDKNTQEVFAQVKQIYKTPPIKDFGGFNFSQILPDPSKPSKRSFIEDLLFNKVTLADAGFIKQYGDCLGDIAARDLICAQKFNGLTVLPPLLTDEMIAQYCSALLAGTITSGWTFGAGAALQIPFAMQMAYRFNGIGVTQNVLYENQKLIANQFNSAIGKIQDSLSSTASALGKLQDVVNQNAQALNTLVKQLSSNFGAISSVLNDILSRLDKVEAEVQIDRLITGRLQSLQTYVTQQLIRAAEIRASANLAATKMSECVLGQSKRVDFCGKGYHLMSFPQCAPHGVVFLHVTYVPAQEKNFTTAPAICHEGKAHFPREGVFVSNGTHWFITQRNFYEPQIITTDNTFVSGSCDVVIGIVNNTVYDPLQPELDSFKEELDKYFKNHTSPDVDLGDISGINASVVNIQKEIDRLNEVAKNLNESLIDLQELGKYEQYIKWPWYIWLGFIAGLIAIIMVTIMLCCMTSCCSCLKGCCSCGSCCKFDEDDSEPVLKGVKLHYT

SEQ ID NO: 1279 - protein, 681 aa, Artificial Sequence; identical to SEQ ID NO: 27
  SARS-CoV-2/Wuhan/WIV05/2019__EPI_ISL_402128 spike protein (1-681)

SEQ ID NO: 1280 - protein, 680 aa, Artificial Sequence
  SARS-CoV-2/bat/Yunnan/RaTG13/2013__EPI_ISL_402131 spike protein (1-680)
MFVFLVLLPLVSSQCVNLTTRTQLPPAYTNSSTRGVYYPDKVFRSSVLHLTQDLFLPFFSNVTWFHAIHVSGTNGIKRFDNPVLPFNDGVYFASTEKSNIIRGWIFGTTLDSKTQSLLIVNNATNVVIKVCEFQFCNDPFLGVYYHKNNKSWMESEFRVYSSANNCTFEYVSQPFLMDLEGKQGNFKNLREFVFKNIDGYFKIYSKHTPINLVRDLPPGFSALEPLVDLPIGINITRFQTLLALHRSYLTPGDSSSGWTAGAAAYYVGYLQPRTFLLKYNENGTITDAVDCALDPLSETKCTLKSFTVEKGIYQTSNFRVQPTDSIVRFPNITNLCPFGEVFNATTFASVYAWNRKRISNCVADYSVLYNSTSFSTFKCYGVSPTKLNDLCFTNVYADSFVITGDEVRQIAPGQTGKIADYNYKLPDDFTGCVIAWNSKHIDAKEGGNFNYLYRLFRKANLKPFERDISTEIYQAGSKPCNGQTGLNCYYPLYRYGFYPTDGVGHQPYRVVVLSFELLNAPATVCGPKKSTNLVKNKCVNFNFNGLTGTGVLTESNKKFLPFQQFGRDIADTTDAVRDPQTLEILDITPCSFGGVSVITPGTNASNQVAVLYQDVNCTEVPVAIHADQLTPTWRVYSTGSNVFQTRAGCLIGAEHVNNSYECDIPIGAGICASYQTQTNS

SEQ ID NO: 1281 - protein, 681 aa, Artificial Sequence
  SARS-CoV-2/Wuhan/HBCDC-HB-01/2019__EPI_ISL_402132 spike protein (1-681)
MFVFLVLLPLVSSQCVNLTTRTQLPPAYTNSITRGVYYPDKVFRSSVLHSTQDLFLPFFSNVTWFHAIHVSGTNGTKRFDNPVLPFNDGVYFASTEKSNIIRGWIFGTTLDSKTQSLLIVNNATNVVIKVCEFQFCNDPFLGVYYHKNNKSWMESEFRVYSSANNCTFEYVSQPFLMDLEGKQGNFKNLREFVFKNIDGYFKIYSKHTPINLVRDLPQGFSALEPLVDLPIGINITRFQTLLALHRSYLTPGDSSSGWTAGAAAYYVGYLQPRTFLLKYNENGTITDAVDCALDPLSETKCTLKSFTVEKGIYQTSNFRVQPTESIVRFPNITNLCPFGEVFNATRFASVYAWNRKRISNCVADYSVLYNSASFSTFKCYGVSPTKLNDLCFTNVYADSFVIRGDEVRQIAPGQTGKIADYNYKLPDDFTGCVIAWNSNNLDSKVGGNYNYLYRLFRKSNLKPFERDISTEIYQAGSTPCNGVEGFNCYFPLQSYGFQPTNGVGYQPYRVVVLSFELLHAPATVCGPKKSTNLVKNKCVNFNFNGLTGTGVLTESNKKFLPFQQFGRDIADTTDAVRDPQTLEILDITPCSFGGVSVITPGTNTSNQVAVLYQDVNCTEVPVAIHADQLTPTWRVYSTGSNVFQTRAGCLIGAEHVNNSYECDIPIGAGICASYQTQTNSP

SEQ ID NO: 1282 - protein, 681 aa, Artificial Sequence
  SARS-CoV-2/Guangdong/20SF028/2020__EPI_ISL_403936 spike protein (1-681)
MFVFLVLLPLVSSQCVNLTTRTQLPPAYTNSFTRGVYYPDKVFRSSVLYSTQDLFLPFFSNVTWFHAIHVSGTNGTKRFDNPVLPFNDGVYFASTEKSNIIRGWIFGTTLDSKTQSLLIVNNATNVVIKVCEFQFCNDPFLGVYYHKNNKSWMESEFRVYSSANNCTFEYVSQPFLMDLEGKQGNFKNLREFVFKNIDGYFKIYSKHTPINLVRDLPQGFSALEPLVDLPIGINITRFQTLLALHRSYLTPGDSSSGWTAGAAAYYVGYLQPRTFLLKYNENGTITDAVDCALDPLSETKCTLKSFTVEKGIYQTSNFRVQPTESIVRFPNITNLCPFGEVFNATRFASVYAWNRKRISNCVADYSVLYNSASFSTFKCYGVSPTKLNDLCFTNVYADSFVIRGDEVRQIAPGQTGKIADYNYKLPDDFTGCVIAWNSNNLDSKVGGNYNYLYRLFRKSNLKPFERDISTEIYQAGSTPCNGVEGFNCYFPLQSYGFQPTNGVGYQPYRVVVLSFELLHAPATVCGPKKSTNLVKNKCVNFNFNGLTGTGVLTESNKKFLPFQQFGRDIADTTDAVRDPQTLEILDITPCSFGGVSVITPGTNTSNQVAVLYQDVNCTEVPVAIHADQLTPTWRVYSTGSNVFQTRAGCLIGAEHVNNSYECDIPIGAGICASYQTQTNSP

SEQ ID NO: 1283 - protein, 681 aa, Artificial Sequence; identical to SEQ ID NO: 27
  SARS-CoV-2/Shenzhen/SZTH-001/2020__EPI_ISL_406592 spike protein (1-681)

SEQ ID NO: 1284 - protein, 681 aa, Artificial Sequence
  SARS-CoV-2/Shenzhen/SZTH-004/2020__EPI_ISL_406595 spike protein (1-681)
MFVFLVLLPLVSSQCVNLTTRTQLPPAYTNSFTRGVYYPDKVFRSSVLHSTQDLFLPFFSNVTWFHAIHVSGTNGTKRFDNPVLPFNDGVYFASTEKSNIIRGWIFGTTLDSKTQSLLIVNNATNVVIKVCEFQFCNDPFLGVYYHKNNKSWMESEFRVYSSANNCTFEYVSQPFLMDLEGKQGNFKNLREFVFKNIDGYFKIYSKHTPINLVRDLPQGFSALEPLVDLPIGINITRFQTLLALHRSYLTPGDSSSGWTAGAAAYYVGYLQPRTFLLKYNENGTITDAVDCALDPLSETKCTLKSFTVEKGIYQTSNFRVQPTESIVRFPNITNLCPFGEVFNATRFASVYAWDRKRISNCVAYYSVLYNSASFSTFKCYGVSPTKLNDLCFTNVYADSFVIRGDEVRQIAPGQTGKIADYNYKLPDDFTGCVIAWNSNNLDSKVGGNYNYLYRLFRKSNLKPFERDISTEIYQAGSTPCNGVEGFNCYFPLQSYGFQPTNGVGYQPYRVVVLSFELLHAPATVCGPKKSTNLVKNKCVNFNFNGLTGTGVLTESNKKFLPFQQFGRDIADTTDAVRDPQTLEILDITPCSFGGVSVITPGTNTSNQVAVLYQDVNCTEVPVAIHADQLTPTWRVYSTGSNVFQTRAGCLIGAEHVNNSYECDIPIGAGICASYQTQTNSP

SEQ ID NO: 1285 - protein, 681 aa, Artificial Sequence
  SARS-CoV-2/France/IDF0372/2020__EPI_ISL_406596 spike protein (1-681)
MFVFLVLLPLVSSQCVNLTTRTQLPPAYTNSFTRGVYYPDKVFRSSVLHSTQDLFLPFFSNVTWFHAIHVSGTNGTKRFDNPVLPFNDGVYFASTEKSNIIRGWIFGTTLDSKTQSLLIVNNATNVVIKVCEFQFCNDPFLGVYYHKNNKSWMESEFRVYSSANNCTFEYVSQPFLMDLEGKQGNFKNLREFVFKNIDGYFKIYSKHTPINLVRDLPQGFSALEPLVDLPIGINITRFQTLLALHRSYLTPGDSSSGWTAGAAAYYVGYLQPRTFLLKYNENGTITDAVDCALDPLSETKCTLKSFTVEKGIYQTSNFRVQPTESIVRFPNITNLCPFGEVFNATRFASVYAWNRKRISNCVADYSFLYNSASFSTFKCYGVSPTKLNDLCFTNVYADSFVIRGDEVRQIAPGQTGKIADYNYKLPDDFTGCVIAWNSNNLDSKVGGNYNYLYRLFRKSNLKPFERDISTEIYQAGSTPCNGVEGFNCYFPLQSYGFQPTNGVGYQPYRVVVLSFELLHAPATVCGPKKSTNLVKNKCVNFNFNGLTGTGVLTESNKKFLPFQQFGRDIADTTDAVRDPQTLEILDITPCSFGGVSVITPGTNTSNQVAVLYQDVNCTEVPVAIHADQLTPTWRVYSTGSNVFQTRAGCLIGAEHVNNSYECDIPIGAGICASYQTQTNSP

SEQ ID NO: 1286 - protein, 681 aa, Artificial Sequence
  SARS-CoV-2/Australia/VIC01/2020__EPI_ISL_406844 spike protein (1-681)
MFVFLVLLPLVSSQCVNLTTRTQLPPAYTNSFTRGVYYPDKVFRSSVLHSTQDLFLPFFSNVTWFHAIHVSGTNGTKRFDNPVLPFNDGVYFASTEKSNIIRGWIFGTTLDSKTQSLLIVNNATNVVIKVCEFQFCNDPFLGVYYHKNNKSWMESEFRVYSSANNCTFEYVSQPFLMDLEGKQGNFKNLREFVFKNIDGYFKIYSKHTPINLVRDLPQGFSALEPLVDLPIGINITRFQTLLALHRRYLTPGDSSSGWTAGAAAYYVGYLQPRTFLLKYNENGTITDAVDCALDPLSETKCTLKSFTVEKGIYQTSNFRVQPTESIVRFPNITNLCPFGEVFNATRFASVYAWNRKRISNCVADYSVLYNSASFSTFKCYGVSPTKLNDLCFTNVYADSFVIRGDEVRQIAPGQTGKIADYNYKLPDDFTGCVIAWNSNNLDSKVGGNYNYLYRLFRKSNLKPFERDISTEIYQAGSTPCNGVEGFNCYFPLQSYGFQPTNGVGYQPYRVVVLSFELLHAPATVCGPKKSTNLVKNKCVNFNFNGLTGTGVLTESNKKFLPFQQFGRDIADTTDAVRDPQTLEILDITPCSFGGVSVITPGTNTSNQVAVLYQDVNCTEVPVAIHADQLTPTWRVYSTGSNVFQTRAGCLIGAEHVNNSYECDIPIGAGICASYQTQTNSP

SEQ ID NO: 1287 - protein, 681 aa, Artificial Sequence
  SARS-CoV-2/Germany/BavPat1/2020__EPI_ISL_406862 spike protein (1-681)
MFVFLVLLPLVSSQCVNLTTRTQLPPAYTNSFTRGVYYPDKVFRSSVLHSTQDLFLPFFSNVTWFHAIHVSGTNGTKRFDNPVLPFNDGVYFASTEKSNIIRGWIFGTTLDSKTQSLLIVNNATNVVIKVCEFQFCNDPFLGVYYHKNNKSWMESEFRVYSSANNCTFEYVSQPFLMDLEGKQGNFKNLREFVFKNIDGYFKIYSKHTPINLVRDLPQGFSALEPLVDLPIGINITRFQTLLALHRSYLTPGDSSSGWTAGAAAYYVGYLQPRTFLLKYNENGTITDAVDCALDPLSETKCTLKSFTVEKGIYQTSNFRVQPTESIVRFPNITNLCPFGEVFNATRFASVYAWNRKRISNCVADYSVLYNSASFSTFKCYGVSPTKLNDLCFTNVYADSFVIRGDEVRQIAPGQTGKIADYNYKLPDDFTGCVIAWNSNNLDSKVGGNYNYLYRLFRKSNLKPFERDISTEIYQAGSTPCNGVEGFNCYFPLQSYGFQPTNGVGYQPYRVVVLSFELLHAPATVCGPKKSTNLVKNKCVNFNFNGLTGTGVLTESNKKFLPFQQFGRDIADTTDAVRDPQTLEILDITPCSFGGVSVITPGTNTSNQVAVLYQGVNCTEVPVAIHADQLTPTWRVYSTGSNVFQTRAGCLIGAEHVNNSYECDIPIGAGICASYQTQTNSP

SEQ ID NO: 1288 - protein, 681 aa, Artificial Sequence; identical to SEQ ID NO: 27
  SARS-CoV-2/Wuhan/HBCDC-HB-02/2020__EPI_ISL_412978 spike protein (1-681)

SEQ ID NO: 1289 - protein, 681 aa, Artificial Sequence; identical to SEQ ID NO: 27
  SARS-CoV-2/Australia/QLD02/2020__EPI_ISL_407896 spike protein (1-681)

SEQ ID NO: 1290 - protein, 681 aa, Artificial Sequence; identical to SEQ ID NO: 27
  SARS-CoV-2/India/1-31/2020__EPI_ISL_413523 spike protein (1-681)

SEQ ID NO: 1291 - protein, 681 aa, Artificial Sequence
  SARS-CoV-2/Guangdong/GD2020087-P0008/2020__EPI_ISL_413863 spike protein (1-681)
MFVFLVLLPLVSSQCVNLTTRTQLPPAYTNSFTRGVYYPDKVFRSSVLHSTQDLFLPFFSNVTWFHAIHVSGTNGTKRFDNPVLPFNDGVYFASTEKSNIIRGWIFGTTLDSKTQSLLIVNNATNVVIKVCEFQFCNDPFLGVYYHKNNKSWMESEFRVYSSANNCTFEYVSQPFLMDLEGKQGNFKNLREFVFKNIDGYFKIYSKHTPINLVRDLPQGFSALEPLVDLPIGINITRFQTLLALHRSYLTPGDSSSGWTAGAAAYYVGYLQPRTFLLKYNENGTITDAVDCALDPLSETKCTLKSFTVEKGIYQTSNFRVQPTESIVRFPNITNLCPFGEVFNATRFASVYAWNRKRISNCVADYSVLYNSASFSTFKCYGVSPTKLNDLCFTNVYADSFVIRGDEVREIAPGQTGKIADYNYKLPDDFTGCVIAWNSNNLDSKVGGNYNYLYRLFRKSNLKPFERDISTEIYQAGSTPCNGVEGFNCYFPLQSYGFQPTNGVGYQPYRVVVLSFELLHAPATVCGPKKSTNLVKNKCVNFNFNGLTGTGVLTESNKKFLPFQQFGRDIADTTDAVRDPQTLEILDITPCSFGGVSVITPGTNTSNQVAVLYQDVNCTEVPVAIHADQLTPTWRVYSTGSNVFQTRAGCLIGAEHVNNSYECDIPIGAGICASYQTQTNSP

SEQ ID NO: 1292 - protein, 681 aa, Artificial Sequence; identical to SEQ ID NO: 27
  SARS-CoV-2/Sweden/01/2020__EPI_ISL_411951 spike protein (1-681)

SEQ ID NO: 1293 - protein, 681 aa, Artificial Sequence
  SARS-CoV-2/Tianmen/HBCDC-HB-07/2020__EPI_ISL_412983 spike protein (1-681)
MFVFLVLLPLVSSQCVNLTTRTQLPPAYTNSFTRGVYYPDKVFRSSVLHSTQDLFLPFFSNVTWFHAIHVSGTNGTKRFDNPVLPFNDGVYFASTEKSNIIRGWIFGTTLDSKTQSLLIVNNATNVVIKVCEFQFCNDPFLGVYYHKNNKSWMESEFRVYSSANNCTFEYVSQPFLMDLEGKQGNFKNLREFVFKNIDGYFKIYSKHTPINLVRDLPQGFSALEPLVDLPIGINITRFQTLLALHRSYLTPGDSSSGWTAGAAAYYVGYLQPRTFLLKYNENGTITDAVDCALDPLSETKCTLKSFTVEKGIYQTSNFRVQPTESIVRFPNITNLCPFGEVFNATRFASVYAWNRKRISNCVADYSVLYNSASFSTFKCYGVSPTKLNDLCFTNVYADSFVIRGDEVRQIAPGQTGKIADYNYKLPDDFTGCVIAWNSNNLDSKVGGNYNYLYRLFRKSNLKPFERDISTEIYQAGSTPCNGVEGFNCYFPLQSYGFQPTNGVGYQPYRVVVLSFELLHAPATVCGPKKSTNLVKNKCVNFNFNGLTGTGVLTESNKKFLPFQQFGRDIADTTDAVRDPQTLEILDITPCSFGGVSVITPGTNTSNQVAVLYQDLNCTEVPVAIHADQLTPTWRVYSTGSNVFQTRAGCLIGAEHVNNSYECDIPIGAGICASYQTQTNSP

SEQ ID NO: 1294 - protein, 681 aa, Artificial Sequence; identical to SEQ ID NO: 27
  SARS-CoV-2/Hong Kong/case42_VM20002493/2020__EPI_ISL_414527 spike protein (1-681)

SEQ ID NO: 1295 - protein, 681 aa, Artificial Sequence
  SARS-CoV-2/USA/CruiseA-23/2020__EPI_ISL_414482 spike protein (1-681)
MFVFLVLLPLVSSQCVNLTTRTQLPPAYTNSFTRGVYYPDKVFRSSVLHSTQDLFLPFFSNVTWFHAIHVSGTNGTKRFDNPVLPFNDGVYFASTEKSNIIRGWIFGTTLDSKTQSLLIVNNATNVVIKVCEFQFCNDPFLGVYYHKNNKSWMESEFRVYSSANNCTFEYVSQPFLMDLEVKQGNFKNLREFVFKNIDGYFKIYSKHTPINLVRDLPQGFSALEPLVDLPIGINITRFQTLLALHRSYLTPGDSSSGWTAGAAAYYVGYLQPRTFLLKYNENGTITDAVDCALDPLSETKCTLKSFTVEKGIYQTSNFRVQPTESIVRFPNITNLCPFGEVFNATRFASVYAWNRKRISNCVADYSVLYNSASFSTFKCYGVSPTKLNDLCFTNVYADSFVIRGDEVRQIAPGQTGKIADYNYKLPDDFTGCVIAWNSNNLDSKVGGNYNYLYRLFRKSNLKPFERDISTEIYQAGSTPCNGVEGFNCYFPLQSYGFQPTNGVGYQPYRVVVLSFELLHAPATVCGPKKSTNLVKNKCVNFNFNGLTGTGVLTESNKKFLPFQQFGRDIADTTDAVRDPQTLEILDITPCSFGGVSVITPGTNTSNQVAVLYQDVNCTEVPVAIHADQLTPTWRVYSTGSNVFQTRAGCLIGAEHVNNSYECDIPIGAGICASYQTQTNSP

SEQ ID NO: 1296 - protein, 681 aa, Artificial Sequence
  SARS-CoV-2/Hong Kong/case85_VM20002868/2020__EPI_ISL_414519 spike protein (1-681)
MFVFLVLVPLVSSQCVNLTTRTQLPPAYTNSFTRGVYYPDKVFRSSVLHSTQDLFLPFFSNVTWFHAIHVSGTNGTKRFDNPVLPFNDGVYFASTEKSNIIRGWIFGTTLDSKTQSLLIVNNATNVVIKVCEFQFCNDPFLGVYYHKNNKSWMESEFRVYSSANNCTFEYVSQPFLMDLEGKQGNFKNLREFVFKNIDGYFKIYSKHTPINLVRDLPQGFSALEPLVDLPIGINITRFQTLLALHRSYLTPGDSSSGWTAGAAAYYVGYLQPRTFLLKYNENGTITDAVDCALDPLSETKCTLKSFTVEKGIYQTSNFRVQPTESIVRFPNITNLCPFGEVFNATRFASVYAWNRKRISNCVADYSVLYNSASFSTFKCYGVSPTKLNDLCFTNVYADSFVIRGDEVRQIAPGQTGKIADYNYKLPDDFTGCVIAWNSNNLDSKVGGNYNYLYRLFRKSNLKPFERDISTEIYQAGSTPCNGVEGFNCYFPLQSYGFQPTNGVGYQPYRVVVLSFELLHAPATVCGPKKSTNLVKNKCVNFNFNGLTGTGVLTESNKKFLPFQQFGRDIADTTDAVRDPQTLEILDITPCSFGGVSVITPGTNTSNQVAVLYQDVNCTEVPVAIHADQLTPTWRVYSTGSNVFQTRAGCLIGAEHVNNSYECDIPIGAGICASYQTQTNSP

SEQ ID NO: 1297 - protein, 681 aa, Artificial Sequence; identical to SEQ ID NO: 1287
  SARS-CoV-2/England/200990660/2020__EPI_ISL_414523 spike protein (1-681)

SEQ ID NO: 1298 - protein, 681 aa, Artificial Sequence; identical to SEQ ID NO: 27
  SARS-CoV-2/Australia/NSW09/2020__EPI_ISL_413595 spike protein (1-681)

SEQ ID NO: 1299 - protein, 681 aa, Artificial Sequence; identical to SEQ ID NO: 27
  SARS-CoV-2/Australia/NSW10/2020__EPI_ISL_413596 spike protein (1-681)

SEQ ID NO: 1300 - protein, 681 aa, Artificial Sequence
  SARS-CoV-2/Switzerland/1000477797/2020__EPI_ISL_413023 spike protein (1-681)
MFVFLVLLPLVSSQCVNLTTRTQLPPAYTNSFTRGVYYPDKVFRSSVLHSTQDLFLPFFSNVTWFHAIHVSGTNGTKRFDNPVLPFNDGVYFASTEKSNIIRGWIFGTTLDSKTQSLLIVNNATNVVIKVCEFQFCNDPFLGVYYHKNNKSWMESEFRVYSSANNCTFEYVSQPFLMDLEGKQGNFKNLREFVFKNIDGYFNIYSKHTPINLVRDLPQGFSALEPLVDLPIGINITRFQTLLALHRSYLTPGDSSSGWTAGAAAYYVGYLQPRTFLLKYNENGTITDAVDCALDPLSETKCTLKSFTVEKGIYQTSNFRVQPTESIVRFPNITNLCPFGEVFNATRFASVYAWNRKRISNCVADYSVLYNSASFSTFKCYGVSPTKLNDLCFTNVYADSFVIRGDEVRQIAPGQTGKIADYNYKLPDDFTGCVIAWNSNNLDSKVGGNYNYLYRLFRKSNLKPFERDISTEIYQAGSTPCNGVEGFNCYFPLQSYGFQPTNGVGYQPYRVVVLSFELLHAPATVCGPKKSTNLVKNKCVNFNFNGLTGTGVLTESNKKFLPFQQFGRDIADTTDAVRDPQTLEILDITPCSFGGVSVITPGTNTSNQVAVLYQGVNCTEVPVAIHADQLTPTWRVYSTGSNVFQTRAGCLIGAEHVNNSYECDIPIGAGICASYQTQTNSP

SEQ ID NO: 1301 - protein, 681 aa, Artificial Sequence
  SARS-CoV-2/Belgium/BA-02291/2020__EPI_ISL_415159 spike protein (1-681)
MFVFLVLLPLVSSQCVNLTTRTQLPPAYTNSFTRGVYYPDKVFRSSVLHSTQDLFLPFFSNVTWFHAIHVSGTNGTKRFDNPVLPFNDGVYFASTEKSNIIRGWIFGTTLDSKTQSLLIVNNATNVVIKVCEFQFCNDPFLGVYYHKNNKSWMESEFRVYSSANNCTFEYVSQPFLMDLEGKQGNFKNLREFVFKNIDGYFKIYSKHTPINLVRDLPQGFSALEPLVDLPIGINITRFQTLLALHRSYLTPGDSSSGWTAGAAAYYVGYLQPRTFLLKYNENGTITDAVDCALDPLSETKCTLKSFTVEKGIYQTSNFRVQPTESIVRFPNITNLCPFGEVFNATRFASVYAWNRKRISNCVADYSVLYNSASFSTFKCYGVSPTKLNDLCFTNVYADSFVIRGDEVRQIAPGQTGKIADYNYKLPDDFTGCVIAWNSNNLDSKVGGNYNYLYRLFRRSNLKPFERDISTEIYQAGSTPCNGVEGFNCYFPLQSYGFQPTNGVGYQPYRVVVLSFELLPAPATVCGPKKSTNLVKNKCVNFNFNGLTGTGVLTESNKKFLPFQQFGRDIADTTDAVRDPQTLEILDITPCSFGGVSVITPGTNTSNQVAVLYQGVNCTEVPVAIHADQLTPTWRVYSTGSNVFQTRAGCLIGAEHVNNSYECDIPIGAGICASYQTQTNSP

SEQ ID NO: 1302 - protein, 681 aa, Artificial Sequence
  SARS-CoV-2/USA/WA8-UW5/2020__EPI_ISL_413486 spike protein (1-681)
MFVFLVLLPLVSSQCVNLTTRTQLPPAYTNSFTRGVYYPDKVFRSSVLHSTQDLFLPFFSNVTWFHAIHVSGTNGTKRFDNPVLPFNDGVYFASTEKSNIIRGWIFGTTLDSKTQSLLIVNNATNVVIKVCEFQFCNDPFLGVYYHKNNKSWMESEFRVYSSANNCTFEYVSQPFLMDLEGKQGNFKNLREFVFKNIDGYFKIYSKHTPINLVRDLPQGFSALEPLVDLPIGINITRFQTLLALHRSYLTPGDSSSGWTAGAAAYYVGYLQPRTFLLKYNENGTITDAVDCALDPLSETKCTLKSFTVEKGIYQTSNFRVQPTESIVRFPNITNLCPFGEVFNATRFASVYAWNRKRISNCVADYSVLYNSASFSTFKCYGVSPTKLNDLCFTNVYADSFVIRGDEVRQIAPGQTGKIADYNYKLPDDFTGCVIAWNSNNLDSKVGGNYNYLYRLFRKSNLKPFERDISTEIYQAGSTPCNGVEGFNCYFPLQSYGFQPTNGVGYQPYRVVVLSFELLHAPATVCGPKKSTNLVKNKCVNFNFNGLTGTGVLTESNKKFLPFQQFGRDIADTTDAVRDPQTLEILDITPCSFGGVSVITPGTNTSNQVAVLYQDVNCTEVPVAIHADQLTPTWRVYSTGSNVFQTRAGCLIGAEYVNNSYECDIPIGAGICASYQTQTNSP

SEQ ID NO: 1303 - protein, 681 aa, Artificial Sequence; identical to SEQ ID NO: 1287
  SARS-CoV-2/England/20102000506/2020__EPI_ISL_415147 spike protein (1-681)

SEQ ID NO: 1304 - protein, 681 aa, Artificial Sequence; identical to SEQ ID NO: 1287
  SARS-CoV-2/Belgium/VAG-03013/2020__EPI_ISL_415155 spike protein (1-681)

SEQ ID NO: 1305 - protein, 681 aa, Artificial Sequence; identical to SEQ ID NO: 1287
  SARS-CoV-2/Belgium/BC-03016/2020__EPI_ISL_415157 spike protein (1-681)

SEQ ID NO: 1306 - protein, 681 aa, Artificial Sequence; identical to SEQ ID NO: 27
  SARS-CoV-2/Germany/BavPat3/2020__EPI_ISL_414521 spike protein (1-681)

SEQ ID NO: 1307 - protein, 681 aa, Artificial Sequence; identical to SEQ ID NO: 1287
  SARS-CoV-2/France/HF1805/2020__EPI_ISL_414628 spike protein (1-681)

SEQ ID NO: 1308 - protein, 681 aa, Artificial Sequence; identical to SEQ ID NO: 1287
  SARS-CoV-2/Netherlands/ZuidHolland_9/2020__EPI_ISL_414445 spike protein (1-681)

SEQ ID NO: 1309 - protein, 681 aa, Artificial Sequence
  SARS-CoV-2/Finland/FIN03032020A/2020__EPI_ISL_413602 spike protein (1-681)
MFVFLVLLPLVSSQCVNLTTRTQLPPAYTNSFTRGVYYPDKVFRSSVLHSTQDLFLPFFSNVTWFHAIHVSGTNGTKRFDNPVLPFNDGVYFASTEKSNIIRGWIFGTTLDSKTQSLLIVNNATNVVIKVCEFQFCNDPFLGVYYHKNNKSWMESEFRVYSSANNCTFEYVSQPFLMDLEGKQGNFKNLREFVFKNIDGYFKIYSKHTPINLVRDLPQGFSALEPLVDLPIGINITRFQTLLALHRSYLTPGDSSSGWTAGAAAYYVGYLQPRTFLLKYNENGTITDAVDCALDPLSETKCTLKSFTVEKGIYQTSNFRVQPTESIVRFPNITNLCPFGEVFNATRFASVYAWNRKRISNCVADYSVLYNSASFSTFKCYGVSPTKLNDLCFTNVYADSFVIRGDEVRQIAPGQTGKIADYNYKLPDDFTGCVISWNSNNLDSKVGGNYNYLYRLFRKSNLKPFERDISTEIYQAGSTPCNGVEGFNCYFPLQSYGFQPTNGVGYQPYRVVVLSFELLHAPATVCGPKKSTNLVKNKCVNFNFNGLTGTGVLTESNKKFLPFQQFGRDIADTTDAVRDPQTLEILDITPCSFGGVSVITPGTNTSNQVAVLYQGVNCTEVPVAIHADQLTPTWRVYSTGSNVFQTRAGCLIGAEHVNNSYECDIPIGAGICASYQTQTNSP

SEQ ID NO: 1310 - protein, 681 aa, Artificial Sequence; identical to SEQ ID NO: 1287
  SARS-CoV-2/France/GE1977/2020__EPI_ISL_414632 spike protein (1-681)

SEQ ID NO: 1311 - protein, 681 aa, Artificial Sequence
  SARS-CoV-2/Finland/FIN-313/2020__EPI_ISL_414641 spike protein (1-681)
MFVFLVLLPLVSSQCVNLTTRTQLPPAYTNSFTRGVYYPDKVFRSSVLHSTQDLFLPFFSNVTWFHAIHVSGTNGTKRFDNPVLPFNDGVYFASTEKSNIIRGWIFGTTLDSKTQSLLIVNNATNVVIKVCEFQFCNDPFLGVYYHKNNKSWMESEFRVYSSANNCTFEYVSQPFLMDLEGKQGNFKNLREFVFKNIDGYFKIYSKHTPINLVRDLPQGFSALEPLVDLPIGINITRFKTLLALHRSYLTPGDSSSGWTAGAAAYYVGYLQPRTFLLKYNENGTITDAVDCALDPLSETKCTLKSFTVEKGIYQTSNFRVQPTESIVRFPNITNLCPFGEVFNATRFASVYAWNRKRISNCVADYSVLYNSASFSTFKCYGVSPTKLNDLCFTNVYADSFVIRGDEVRQIAPGQTGKIADYNYKLPDDFTGCVIAWNSNNLDSKVGGNYNYLYRLFRKSNLKPFERDISTEIYQAGSTPCNGVEGFNCYFPLQSYGFQPTNGVGYQPYRVVVLSFELLHAPATVCGPKKSTNLVKNKCVNFNFNGLTGTGVLTESNKKFLPFQQFGRDIADTTDAVRDPQTLEILDITPCSFGGVSVITPGTNTSNQVAVLYQGVNCTEVPVAIHADQLTPTWRVYSTGSNVFQTRAGCLIGAEHVNNSYECDIPIGAGICASYQTQTNSP

SEQ ID NO: 1312 - protein, 681 aa, Artificial Sequence; identical to SEQ ID NO: 1287
  SARS-CoV-2/Netherlands/ZuidHolland_2/2020__EPI_ISL_414556 spike protein (1-681)

SEQ ID NO: 1313 - protein, 681 aa, Artificial Sequence
  SARS-CoV-2/USA/WA-UW31/2020__EPI_ISL_414618 spike protein (1-681)
MFVFLVLLPLVSSQCVNLTTRTQLPPAYTNSFTRGVYYPDKVFRSSVLHSTQDLFLPFFSNVTWFHAIHVSGTNGTKRFDNPVLPFNDGVYFASTEKSNIIRGWIFGTTLDSKTQSLLIVNNATNVVIKVCEFQFCNDPFLGVYYHKNNKSWMESEFRVYSSANNCTFEYVSQPFLMDLEGKQGNFKNLREFVFKNIDGYFKIYSKHTPINLVRDLPQGFSALEPLVDLPIGINITRFQTLLALHRSYLTPGDSSSGWTAGAAAYYVGYLQPRTFLLKYNENGTITDAVDCALDPLSETKCTLKSFTVEKGIYQTSNFRVQPTESIVRFPNITNLCPFGEVFNATRFASVYAWNRKRISNCVADYSVLYNSASFSTFKCYGVSPTKLNDLCFTNVYADSFVIRGDEVRQIAPGQTGKIADYNYKLPDDFTGCVIAWNSNNLDSKVGGNYNYLYRLFRKSNLKPFERDISTEIYQAGSTPCNGAEGFNCYFPLQSYGFQPTNGVGYQPYRVVVLSFELLHAPATVCGPKKSTNLVKNKCVNFNFNGLTGTGVLTESNKKFLPFQQFGRDIADTTDAVRDPQTLEILDITPCSFGGVSVITPGTNTSNQVAVLYQDVNCTEVPVAIHADQLTPTWRVYSTGSNVFQTRAGCLIGAEHVNNSYECDIPIGAGICASYQTQTNSP

SEQ ID NO: 1314 - protein, 681 aa, Artificial Sequence
  SARS-CoV-2/South Korea/SNU01/2020__EPI_ISL_411929 spike protein (1-681)
MFVFLVLLPLVSSQCVNLTTRTQLPPAYTNSFTRGVYYPDKVFRSSVLHSTQDLFLPFFSNVTWFHAIHVSGTNGTKRFDNPVLPFNDGVYFASTEKSNIIRGWIFGTTLDSKTQSLLIVNNATNVVIKVCEFQFCNDPFLGVYYHKNNKSWMESEFRVYSSANNCTFEYVSQPFLMDLEGKQGNFKNLREFVFKNIDGYFKIYSKHTPINLVRDLPQGFWALEPLVDLPIGINITRFQTLLALHRSYLTPGDSSSGWTAGAAAYYVGYLQPRTFLLKYNENGTITDAVDCALDPLSETKCTLKSFTVEKGIYQTSNFRVQPTESIVRFPNITNLCPFGEVFNATRFASVYAWNRKRISNCVADYSVLYNSASFSTFKCYGVSPTKLNDLCFTNVYADSFVIRGDEVRQIAPGQTGKIADYNYKLPDDFTGCVIAWNSNNLDSKVGGNYNYLYRLFRKSNLKPFERDISTEIYQAGSTPCNGVEGFNCYFPLQSYGFQPTNGVGYQPYRVVVLSFELLHAPATVCGPKKSTNLVKNKCVNFNFNGLTGTGVLTESNKKFLPFQQFGRDIADTTDAVRDPQTLEILDITPCSFGGVSVITPGTNTSNQVAVLYQDVNCTEVPVAIHADQLTPTWRVYSTGSNVFQTRAGCLIGAEHVNNSYECDIPIGAGICASYQTQTNSP

SEQ ID NO: 1315 - protein, 681 aa, Artificial Sequence
  SARS-CoV-2/China/WF0004/2020__EPI_ISL_413694 spike protein (1-681)
MFVFLVLLPLVSSQCVNLTTRTQLPPAYTNSFTRGVYYPDKVFRSSVLHSTQDLFLPFFSNVTWFHAIHVSGTNGTKRFDNPVLPFNDGVYFASTEKSNIIRGWIFGTTLDSKTQSLLIVNNATNVVIKVCEFQFCNDPFLGVYYHKNNKSWTESEFRVYSSANNCTFEYVSQPFLMDLEGKQGNFKNLREFVFKNIDGYFKIYSKHTPINLVRDLPQGFSALEPLVDLPIGINITRFQTLLALHRSYLTPGDSSSGWTAGAAAYYVGYLQPRTFLLKYNENGTITDAVDCALDPLSETKCTLKSFTVEKGIYQTSNFRVQPTESIVRFPNITNLCPFGEVFNATRFASVYAWNRKRISNCVADYSVLYNSASFSTFKCYGVSPTKLNDLCFTNVYADSFVIRGDEVRQIAPGQTGKIADYNYKLPDDFTGCVIAWNSNNLDSKVGGNYNYLYRLFRKSNLKPFERDISTEIYQAGSTPCNGVEGFNCYFPLQSYGFQPTNGVGYQPYRVVVLSFELLHAPATVCGPKKSTNLVKNKCVNFNFNGLTGTGVLTESNKKFLPFQQFGRDIADTTDAVRDPQTLEILDITPCSFGGVSVITPGTNTSNQVAVLYQDVNCTEVPVAIHADQLTPTWRVYSTGSNVFQTRAGCLIGAEHVNNSYECDIPIGAGICASYQTQTNSP

SEQ ID NO: 1316 - protein, 681 aa, Artificial Sequence; identical to SEQ ID NO: 27
  SARS-CoV-2/China/WF0028/2020__EPI_ISL_413791 spike protein (1-681)

SEQ ID NO: 1317 - protein, 681 aa, Artificial Sequence
  SARS-CoV-2/2019-nCoV/USA-CruiseA-18/2020__MT159716.1 spike protein (1-681)
MFVFLVLLPLVSSQCVNLTTRTQLPPAYTNSFTRGVYYPDKVFRSSVLHSTQDLFLPFFSNVTWFHAIHVSGTNGTKRFDNPVLPFNDGVYFASTEKSNIIRGWIFGTTLDSKTQSLLIVNNATNVVIKVCEFQFCNDPFLGVYYHKNNKSWMESELRVYSSANNCTFEYVSQPFLMDLEGKQGNFKNLREFVFKNIDGYFKIYSKHTPINLVRDLPQGFSALEPLVDLPIGINITRFQTLLALHRSYLTPGDSSSGWTAGAAAYYVGYLQPRTFLLKYNENGTITDAVDCALDPLSETKCTLKSFTVEKGIYQTSNFRVQPTESIVRFPNITNLCPFGEVFNATRFASVYAWNRKRISNCVADYSVLYNSASFSTFKCYGVSPTKLNDLCFTNVYADSFVIRGDEVRQIAPGQTGKIADYNYKLPDDFTGCVIAWNSNNLDSKVGGNYNYLYRLFRKSNLKPFERDISTEIYQAGSTPCNGVEGFNCYFPLQSYGFQPTNGVGYQPYRVVVLSFELLHAPATVCGPKKSTNLVKNKCVNFNFNGLTGTGVLTESNKKFLPFQQFGRDIADTTDAVRDPQTLEILDITPCSFGGVSVITPGTNTSNQVAVLYQDVNCTEVPVAIHADQLTPTWRVYSTGSNVFQTRAGCLIGAEHVNNSYECDIPIGAGICASYQTQTNSP

SEQ ID NO: 1318 - protein, 681 aa, Artificial Sequence
  SARS-CoV-2/SARS-CoV-2/Yunnan-01/human/2020/CHN__MT049951.1 spike protein (1-681)
MFVFLVLLPLVSSQCVNLTTRTQLPPANTNSFTRGVYYPDKVFRSSVLHSTQDLFLPFFSNVTWFHAIHVSGTNGTKRFDNPVLPFNDGVYFASTEKSNIIRGWIFGTTLDSKTQSLLIVNNATNVVIKVCEFQFCNDPFLGVYYHKNNKSWMESEFRVYSSANNCTFEYVSQPFLMDLEGKQGNFKNLREFVFKNIDGYFKIYSKHTPINLVRDLPQGFSALEPLVDLPIGINITRFQTLLALHRSYLTPGDSSSGWTAGAAAYYVGYLQPRTFLLKYNENGTITDAVDCALDPLSETKCTLKSFTVEKGIYQTSNFRVQPTESIVRFPNITNLCPFGEVFNATRFASVYAWNRKRISNCVADYSVLYNSASFSTFKCYGVSPTKLNDLCFTNVYADSFVIRGDEVRQIAPGQTGKIADYNYKLPDDFTGCVIAWNSNNLDSKVGGNYNYLYRLFRKSNLKPFERDISTEIYQAGSTPCNGVEGFNCYFPLQSYGFQPTNGVGYQPYRVVVLSFELLHAPATVCGPKKSTNLVKNKCVNFNFNGLTGTGVLTESNKKFLPFQQFGRDIADTTDAVRDPQTLEILDITPCSFGGVSVITPGTNTSNQVAVLYQDVNCTEVPVAIHADQLTPTWRVYSTGSNVFQTRAGCLIGAEHVNNSYECDIPIGAGICASYQTQTNSP

SEQ ID NO: 1319 - protein, 681 aa, Artificial Sequence
  SARS-CoV-2/USA/WA-UW292/2020__EPI_ISL_418077 spike protein (1-681)
MFVFLVLLPLVSSQCVNLTTRTQLPPAYTNSFTRGVYYPDKVFRSSVLHSTQDLFLPFFSNVTWFHAIHVSGTNGTKRFDNPVLPFNDGVYFASTEKSNIIRGWIFGTTLDSKTQSLLIVNNATNVVIKVCEFQFCNDPFLGVYYHKNNKSWMESEFRVYSSANNCTFEYVSQPFLMDLEGKQGNFKNLREFVFKNIDGYFKIYSKHTPINLVRDLPQGFSALEPLVDLPIGINITRFQTLLALHRSYLTPGDSSSGWTAGAAAYYVGYLQPRTFLLKYNENGTITDAVDCALDPLSETKCTLKSFTVEKGIYQTSNFRVQPTESIVRFPNITNLCPFGEVFNATRFASVYAWNRKRISNCVADYSVLYNSASFSTFKCYGVSPTKLNDLCFTNVYADSFVIRGDEVRQIAPGQTGKIADYNYKLPDDFTGCVIAWNSNNLDSKVGGNYNYLYRLFRKSNLKPFERDISTEIYQASSTPCNGVEGFNCYFPLQSYGFQPTNGVGYQPYRVVVLSFELLHAPATVCGPKKSTNLVKNKCVNFNFNGLTGTGVLTESNKKFLPFQQFGRDIADTTDAVRDPQTLEILDITPCSFGGVSVITPGTNTSNQVAVLYQDVNCTEVPVAIHADQLTPTWRVYSTGSNVFQTRAGCLIGAEHVNNSYECDIPIGAGICASYQTQTNSP

SEQ ID NO: 1320 - protein, 681 aa, Artificial Sequence
  SARS-CoV-2/Iceland/192/2020__EPI_ISL_417819 spike protein (1-681)
MFVFFVLLPLVSSQCVNLTTRTQLPPAYTNSFTRGVYYPDKVFRSSVLHSTQDLFLPFFSNVTWFHAIHVSGTNGTKRFDNPVLPFNDGVYFASTEKSNIIRGWIFGTTLDSKTQSLLIVNNATNVVIKVCEFQFCNDPFLGVYYHKNNKSWMESEFRVYSSANNCTFEYVSQPFLMDLEGKQGNFKNLREFVFKNIDGYFKIYSKHTPINLVRDLPQGFSALEPLVDLPIGINITRFQTLLALHRSYLTPGDSSSGWTAGAAAYYVGYLQPRTFLLKYNENGTITDAVDCALDPLSETKCTLKSFTVEKGIYQTSNFRVQPTESIVRFPNITNLCPFGEVFNATRFASVYAWNRKRISNCVADYSVLYNSASFSTFKCYGVSPTKLNDLCFTNVYADSFVIRGDEVRQIAPGQTGKIADYNYKLPDDFTGCVIAWNSNNLDSKVGGNYNYLYRLFRKSNLKPFERDISTEIYQAGSTPCNGVEGFNCYFPLQSYGFQPTNGVGYQPYRVVVLSFELLHAPATVCGPKKSTNLVKNKCVNFNFNGLTGTGVLTESNKKFLPFQQFGRDIADTTDAVRDPQTLEILDITPCSFGGVSVITPGTNTSNQVAVLYQGVNCTEVPVAIHADQLTPTWRVYSTGSNVFQTRAGCLIGAEHVNNSYECDIPIGAGICASYQTQTNSP

SEQ ID NO: 1321 - protein, 681 aa, Artificial Sequence; identical to SEQ ID NO: 1287
  SARS-CoV-2/Belgium/ULG-6939/2020__EPI_ISL_417020 spike protein (1-681)

SEQ ID NO: 1322 - protein, 681 aa, Artificial Sequence; identical to SEQ ID NO: 1287
  SARS-CoV-2/France/HF2496/2020__EPI_ISL_418231 spike protein (1-681)

SEQ ID NO: 1323 - protein, 681 aa, Artificial Sequence; identical to SEQ ID NO: 1287
  SARS-CoV-2/USA/WA-UW291/2020__EPI_ISL_418076 spike protein (1-681)

SEQ ID NO: 1324 - protein, 681 aa, Artificial Sequence; identical to SEQ ID NO: 1287
  SARS-CoV-2/Portugal/PT0034/2020__EPI_ISL_418019 spike protein (1-681)

SEQ ID NO: 1325 - protein, 681 aa, Artificial Sequence; identical to SEQ ID NO: 27
  SARS-CoV-2/Iceland/202/2020__EPI_ISL_417750 spike protein (1-681)

SEQ ID NO: 1326 - protein, 681 aa, Artificial Sequence
  SARS-CoV-2/USA/WA-UW261/2020__EPI_ISL_418046 spike protein (1-681)
MFVFLVLLPLVSSQCVNLTTRTQLPPAYTNSFTRGVYYPDKVFRSSVLHSTQDLFLPFFSNVTWFHAIHVSGTNGTKRFDNPVLPFNDGVYFASTEKSNIIRGWIFGTTLDSKTQSLLIVNNATNVVIKVCEFQFCNDPFLGVYYHKNNKSWMESEFRVYSSANNCTFEYVSQPFLMDLEGKQGNFKNLREFVFKNIDGYFKIYSKHTPINLVRDLPQGFSALEPLVDLPIGINITRFQTLLALHRSYLTPGDSSSGWTAGAAAYYVGYLQPRTFLLKYNENGTITDAVDCALDPLSETKCTLKSFTVEKGIYQTSNFRVQPTESIVRFPNITNLCPFGEVFNATRFTSVYAWNRKRISNCVADYSVLYNSASFSTFKCYGVSPTKLNDLCFTNVYADSFVIRGDEVRQIAPGQTGKIADYNYKLPDDFTGCVIAWNSNNLDSKVGGNYNYLYRLFRKSNLKPFERDISTEIYQAGSTPCNGVEGFNCYFPLQSYGFQPTNGVGYQPYRVVVLSFELLHAPATVCGPKKSTNLVKNKCVNFNFNGLTGTGVLTESNKKFLPFQQFGRDIADTTDAVRDPQTLEILDITPCSFGGVSVITPGTNTSNQVAVLYQDVNCTEVPVAIHADQLTPTWRVYSTGSNVFQTRAGCLIGAEHVNNSYECDIPIGAGICASYQTQTNSP

SEQ ID NO: 1327 - protein, 681 aa, Artificial Sequence; identical to SEQ ID NO: 27
  SARS-CoV-2/Portugal/PT0035/2020__EPI_ISL_418020 spike protein (1-681)

SEQ ID NO: 1328 - protein, 681 aa, Artificial Sequence
  SARS-CoV-2/USA/NY-NYUMC7/2020__EPI_ISL_418192 spike protein (1-681)
MFVFLVLLPLVSSQCVNLTTRTQLPPAYTNSFTRGVYYPDKVFRSSVLHSTQDLFLPFFSNVTWFHAIHVSGTNGTKRFDNPVLPFNDGVYFASTEKSNIIRGWIFGTTLDSKTQSLLIVNNATNVVIKVCEFQFCNDPFLGVYHHKNNKSWMESEFRVYSSANNCTFEYVSQPFLMDLEGKQGNFKNLREFVFKNIDGYFKIYSKHTPINLVRDLPQGFSALEPLVDLPIGINITRFQTLLALHRSYLTPGDSSSGWTAGAAAYYVGYLQPRTFLLKYNENGTITDAVDCALDPLSETKCTLKSFTVEKGIYQTSNFRVQPTESIVRFPNITNLCPFGEVFNATRFASVYAWNRKRISNCVADYSVLYNSASFSTFKCYGVSPTKLNDLCFTNVYADSFVIRGDEVRQIAPGQTGKIADYNYKLPDDFTGCVIAWNSNNLDSKVGGNYNYLYRLFRKSNLKPFERDISTEIYQAGSTPCNGVEGFNCYFPLQSYGFQPTNGVGYQPYRVVVLSFELLHAPATVCGPKKSTNLVKNKCVNFNFNGLTGTGVLTESNKKFLPFQQFGRDIADTTDAVRDPQTLEILDITPCSFGGVSVITPGTNTSNQVAVLYQGVNCTEVPVAIHADQLTPTWRVYSTGSNVFQTRAGCLIGAEHVNNSYECDIPIGAGICASYQTQTNSP

SEQ ID NO: 1329 - protein, 681 aa, Artificial Sequence; identical to SEQ ID NO: 1287
  SARS-CoV-2/Iceland/189/2020__EPI_ISL_417709 spike protein (1-681)

SEQ ID NO: 1330 - protein, 681 aa, Artificial Sequence; identical to SEQ ID NO: 27
  SARS-CoV-2/Australia/NSW56/2020__EPI_ISL_417408 spike protein (1-681)

SEQ ID NO: 1331 - protein, 681 aa, Artificial Sequence
  SARS-CoV-2/Iceland/280/2020__EPI_ISL_417608 spike protein (1-681)
MFVFLVLLPLVSSQCVNLTTRTQLPPAYTNSFTRGVYYPDKVFRSSVLHSTQDLFLPFFSNVTWFHAIHVSGTNGTKRFDNPVLPFNDGVYFASTEKSNIIRGWIFGTTLDSKTQSLLIVNNATNVVIKVCEFQFCNDPFLGVYYHKNNKSWMESEFRVYSSANNCTFEYVSQPFLMDLEGKQGNFKNLREFVFKNIDGYFKIYSKHTPINLVRDLPQGFSALEPLVDLPIGINITRFQTLLALHRSYLTPGDSSSGWTAGAAAYYVGYLQPRTFLLKYNENGTITDAVDCALDPLSETKCTLKSFTVEKGIYQTSNFRVQPTESIVRFPNITNLCPFGEVFNATRFASVYAWNRKRISNCVADYSVLYNSASFSTFKCYGVSPTKLNDLCFTNVYADSFVIRGDEVRQIAPGQTGKIADYNYKLPDDFTGCVIAWNSNNLDSKVGGNYNYLYRLFRKSNLKPFERDISTEIYQAGSTPCNGVEGFNCYFPLQSYGFQPTNGVGYQPYRVVVLSFELLHAPATVCGPKKSTNLVKNKCVNFNFNGLTGTGVLTESNKKFLPFQQFGRDIADTTDAVRDPQTLEILDITPCSFGGVSVITPGTNTSNQVAVLYQGVNCTEVPVAIHADQLTPTWRVYSTGSNVFQTRAGCLIGAEHVNNSYECDIPIGAGICASYHTQTNSP

SEQ ID NO: 1332 - protein, 681 aa, Artificial Sequence; identical to SEQ ID NO: 1287
  SARS-CoV-2/Iceland/247/2020__EPI_ISL_417575 spike protein (1-681)

SEQ ID NO: 1333 - protein, 681 aa, Artificial Sequence; identical to SEQ ID NO: 1287
  SARS-CoV-2/Iceland/238/2020__EPI_ISL_417566 spike protein (1-681)

SEQ ID NO: 1334 - protein, 681 aa, Artificial Sequence
  SARS-CoV-2/Greece/16/2020__EPI_ISL_418265 spike protein (1-681)
MFVFLVLLPLVSSQCVNLTTRTQLPPAYTNSFTRGVYYPDKVFRSSVLHSTQDLFLPFFSNVTWFHAIHVSGTNGTKRFDNPVLPFNDGVYFASTEKSNIIRGWIFGTTLDSKTQSLLIVNNATNVVIKVCEFQFCNDPFLGVYYHKNNKSWMESEFRVYSSANNCTFEYVSQPFLMDLEGKQGNFKNLREFVFKNVDGYFKIYSKHTPINLVRDLPQGFSALEPLVDLPIGINITRFQTLLALHRSYLTPGDSSSGWTAGAAAYYVGYLQPRTFLLKYNENGTITDAVDCALDPLSETKCTLKSFTVEKGIYQTSNFRVQPTESIVRFPNITNLCPFGEVFNATRFASVYAWNRKRISNCVADYSVLYNSASFSTFKCYGVSPTKLNDLCFTNVYADSFVIRGDEVRQIAPGQTGKIADYNYKLPDDFTGCVIAWNSNNLDSKVGGNYNYLYRLFRKSNLKPFERDISTEIYQAGSTPCNGVEGFNCYFPLQSYGFQPTNGVGYQPYRVVVLSFELLHAPATVCGPKKSTNLVKNKCVNFNFNGLTGTGVLTESNKKFLPFQQFGRDIADTTDAVRDPQTLEILDITPCSFGGVSVITPGTNTSNQVAVLYQDVNCTEVPVAIHADQLTPTWRVYSTGSNVFQTRAGCLIGAEHVNNSYECDIPIGAGICASYQTQTNSP

SEQ ID NO: 1335 - protein, 681 aa, Artificial Sequence
  SARS-CoV-2/Iceland/319/2020__EPI_ISL_417648 spike protein (1-681)
MFVFLVLLPLVSSQCVNLTTRTQLPPAYTNSFTRGVYYPDKVFRSSVLHSTQDLFLPFFSNVTWFHAIHVSGTNGTKRFDNPVLPFNDGVYFASTEKSNIIRGWIFGTTLDSKTQSLLIVNNATNVVIKVCEFQFCNDPFLGVYYHKNNKSWMESEFRVYSSANNCTFEYVSQPFLIDLEGKQGNFKNLREFVFKNIDGYFKIYSKHTPINLVRDLPQGFSALEPLVDLPIGINITRFQTLLALHRSYLTPGDSSSGWTAGAAAYYVGYLQPRTFLLKYNENGTITDAVDCALDPLSETKCTLKSFTVEKGIYQTSNFRVQPTESIVRFPNITNLCPFGEVFNATRFASVYAWNRKRISNCVADYSVLYNSASFSTFKCYGVSPTKLNDLCFTNVYADSFVIRGDEVRQIAPGQTGKIADYNYKLPDDFTGCVIAWNSNNLDSKVGGNYNYLYRLFRKSNLKPFERDISTEIYQAGSTPCNGVEGFNCYFPLQSYGFQPTNGVGYQPYRVVVLSFELLHAPATVCGPKKSTNLVKNKCVNFNFNGLTGTGVLTESNKKFLPFQQFGRDIADTTDAVRDPQTLEILDITPCSFGGVSVITPGTNTSNQVAVLYQGVNCTEVPVAIHADQLTPTWRVYSTGSNVFQTRAGCLIGAEHVNNSYECDIPIGAGICASYQTQTNSP

SEQ ID NO: 1336 - protein, 681 aa, Artificial Sequence; identical to SEQ ID NO: 1287
  SARS-CoV-2/Congo/94/2020__EPI_ISL_417947 spike protein (1-681)

SEQ ID NO: 1337 - protein, 681 aa, Artificial Sequence; identical to SEQ ID NO: 27
  SARS-CoV-2/Congo/158/2020__EPI_ISL_417950 spike protein (1-681)

SEQ ID NO: 1338 - protein, 681 aa, Artificial Sequence
  SARS-CoV-2/USA/UT-00034/2020__EPI_ISL_417977 spike protein (1-681)
MFVFLVLLPLVSSQCVNLTTRTQLPPAYTNSFTRGVYYPDKVFRSSVLHSTQDLFLPFFSNVTWFHAIHVSGTNGTKRFDNPVLPFNDGVYFASTEKSNIIRGWIFGTTLDSKTQSLLIVNNATNVVIKVCEFQFCNDPFLGVYYYKNNKSWMESEFRVYSSANNCTFEYVSQPFLMDLEGKQGNFKNLREFVFKNIDGYFKIYSKHTPINLVRDLPQGFSALEPLVDLPIGINITRFQTLLALHRSYLTPGDSSSGWTAGAAAYYVGYLQPRTFLLKYNENGTITDAVDCALDPLSETKCTLKSFTVEKGIYQTSNFRVQPTESIVRFPNITNLCPFGEVFNATRFASVYAWNRKRISNCVADYSVLYNSASFSTFKCYGVSPTKLNDLCFTNVYADSFVIRGDEVRQIAPGQTGKIADYNYKLPDDFTGCVIAWNSNNLDSKVGGNYNYLYRLFRKSNLKPFERDISTEIYQAGSTPCNGVEGFNCYFPLQSYGFQPTNGVGYQPYRVVVLSFELLHAPATVCGPKKSTNLVKNKCVNFNFNGLTGTGVLTESNKKFLPFQQFGRDIADTTDAVRDPQTLEILDITPCSFGGVSVITPGTNTSNQVAVLYQGVNCTEVPVAIHADQLTPTWRVYSTGSNVFQTRAGCLIGAEHVNNSYECDIPIGAGICASYQTQTNSP

SEQ ID NO: 1339 - protein, 681 aa, Artificial Sequence
  SARS-CoV-2/USA/UT-00033/2020__EPI_ISL_417976 spike protein (1-681)
MFVFLVLLPLVSSQCVNLTTRTQLPPAYTNSFTRGVYYPDKVFRSSVLHSTQDLFLPFFSNVTWFHAIHVSGTNGTKRFDNPVLPFNDGVYFASTEKSNIIRGWIFGTTLDSKTQSLLIVNNATNVVIKVCEFQFCNDPFLGVYYHKNNKSWMESEFRVYSSANNCTFEYVSQPFLMDLEGKQGNFKNLREFVFKNIDGYFKIYSKHTPINLVRDLPQGFSALEPLVDLPIGINITRFQTLLALHRSYLTPGDSSSGLTAGAAAYYVGYLQPRTFLLKYNENGTITDAVDCALDPLSETKCTLKSFTVEKGIYQTSNFRVQPTESIVRFPNITNLCPFGEVFNATRFASVYAWNRKRISNCVADYSVLYNSASFSTFKCYGVSPTKLNDLCFTNVYADSFVIRGDEVRQIAPGQTGKIADYNYKLPDDFTGCVIAWNSNNLDSKVGGNYNYLYRLFRKSNLKPFERDISTEIYQAGSTPCNGVEGFNCYFPLQSYGFQPTNGVGYQPYRVVVLSFELLHAPATVCGPKKSTNLVKNKCVNFNFNGLTGTGVLTESNKKFLPFQQFGRDIADTTDAVRDPQTLEILDITPCSFGGVSVITPGTNTSNQVAVLYQGVNCTEVPVAIHADQLTPTWRVYSTGSNVFQTRAGCLIGAEHVNNSYECDIPIGAGICASYQTQTNSP

SEQ ID NO: 1340 - protein, 681 aa, Artificial Sequence
  SARS-CoV-2/USA/WI-13/2020__EPI_ISL_417516 spike protein (1-681)
MFVFLVLLPLVSSQCVNLTTRTQLPPAYTNSFTRGVYYPDKVFRSSVLHSTQDLFLPFFSNVTWFHAIHVSGTNGTKRFDNPVLPFNDGVYFASTEKSNIIRGWIFGTTLDSKTQSLLIVNNATNVVIKVCEFQFCNDPFLGVYYHKNNKSWMESEFRVYSSANNCTFEYVSQPFLMDLEGKQGNFKNLREFVFKNIDGYFKIYSKHTPINLVRDLPQGFSALEPLVDLPIGINITRFQTLLALHRSYLTPGDSSSGWTAGAAAYYVGYLQPRTFLLKYNENGTITDAVDCALDPLSETKCTLKSFTVEKGIYQTSNFRVLPTESIVRFPNITNLCPFGEVFNATRFASVYAWNRKRISNCVADYSVLYNSASFSTFKCYGVSPTKLNDLCFTNVYADSFVIRGDEVRQIAPGQTGKIADYNYKLPDDFTGCVIAWNSNNLDSKVGGNYNYLYRLFRKSNLKPFERDISTEIYQAGSTPCNGVEGFNCYFPLQSYGFQPTNGVGYQPYRVVVLSFELLHAPATVCGPKKSTNLVKNKCVNFNFNGLTGTGVLTESNKKFLPFQQFGRDIADTTDAVRDPQTLEILDITPCSFGGVSVITPGTNTSNQVAVLYQGVNCTEVPVAIHADQLTPTWRVYSTGSNVFQTRAGCLIGAEHVNNSYECDIPIGAGICASYQTQTNSP

SEQ ID NO: 1341 - protein, 680 aa, Artificial Sequence
  SARS-CoV-2/India/1-27/2020__EPI_ISL_413522 spike protein (1-680)
MFVFLVLLPLVSSQCVNLTTRTQLPPAYTNSFTRGVYYPDKVFRSSVLHSTQDLFLPFFSNVTWFHAIHVSGTNGTKRFDNPVLPFNDGVYFASTEKSNIIRGWIFGTTLDSKTQSLLIVNNATNVVIKVCEFQFCNDPFLGVYHKNNKSWMESEFRVYSSANNCTFEYVSQPFLMDLEGKQGNFKNLREFVFKNIDGYFKIYSKHTPINLVRDLPQGFSALEPLVDLPIGINITRFQTLLALHRSYLTPGDSSSGWTAGAAAYYVGYLQPRTFLLKYNENGTITDAVDCALDPLSETKCTLKSFTVEKGIYQTSNFRVQPTESIVRFPNITNLCPFGEVFNATRFASVYAWNRKRISNCVADYSVLYNSASFSTFKCYGVSPTKLNDLCFTNVYADSFVIRGDEVIQIAPGQTGKIADYNYKLPDDFTGCVIAWNSNNLDSKVGGNYNYLYRLFRKSNLKPFERDISTEIYQAGSTPCNGVEGFNCYFPLQSYGFQPTNGVGYQPYRVVVLSFELLHAPATVCGPKKSTNLVKNKCVNFNFNGLTGTGVLTESNKKFLPFQQFGRDIADTTDAVRDPQTLEILDITPCSFGGVSVITPGTNTSNQVAVLYQDVNCTEVPVAIHADQLTPTWRVYSTGSNVFQTRAGCLIGAEHVNNSYECDIPIGAGICASYQTQTNSP

SEQ ID NO: 1342 - protein, 677 aa, Artificial Sequence
  SARS-CoV-2/pangolin/Guangxi/P4L/2017__EPI_ISL_410538 spike protein (1-677)
MFVFLFVLPLVSSQCVNLTTRTGIPPGYTNSSTRGVYYPDKVFRSSILHLTQDLFLPFFSNVTWFNTINYQGGFKKFDNPVLPFNDGVYFASTEKSNIIRGWIFGTTLDARTQSLLIVNNATNVVIKVCEFQFCTDPFLGVYYHNNNKTWVENEFRVYSSANNCTFEYISQPFLMDLEGKQGNFKNLREFVFKNVDGYFKIYSKHTPIDLVRDLPRGFAALEPLVDLPIGINITRFQTLLALHRSYLTPGNLESGWTTGAAAYYVGYLQQRTFLLSYNQNGTITDAVDCSLDPLSETKCTLKSLTVEKGIYQTSNFRVQPTISIVRFPNITNLCPFGEVFNASKFASVYAWNRKRISNCVADYSVLYNSTSFSTFKCYGVSPTKLNDLCFTNVYADSFVVKGDEVRQIAPGQTGVIADYNYKLPDDFTGCVIAWNSVKQDALTGGNYGYLYRLFRKSKLKPFERDISTEIYQAGSTPCNGQVGLNCYYPLERYGFHPTTGVNYQPFRVVVLSFELLNGPATVCGPKLSTTLVKDKCVNFNFNGLTGTGVLTTSKKQFLPFQQFGRDISDTTDAVRDPQTLEILDITPCSFGGVSVITPGTNTSNQVAVLYQDVNCTEVPMAIHAEQLTPAWRVYSAGANVFQTRAGCLVGAEHVNNSYECDIPVGAGICASYHSMSS

SEQ ID NO: 1343 - protein, 677 aa, Artificial Sequence
  SARS-CoV-2/pangolin/Guangxi/P5L/2017__EPI_ISL_410540 spike protein (1-677)
MFVFLFVLPLVSSQCVNLTTRTGIPPGYTNSSTRGVYYPDKVFRSSILHLTQDLFLPFFSNVTWFNTINYQGGFKKFDNPVLPFNDGVYFASTEKSNIIRGWIFGTTLDARTQSLLIVNNATNVVIKVCEFQFCTDPFLGVYYHNNNKTWVENEFRVYSSANNCTFEYISQPFLMDLEGKQGNFKNLREFVFKNVDGYFKIYSKHTPIDLVRDLPRGFAALEPLVDLPIGINITRFQTLLALHRSYLTPGKLESGWTTGAAAYYVGYLQQRTFLLSYNQNGTITDAVDCSLDPLSETKCTLKSLTVEKGIYQTSNFRVQPTISIVRFPNITNLCPFGEVFNASKFASVYAWNRKRISNCVADYSVLYNSTSFSTFKCYGVSPTKLNDLCFTNVYADSFVVKGDEVRQIAPGQTGVIADYNYKLPDDFTGCVIAWNSVKQDALTGGNYGYLYRLFRKSKLKPFERDISTEIYQAGSTPCNGQVGLNCYYPLERYGFHPTTGVNYQPFRVVVLSFELLNGPATVCGPKLSTTLVKDKCVNFNFNGLTGTGVLTTSKKQFLPFQQFGRDISDTTDAVRDPQTLEILDITPCSFGGVSVITPGTNTSNQVAVLYQDVNCTEVPMAIHAEQLTPAWRVYSAGANVFQTRAGCLVGAEHVNNSYECDIPVGAGICASYHSMSS

SEQ ID NO: 1344 - protein, 677 aa, Artificial Sequence
  SARS-CoV-2/pangolin/Guangxi/P5E/2017__EPI_ISL_410541 spike protein (1-677)
MFVFLFVLPLVSSQCVNLTTRTGIPPGYTNSSTRGVYYPDKVFRSSILHLTQDLFLPFFSNVTWFNTITYQGGSKKFDNPVLPFNDGVYFASTEKSNIIRGWIFGTTLDARTQSLLIVNNATNVVIKVCEFQFCTDPFLGVYYHNNNKTWVENEFRVYSSANNCTFEYISQPFLMDLEGKQGNFKNLREFVFKNVDGYFKIYSKHTPIDLVRDLPRGFAALEPLVDLPIGINITRFQTLLALHRSYLTPGKLESGWTTGAAAYYVGYLQQRTFLLSYNQNGTITDAVDCSLDPLSETKCTLKSLTVEKGIYQTSNFRVQPTISIVRFPNITNLCPFGEVFNASKFASVYAWNRKRISNCVADYSVLYNSTSFSTFKCYGVSPTKLNDLCFTNVYADSFVVKGDEVRQIAPGQTGVIADYNYKLPDDFTGCVIAWNSVKQDALTGDNYGYLYRLFRKSKLKPFERDISTEIYQAGSTPCNGQVGLNCYYPLERYGFHPTTGVNYQPFRVVVLSFELLNGPATVCGPKLSTTLVKDKCVNFNFNGLTGTGVLTTSKKQFLPFQQFGRDISDTTDAVRDPQTLEILDITPCSFGGVSVITPGTNTSNQVAVLYQDVNCTEVPMAIHAEQLTPAWRVYSAGANVFQTRAGCLVGAEHVNNSYECDIPVGAGICASYHSMSS

SEQ ID NO: 1345 - protein, 675 aa, Artificial Sequence
  SARS-CoV-2/pangolin/Guangxi/P1E/2017__EPI_ISL_410539 spike protein (1-675)
MFVFLFVLPLVSSQCVNLTTRTGIQPGYTNSSTRGVYYPDKVFRSSILHLTQDLFLPFFSNVTWFNTINYQGGFKKFDNPVLPFNDGVYFASTEKSNIIRGWIFGTTLDARTQSLLIVNNATNVVIKVCEFQFCTDPFLGVYYHNNNKTWVENEFRVYSSANNCTFEYISQPFLMDLEGKQGNFKNLREFVFKNVDGYFKIYSKHTPIDLVRDLPRGFAALEPLVDLPIGINITRFQTLLALHRSYLTPGKLESGWTTGAAAYYVGYLQQRTFLLSYNQNGTITDAVDCSLDPLSETKCTLKSLTVEKGIYQTSNFRVQPTISIVRFPNITNLCPFGEVFNASKFASVYAWNRKRISNCVADYSVLYNSTSFSTFKCYGVSPTKLNDLCFTNVYADSFVVKGDEVRQIAPGQTGVIADYNYKLPDDFTGCVIAWNSVKQDALTGGNYLYRLFRKSKLKPFERDISTEIYQAGSTPCNGQVGLNCYYPLERYGFHPTTGVNYQPFRVVVLSFELLNGPATVCGPKLSTTLVKDKCVNFNFNGLTGTGVLTTSKKQFLPFQQFGRDISDTTDAVRDPQTLEILDITPCSFGGVSVITPGTNTSNQVAVLYQDVNCTEVPMAIHAEQLTPAWRVYSAGANVFQTRAGCLVGAEHVNNSYECDIPVGAGICASYHSMSS

SEQ ID NO: 1346 - protein, 592 aa, Artificial Sequence; identical to SEQ ID NO: 30
  SARS-CoV-2/Wuhan/WIV05/2019__EPI_ISL_402128 spike protein (682-1273)

SEQ ID NO: 1347 - protein, 589 aa, Artificial Sequence
  SARS-CoV-2/bat/Yunnan/RaTG13/2013__EPI_ISL_402131 spike protein (681-1269)
RSVASQSIIAYTMSLGAENSVAYSNNSIAIPTNFTISVTTEILPVSMTKTSVDCTMYICGDSTECSNLLLQYGSFCTQLNRALTGIAVEQDKNTQEVFAQVKQIYKTPPIKDFGGFNFSQILPDPSKPSKRSFIEDLLFNKVTLADAGFIKQYGDCLGDIAARDLICAQKFNGLTVLPPLLTDEMIAQYTSALLAGTITSGWTFGAGAALQIPFAMQMAYRFNGIGVTQNVLYENQKLIANQFNSAIGKIQDSLSSTASALGKLQDVVNQNAQALNTLVKQLSSNFGAISSVLNDILSRLDKVEAEVQIDRLITGRLQSLQTYVTQQLIRAAEIRASANLAATKMSECVLGQSKRVDFCGKGYHLMSFPQSAPHGVVFLHVTYVPAQEKNFTTAPAICHDGKAHFPREGVFVSNGTHWFVTQRNFYEPQIITTDNTFVSGSCDVVIGIVNNTVYDPLQPELDSFKEELDKYFKNHTSPDVDLGDISGINASVVNIQKEIDRLNEVAKNLNESLIDLQELGKYEQYIKWPWYIWLGFIAGLIAIIMVTIMLCCMTSCCSCLKGCCSCGSCCKFDEDDSEPVLKGVKLHYT

SEQ ID NO: 1348 - protein, 592 aa, Artificial Sequence; identical to SEQ ID NO: 30
  SARS-CoV-2/Wuhan/HBCDC-HB-01/2019__EPI_ISL_402132 spike protein (682-1273)

SEQ ID NO: 1349 - protein, 592 aa, Artificial Sequence; identical to SEQ ID NO: 30
  SARS-CoV-2/Guangdong/20SF028/2020__EPI_ISL_403936 spike protein (682-1273)

SEQ ID NO: 1350 - protein, 592 aa, Artificial Sequence
  SARS-CoV-2/Shenzhen/SZTH-001/2020__EPI_ISL_406592 spike protein (682-1273)
RRARSVASQSIIAYTMSLGAENSVAYSNNSIAIPTNFTISVTTEILPVSMTKTSVDCTMYICGDSTECSNLLLQYGSFCTQLNRALTGIAVEQDKNTQEVFAQVKQIYKTPPIKDFGGFNFSQILPDPSKPSKRSFIEDLLFNKVTLADAGFIKQYGDCLGDIAARDLICAQKFNGLTVLPPLLTDEMIAQYTSALLAGTITSGWTFGAGAALQIPFAMQMAYRFNGIGVTQNVLYENQKLIANQFNSAIGKIQDSLSSTASALGKLQDVVNQNAQALNTLVKQLSSNFGAISSVLNDILSRLDKVEAEVQIDRLITGRLQSLQTYVTQQLIRAAEIRASANLAATKMSECVLGQSKRVDFCGKGYHLMSFPQSAPHGVVFLHVTYVPAQEKNFTTAPAICHDGKAHFPREGVFVSNGTHWFVTQRNFYEPQIITTDNTFVSGNCDVLIGIVNNTVYDPLQPELDSFKEELDKYFKNHTSPDVDLGDISGINASVVNIQKEIDRLNEVAKNLNESLIDLQELGKYEQYIKWPWYIWLGFIAGLIAIVMVTIMLCCMTSCCSCLKGCCSCGSCCKFDEDDSGPVLKGVKLHYT

SEQ ID NO: 1351 - protein, 592 aa, Artificial Sequence; identical to SEQ ID NO: 30
  SARS-CoV-2/Shenzhen/SZTH-004/2020__EPI_ISL_406595 spike protein (682-1273)

SEQ ID NO: 1352 - protein, 592 aa, Artificial Sequence; identical to SEQ ID NO: 30
  SARS-CoV-2/France/IDF0372/2020__EPI_ISL_406596 spike protein (682-1273)

SEQ ID NO: 1353 - protein, 592 aa, Artificial Sequence; identical to SEQ ID NO: 30
  SARS-CoV-2/Australia/VIC01/2020__EPI_ISL_406844 spike protein (682-1273)

SEQ ID NO: 1354 - protein, 592 aa, Artificial Sequence; identical to SEQ ID NO: 30
  SARS-CoV-2/Germany/BavPat1/2020__EPI_ISL_406862 spike protein (682-1273)

SEQ ID NO: 1355 - protein, 592 aa, Artificial Sequence
  SARS-CoV-2/Wuhan/HBCDC-HB-02/2020__EPI_ISL_412978 spike protein (682-1273)
RRARSVASQSIIAYTMSLGAENSVAYSNNSIAIPTNFTISVTTEILPVSMTKTSVDCTMYICGDSTECSNFLLQYGSFCTQLNRALTGIAVEQDKNTQEVFAQVKQIYKTPPIKDFGGFNFSQILPDPSKPSKRSFIEDLLFNKVTLADAGFIKQYGDCLGDIAARDLICAQKFNGLTVLPPLLTDEMIAQYTSALLAGTITSGWTFGAGAALQIPFAMQMAYRFNGIGVTQNVLYENQKLIANQFNSAIGKIQDSLSSTASALGKLQDVVNQNAQALNTLVKQLSSNFGAISSVLNDILSRLDKVEAEVQIDRLITGRLQSLQTYVTQQLIRAAEIRASANLAATKMSECVLGQSKRVDFCGKGYHLMSFPQSAPHGVVFLHVTYVPAQEKNFTTAPAICHDGKAHFPREGVFVSNGTHWFVTQRNFYEPQIITTDNTFVSGNCDVVIGIVNNTVYDPLQPELDSFKEELDKYFKNHTSPDVDLGDISGINASVVNIQKEIDRLNEVAKNLNESLIDLQELGKYEQYIKWPWYIWLGFIAGLIAIVMVTIMLCCMTSCCSCLKGCCSCGSCCKFDEDDSEPVLKGVKLHYT

SEQ ID NO: 1356 - protein, 592 aa, Artificial Sequence
  SARS-CoV-2/Australia/QLD02/2020__EPI_ISL_407896 spike protein (682-1273)
RRARSVASQSIIAYTMSLGAENSVAYSNNSIAIPTNFTISVTTEILPVSMTKTSVDCTMYICGDSTECSNLLLQYGSFCTQLNRALTGIAVEQDKNTQEVFAQVKQIYKTPPIKDFGGFNFSQILPDPSKPSKRSFIEDLLFNKVTLADAGFIKQYGDCLGDIAARDLICAQKFNGLTVLPPLLTDEMIAQYTSALLAGTITSGWTFGAGAALQIPFAMQMAYRFNGIGVTQNVLYENQKLIANQFNSAIGKIQDSLSSTASALGKLQDVVNQNAQALNTLVKQLSSNFGAISSVLNDILSRLDKVEAEVQIDRLITGRLQSLQTYVTQQLIRAAEIRASANLAATKMSECVLGQSKRVDFCGKGYHLMSFPQSAPHGVVFLHVTYVPAQEKNFTTAPAICHDGKAHFPREGVFVSNGTHWFVTQRNFYEPQIITTDNTFVSGNCDVVIGIVNNTVYDPLQLELDSFKEELDKYFKNHTSPDVDLGDISGINASVVNIQKEIDRLNEVAKNLNESLIDLQELGKYEQYIKWPWYIWLGFIAGLIAIVMVTIMLCCMTSCCSCLKGCCSCGSCCKFDEDDSEPVLKGVKLHYT

SEQ ID NO: 1357 - protein, 592 aa, Artificial Sequence
  SARS-CoV-2/India/1-31/2020__EPI_ISL_413523 spike protein (682-1273)
RRARSVASQSIIAYTMSLGAENSVAYSNNSIAIPTNFTISVTTEILPVSMTKTSVDCTMYICGDSTECSNLLLQYGSFCTQLNRALTGIAVEQDKNTQEVFAQVKQIYKTPPIKDFGGFNFSQILPDPSKPSKRSFIEDLLFNKVTLADAGFIKQYGDCLGDIAARDLICAQKFNGLTVLPPLLTDEMIAQYTSALLAGTITSGWTFGAGAALQIPFAMQMAYRFNGIGVTQNVLYENQKLIANQFNSVIGKIQDSLSSTASALGKLQDVVNQNAQALNTLVKQLSSNFGAISSVLNDILSRLDKVEAEVQIDRLITGRLQSLQTYVTQQLIRAAEIRASANLAATKMSECVLGQSKRVDFCGKGYHLMSFPQSAPHGVVFLHVTYVPAQEKNFTTAPAICHDGKAHFPREGVFVSNGTHWFVTQRNFYEPQIITTDNTFVSGNCDVVIGIVNNTVYDPLQPELDSFKEELDKYFKNHTSPDVDLGDISGINASVVNIQKEIDRLNEVAKNLNESLIDLQELGKYEQYIKWPWYIWLGFIAGLIAIVMVTIMLCCMTSCCSCLKGCCSCGSCCKFDEDDSEPVLKGVKLHYT

SEQ ID NO: 1358 - protein, 592 aa, Artificial Sequence; identical to SEQ ID NO: 30
  SARS-CoV-2/Guangdong/GD2020087-P0008/2020__EPI_ISL_413863 spike protein (682-1273)

SEQ ID NO: 1359 - protein, 592 aa, Artificial Sequence
  SARS-CoV-2/Sweden/01/2020__EPI_ISL_411951 spike protein (682-1273)
RRARSVASQSIIAYTMSLGAENSVAYSNNSIAIPTNFTISVTTEILPVSMTKTSVDCTMYICGDSTECSNLLLQYGSFCTQLNRALTGIAVEQDKNTQEVFAQVKQIYKTPPIKDCGGFNFSQILPDPSKPSKRSFIEDLLFNKVTLADAGFIKQYGDCLGDIAARDLICAQKFNGLTVLPPLLTDEMIAQYTSALLAGTITSGWTFGAGAALQIPFAMQMAYRFNGIGVTQNVLYENQKLIANQFNSAIGKIQDSLSSTASALGKLQDVVNQNAQALNTLVKQLSSNFGAISSVLNDILSRLDKVEAEVQIDRLITGRLQSLQTYVTQQLIRAAEIRASANLAATKMSECVLGQSKRVDFCGKGYHLMSFPQSAPHGVVFLHVTYVPAQEKNFTTAPAICHDGKAHFPREGVFVSNGTHWFVTQRNFYEPQIITTDNTFVSGNCDVVIGIVNNTVYDPLQPELDSFKEELDKYFKNHTSPDVDLGDISGINASVVNIQKEIDRLNEVAKNLNESLIDLQELGKYEQYIKWPWYIWLGFIAGLIAIVMVTIMLCCMTSCCSCLKGCCSCGSCCKFDEDDSEPVLKGVKLHYT

SEQ ID NO: 1360 - protein, 592 aa, Artificial Sequence; identical to SEQ ID NO: 30
  SARS-CoV-2/Tianmen/HBCDC-HB-07/2020__EPI_ISL_412983 spike protein (682-1273)

SEQ ID NO: 1361 - protein, 592 aa, Artificial Sequence
  SARS-CoV-2/Hong Kong/case42_VM20002493/2020__EPI_ISL_414527 spike protein (682-1273)
RRARSVASQSIIAYTMSLGAENSVAYSNNSIAIPTNFAISVTTEILPVSMTKTSVDCTMYICGDSTECSNLLLQYGSFCTQLNRALTGIAVEQDKNTQEVFAQVKQIYKTPPIKDFGGFNFSQILPDPSKPSKRSFIEDLLFNKVTLADAGFIKQYGDCLGDIAARDLICAQKFNGLTVLPPLLTDEMIAQYTSALLAGTITSGWTFGAGAALQIPFAMQMAYRFNGIGVTQNVLYENQKLIANQFNSAIGKIQDSLSSTASALGKLQDVVNQNAQALNTLVKQLSSNFGAISSVLNDILSRLDKVEAEVQIDRLITGRLQSLQTYVTQQLIRAAEIRASANLAATKMSECVLGQSKRVDFCGKGYHLMSFPQSAPHGVVFLHVTYVPAQEKNFTTAPAICHDGKAHFPREGVFVSNGTHWFVTQRNFYEPQIITTDNTFVSGNCDVVIGIVNNTVYDPLQPELDSFKEELDKYFKNHTSPDVDLGDISGINASVVNIQKEIDRLNEVAKNLNESLIDLQELGKYEQYIKWPWYIWLGFIAGLIAIVMVTIMLCCMTSCCSCLKGCCSCGSCCKFDEDDSEPVLKGVKLHYT

SEQ ID NO: 1362 - protein, 592 aa, Artificial Sequence; identical to SEQ ID NO: 30
  SARS-CoV-2/USA/CruiseA-23/2020__EPI_ISL_414482 spike protein (682-1273)

SEQ ID NO: 1363 - protein, 592 aa, Artificial Sequence; identical to SEQ ID NO: 30
  SARS-CoV-2/Hong Kong/case85_VM20002868/2020__EPI_ISL_414519 spike protein (682-1273)

SEQ ID NO: 1364 - protein, 592 aa, Artificial Sequence
  SARS-CoV-2/England/200990660/2020__EPI_ISL_414523 spike protein (682-1273)
RRARSVASQSIIAYTMSLGAENSVAYSNNSIAIPTNFTISVTTEILPVSMTKTSVDCTMYICGDSTECSNLLLQYGSFCTQLNRALTGIAVEQDKNTQEVFAQVKQIYKTPPIKDFGGFNFSQILPDPSKPSKRSFIEDLLFNKVTLADAGFIKQYGDCLGDIAARDLICAQKFNGLTVLPPLLTDEMIAQYTSALLAGTITSGWTFGAGAALQIPFAMQMAYRFNGIGVTQNVLYENQKLIANQFNSAIGKIQDSLSSTASALGKLQDVVNQNAQALNTLVKQLSSNFGAISSVLNDILSRLDKVEAEVQIDRLITGRLQSLQTYVTQQLIRAAEIRASANLAATKMSECVLGQSKRVDFCGKGYHLMSFPQSAPHGVVFLHVTYVPAQEKNFTTAPAICHDGKAHFPREGVFVSNGTHWFVTQRNFYEPQIITTDNTFVSGNCDVVIGIVNNTVYDPLQPELDSFKEELDKYFKNHTSPDVDLGDISGINASVVNIQKEIDRLNEVAKNLNESLIDLQELGKYEQYIKWPWYIWLGFIAGLIAIVMVTIMLCCMTSCCSCLKGCCSCGSCCKFDEDDSELVLKGVKLHYT

SEQ ID NO: 1365 - protein, 592 aa, Artificial Sequence
  SARS-CoV-2/Australia/NSW09/2020__EPI_ISL_413595 spike protein (682-1273)
RRARSVASQSIIAYTMSLGAENSVAYSNNSIAIPTNFTISVTTEILPVSMTKTSVDCTMYICGDSTECSNLLLQYGSFCTQLNRALTGIAVEQDKNTQEVFAQVKQIYKTPPIKDFGGFNFSQILPDPSKPSKRSFIEDLLFNKVTLADAGFIKQYGDCLGDIAARDLICAQKFNGLTVLPPLLTDEMIAQYTSALLAGTITSGWTFGAGAALQIPFAMQMAYRFNGIGVTQNVLYENQKLIANQFNSAIGKIQDSLSFTASALGKLQDVVNQNAQALNTLVKQLSSNFGAISSVLNDILSRLDKVEAEVQIDRLITGRLQSLQTYVTQQLIRAAEIRASANLAATKMSECVLGQSKRVDFCGKGYHLMSFPQSAPHGVVFLHVTYVPAQEKNFTTAPAICHDGKAHFPREGVFVSNGTHWFVTQRNFYEPQIITTDNTFVSGNCDVVIGIVNNTVYDPLQPELDSFKEELDKYFKNHTSPDVDLGDISGINASVVNIQKEIDRLNEVAKNLNESLIDLQELGKYEQYIKWPWYIWLGFIAGLIAIVMVTIMLCCMTSCCSCLKGCCSCGSCCKFDEDDSEPVLKGVKLHYT

SEQ ID NO: 1366 - protein, 592 aa, Artificial Sequence
  SARS-CoV-2/Australia/NSW10/2020__EPI_ISL_413596 spike protein (682-1273)
RRARSVASQSIIAYTMSLGAENSVAYSNNSIAIPTNFTISVTTEILPVSMTKTSVDCTMYICGDSTECSNLLLQYGSFCTQLNRALTGIAVEQDKNTQEVFAQVKQIYKTPPIKDFGGFNFSQILPDPSKPSKRSFIEDLLFNKVTLADAGFIKQYGDCLGDIAARDLICAQKFNGLTVLPPLLTDEMIAQYTSALLAGTITSGWTFGAGAALQIPFAMQMAYRFNGIGVTQNVLYENQKLIANQFNSAIGKIQDSLSSTASALGKLQDVVNQNAQALNTLVKQLSSNFGAISSVLNDILSRLDKVEAEVQIDRLITGRLQSLQTYVTQQLIRAAEIRASANLAATKMSECVLGQSKRVDFCGKGYHLMSFPQSAPHGVVFLHVTYVPAQEKNFTTAPAICHDGKAHFPREGVFVSNGTHWFVTQRNFYEPQIITTDNTFVSGNCDVVIGIVNNTVYDPLQPELDSFKEELDKYFKNHTSPDVDLGDISGINASVVNIQKEIDRLNEVAKNLNESLIDLQELGKYEQYIKWPWYIWLGFIAGLIAIVMVTIMLCCMTSCCSCLKGCCSCGSCFKFDEDDSEPVLKGVKLHYT

SEQ ID NO: 1367 - protein, 592 aa, Artificial Sequence; identical to SEQ ID NO: 30
  SARS-CoV-2/Switzerland/1000477797/2020__EPI_ISL_413023 spike protein (682-1273)

SEQ ID NO: 1368 - protein, 592 aa, Artificial Sequence
  SARS-CoV-2/Belgium/BA-02291/2020__EPI_ISL_415159 spike protein (682-1273)
RRARSVASQSIIAYTMSLGAENSVAYSNNSIAIPTNFTISVTTEILPVSMTKTSVDCTMYICGDSTECSNLLLQYGSFCTQLNRALTGIAVEQDKNTQEVFAQVKQIYKTPPIKDFGGFNFSQILPDPSKPSKRSFIEDLLFNKVTLADAGFIKQYGDCLGDIAARDLICAQKFNGLTVLPPLLTDEMIAQYTSALLAGTITSGWTFGAGAALQIPFAMQMAYRFNGIGVTQNVLYENQKLIANQFNSAIGKIQDSLSSAAPALGKLQDVVNQNAQALNTLVKQLSSNFGAISSVLNDILSRLDKVEAEVQIDRLITGRLQSLQTYVTQQLIRAAEIRASANLAATKMSECVLGQSKRVDFCGKGYHLMSFPQSAPHGVVFLHVTYVPAQEKNFTTAPAICHDGKAHFPREGVFVSNGTHWFVTQRNFYEPQIITTDNTFVSGNCDVVIGIVNNTVYDPLQPELDSFKEELDKYFKNHTSPDVDLGDISGINASVVNIQKEIDRLNEVAKNLNESLIDLQELGKYEQYIKWPWYIWLGFIAGLIAIVMVTIMLCCMTSCCSCLKGCCSCGSCCKFDEDDSEPVLKGVKLHYT

SEQ ID NO: 1369 - protein, 592 aa, Artificial Sequence; identical to SEQ ID NO: 30
  SARS-CoV-2/USA/WA8-UW5/2020__EPI_ISL_413486 spike protein (682-1273)

SEQ ID NO: 1370 - protein, 592 aa, Artificial Sequence
  SARS-CoV-2/England/20102000506/2020__EPI_ISL_415147 spike protein (682-1273)
RRARSVASQSIIAYTMSLGAENSVAYSNNSIAIPTNFTISVTTEILPVSMTKTSVDCTMYICGDSTECSNLLLQYGSFCTQLNRALTGIAVEQDKNTQEVFAQVKQIYKTPPIKDFGGFNFSQILPDPSKPSKRSFIEDLLFNKVTLADAGFIKQYGYCLGDIAARDLICAQKFNGLTVLPPLLTDEMIAQYTSALLAGTITSGWTFGAGAALQIPFAMQMAYRFNGIGVTQNVLYENQKLIANQFNSAIGKIQDSLSSTASALGKLQDVVNQNAQALNTLVKQLSSNFGAISSVLNDILSRLDKVEAEVQIDRLITGRLQSLQTYVTQQLIRAAEIRASANLAATKMSECVLGQSKRVDFCGKGYHLMSFPQSAPHGVVFLHVTYVPAQEKNFTTAPAICHDGKAHFPREGVFVSNGTHWFVTQRNFYEPQIITTDNTFVSGNCDVVIGIVNNTVYDPLQPELDSFKEELDKYFKNHTSPDVDLGDISGINASVVNIQKEIDRLNEVAKNLNESLIDLQELGKYEQYIKWPWYIWLGFIAGLIAIVMVTIMLCCMTSCCSCLKGCCSCGSCCKFDEDDSEPVLKGVKLHYT

SEQ ID NO: 1371 - protein, 592 aa, Artificial Sequence
  SARS-CoV-2/Belgium/VAG-03013/2020__EPI_ISL_415155 spike protein (682-1273)
RRARSVASQSIIAYTMSLGAENSVAYSNNSIAIPTNFTISVTTEILPVSMTKTSVDCTMYICGDSTECSNLLLQYGSFCTQLNRALTGIAVEQDKNTQEVFAQVKQIYKTPPIKDFGGFNFSQILPDPSKPSKRSFIEDLLFNKVTLADAGFIKQYGDCLGDIAARDLICAQKFNGLTVLPPLLTDEMIAQYTSALLAGTITSGWTFGAGAALQIPFAMQMAYRFNGIGVTQNVLYENQKLIANQFNSAIGKIQDSLSSTATALGKLQDVVNQNAQALNTLVKQLSSNFGAISSVLNDILSRLDKVEAEVQIDRLITGRLQSLQTYVTQQLIRAAEIRASANLAATKMSECVLGQSKRVDFCGKGYHLMSFPQSAPHGVVFLHVTYVPAQEKNFTTAPAICHDGKAHFPREGVFVSNGTHWFVTQRNFYEPQIITTDNTFVSGNCDVVIGIVNNTVYDPLQPELDSFKEELDKYFKNHTSPDVDLGDISGINASVVNIQKEIDRLNEVAKNLNESLIDLQELGKYEQYIKWPWYIWLGFIAGLIAIVMVTIMLCCMTSCCSCLKGCCSCGSCCKFDEDDSEPVLKGVKLHYT

SEQ ID NO: 1372 - protein, 592 aa, Artificial Sequence
  SARS-CoV-2/Belgium/BC-03016/2020__EPI_ISL_415157 spike protein (682-1273)
RRARSVASQSIIAYTMSLGAENSVAYSNNSIAIPTNFTISVTTEILPVSMTKTSVDCTMYICGDSTECSNLLLQYGSFCTQLNRALTGIAVEQDKNTQEVFAQVKQIYKTPPIKDFGGFNFSQILPDPSKPSKRSFIEDLLFNKVTLADAGFIKQYGDCLGDIAARDLICAQKFNGLTVLPPLLTDEMIAQYTSALLAGTITSGWTFGAGAALQIPFAMQMAYRFNGIGVTQNVLYENQKLIANQFNSAIGKIQDSLSSTAPALGKLQDVVNQNAQALNTLVKQLSSNFGAISSVLNDILSRLDKVEAEVQIDRLITGRLQSLQTYVTQQLIRAAEIRASANLAATKMSECVLGQSKRVDFCGKGYHLMSFPQSAPHGVVFLHVTYVPAQEKNFTTAPAICHDGKAHFPREGVFVSNGTHWFVTQRNFYEPQIITTDNTFVSGNCDVVIGIVNNTVYDPLQPELDSFKEELDKYFKNHTSPDVDLGDISGINASVVNIQKEIDRLNEVAKNLNESLIDLQELGKYEQYIKWPWYIWLGFIAGLIAIVMVTIMLCCMTSCCSCLKGCCSCGSCCKFDEDDSEPVLKGVKLHYT

SEQ ID NO: 1373 - protein, 592 aa, Artificial Sequence
  SARS-CoV-2/Germany/BavPat3/2020__EPI_ISL_414521 spike protein (682-1273)
RRARSVASQSIIAYTMSLGAENSVAYSNNSIAIPTNFTISVTTEILPVSMTKTSVDCTMYICGDSTECSNLLLQYGSFCTQLNRALTGIAVEQDKNTQQVFAQVKQIYKTPPIKDFGGFNFSQILPDPSKPSKRSFIEDLLFNKVTLADAGFIKQYGDCLGDIAARDLICAQKFNGLTVLPPLLTDEMIAQYTSALLAGTITSGWTFGAGAALQIPFAMQMAYRFNGIGVTQNVLYENQKLIANQFNSAIGKIQDSLSSTASALGKLQDVVNQNAQALNTLVKQLSSNFGAISSVLNDILSRLDKVEAEVQIDRLITGRLQSLQTYVTQQLIRAAEIRASANLAATKMSECVLGQSKRVDFCGKGYHLMSFPQSAPHGVVFLHVTYVPAQEKNFTTAPAICHDGKAHFPREGVFVSNGTHWFVTQRNFYEPQIITTDNTFVSGNCDVVIGIVNNTVYDPLQPELDSFKEELDKYFKNHTSPDVDLGDISGINASVVNIQKEIDRLNEVAKNLNESLIDLQELGKYEQYIKWPWYIWLGFIAGLIAIVMVTIMLCCMTSCCSCLKGCCSCGSCCKFDEDDSEPVLKGVKLHYT

SEQ ID NO: 1374 - protein, 592 aa, Artificial Sequence
  SARS-CoV-2/France/HF1805/2020__EPI_ISL_414628 spike protein (682-1273)
RRARSVASQSIIAYTMSLGAENSVAYSNNSIAIPTNFTISVTTEILPVSMTKTSVDCTMYICGDSTECSNLLLQYGSFCTQLNRALTGIAVEQDKNTQEVFAQVKQIYKTPPIKDFGGFNFSQILPDPSKPSKRSFIEDLLFNKVTLADAGFIKQYGDCLGDIAARDLICAQKFNGLTVLPPLLTDEMIAQYTSALLAGTITSGWTFGAGAALQIPFAMQMAYRFNGIGVTQNVLYENQKLIANQFNSAIGKIQDSLSSTASALGKLQDVVNQNAQALNTLVKQLSSNFGAISSVLNDILSRLDKVEAEVQIDRLITGRLQSLQTYVTQQLIRAAEIRASANLAATKMSECVLGQSKRVDFCGKGYHLMSFPQSAPHGVVFLHVTYVPAQEKNFTTAPAICHDGKAHFPREGVFVSNGTHWFVTQRNFYEPQIITTDNTFVSGNCDVVIGVVNNTVYDPLQPELDSFKEELDKYFKNHTSPDVDLGDISGINASVVNIQKEIDRLNEVAKNLNESLIDLQELGKYEQYIKWPWYIWLGFIAGLIAIVMVTIMLCCMTSCCSCLKGCCSCGSCCKFDEDDSEPVLKGVKLHYT

SEQ ID NO: 1375 - protein, 592 aa, Artificial Sequence
  SARS-CoV-2/Netherlands/ZuidHolland_9/2020__EPI_ISL_414445 spike protein (682-1273)
RRARSVASQSIIAYTMSLGAENSVAYSNNSIAIPTNFTISVTTEILPVSMTKTSVDCTMYICGDSTECSNLLLQYGSFCTQLNRALTGIAVEQDKNTQEVFAQVKQIYKTPPIKDFGGFNFSQILPDPSKPSKRSFIEDLLFNKVTLADAGFIKQYGDCLGDIAARDLICVQKFNGLTVLPPLLTDEMIAQYTSALLAGTITSGWTFGAGAALQIPFAMQMAYRFNGIGVTQNVLYENQKLIANQFNSAIGKIQDSLSSTASALGKLQDVVNQNAQALNTLVKQLSSNFGAISSVLNDILSRLDKVEAEVQIDRLITGRLQSLQTYVTQQLIRAAEIRASANLAATKMSECVLGQSKRVDFCGKGYHLMSFPQSAPHGVVFLHVTYVPAQEKNFTTAPAICHDGKAHFPREGVFVSNGTHWFVTQRNFYEPQIITTDNTFVSGNCDVVIGIVNNTVYDPLQPELDSFKEELDKYFKNHTSPDVDLGDISGINASVVNIQKEIDRLNEVAKNLNESLIDLQELGKYEQYIKWPWYIWLGFIAGLIAIVMVTIMLCCMTSCCSCLKGCCSCGSCCKFDEDDSEPVLKGVKLHYT

SEQ ID NO: 1376 - protein, 592 aa, Artificial Sequence; identical to SEQ ID NO: 30
  SARS-CoV-2/Finland/FIN03032020A/2020__EPI_ISL_413602 spike protein (682-1273)

SEQ ID NO: 1377 - protein, 592 aa, Artificial Sequence
  SARS-CoV-2/France/GE1977/2020__EPI_ISL_414632 spike protein (682-1273)
RRARSVASQSIIAYTMSLGAENSVAYSNNSIAIPTNFTISVTTEILPVSMTKTSVDCTMYICGDSTECSNLLLQYGSFCTQLNRALTGIAVEQDKNTQEVFAQVKQIYKTPPIKDFGGFNFSQILPDPSKPSKRSFIEDLLFNKVTLADAGFIKQYGDCLGDIAARDLICAQKFNGLTVLPPLLTDEMIAQYTSALLAGTITSGWTFGAGAALQIPFAMQMAYRFNGIGVTQNVLYENQKLIANQFNSAIGKIQDSLFSTASALGKLQDVVNQNAQALNTLVKQLSSNFGAISSVLNDILSRLDKVEAEVQIDRLITGRLQSLQTYVTQQLIRAAEIRASANLAATKMSECVLGQSKRVDFCGKGYHLMSFPQSAPHGVVFLHVTYVPAQEKNFTTAPAICHDGKAHFPREGVFVSNGTHWFVTQRNFYEPQIITTDNTFVSGNCDVVIGIVNNTVYDPLQPELDSFKEELDKYFKNHTSPDVDLGDISGINASVVNIQKEIDRLNEVAKNLNESLIDLQELGKYEQYIKWPWYIWLGFIAGLIAIVMVTIMLCCMTSCCSCLKGCCSCGSCCKFDEDDSEPVLKGVKLHYT

SEQ ID NO: 1378 - protein, 592 aa, Artificial Sequence; identical to SEQ ID NO: 30
  SARS-CoV-2/Finland/FIN-313/2020__EPI_ISL_414641 spike protein (682-1273)

SEQ ID NO: 1379 - protein, 592 aa, Artificial Sequence
  SARS-CoV-2/Netherlands/ZuidHolland_2/2020__EPI_ISL_414556 spike protein (682-1273)
RRARSVASQSIIAYTMSLGAENSVAYSNNSIAIPTNFTISVTTEILPVSMTKTSVDCTMYICGDSTECSNLLLQYGSFCTQLNRALTGIALEQDKNTQEVFAQVKQIYKTPPIKDFGGFNFSQILPDPSKPSKRSFIEDLLFNKVTLADAGFIKQYGDCLGDIAARDLICAQKFNGLTVLPPLLTDEMIAQYTSALLAGTITSGWTFGAGAALQIPFAMQMAYRFNGIGVTQNVLYENQKLIANQFNSAIGKIQDSLSSTASALGKLQDVVNQNAQALNTLVKQLSSNFGAISSVLNDILSRLDKVEAEVQIDRLITGRLQSLQTYVTQQLIRAAEIRASANLAATKMSECVLGQSKRVDFCGKGYHLMSFPQSAPHGVVFLHVTYVPAQEKNFTTAPAICHDGKAHFPREGVFVSNGTHWFVTQRNFYEPQIITTDNTFVSGNCDVVIGIVNNTVYDPLQPELDSFKEELDKYFKNHTSPDVDLGDISGINASVVNIQKEIDRLNEVAKNLNESLIDLQELGKYEQYIKWPWYIWLGFIAGLIAIVMVTIMLCCMTSCCSCLKGCCSCGSCCKFDEDDSEPVLKGVKLHYT

SEQ ID NO: 1380 - protein, 592 aa, Artificial Sequence; identical to SEQ ID NO: 30
  SARS-CoV-2/USA/WA-UW31/2020__EPI_ISL_414618 spike protein (682-1273)

SEQ ID NO: 1381 - protein, 592 aa, Artificial Sequence; identical to SEQ ID NO: 30
  SARS-CoV-2/South Korea/SNU01/2020__EPI_ISL_411929 spike protein (682-1273)

SEQ ID NO: 1382 - protein, 592 aa, Artificial Sequence
  SARS-CoV-2/China/WF0004/2020__EPI_ISL_413694 spike protein (682-1273)
RRARSVASQSIIAYTMSLGAENSVAYSNNSIAIPTNFTISVTTEILPVSMTKTSVDCTMYICGDSTECSNLLLQYGSFCTQLNRALTGIAVEQDKNTQEVFAQVKQIYKTPPIKDFGGFNFSQILPDPSKPSKRSFIEDLLFNKVTLADAGFIKQYGDCLGDIAARDLICAQKFNGLTVLPPLLTDEMIAQYTSALLAGTITSGWTFGAGAALQIPFAMQMAYRFNGIGVTQNVLYENQKLIANQFNSAIGKIQDSLSSTASALGKLQDVVNQNAQALNTLVKQLSSNFGAISSVLNDILSRLDKVEAEVQIDRLITGRLQSLQTYVTQQLIRAAEIRASANLAATKMSECVLGQSKRFDFCGKGYHLMSFPQSAPHGVVFLHVTYVPAQEKNFTTAPAICHDGKAHFPREGVFVSNGTHWFVTQRNFYEPQIITTDNTFVSGNCDVVIGIVNNTVYDPLQPELDSFKEELDKYFKNHTSPDVDLGDISGINASVVNIQKEIDRLNEVAKNLNESLIDLQELGKYEQYIKWPWYIWLGFIAGLIAIVMVTIMLCCMTSCCSCLKGCCSCGSCCKFDEDDSEPVLKGVKLHYT

SEQ ID NO: 1383 - protein, 592 aa, Artificial Sequence
  SARS-CoV-2/China/WF0028/2020__EPI_ISL_413791 spike protein (682-1273)
RRARSVASQSIIAYTMSLGAENSVAYSNNSIAIPTNFTISVTTEILPVSMTKTSVDCTMYICGDSTECSNLLLQYGSFCTQLNRALTGIAVEQDKNTQEVFAQVKQIYKTPPIKDFGGFNFSQILPDPSKPSKRSFIEDLLFNKVTLADAGFIKQYGDCLGDIAARDLICAQKFNGLTVLPPLLTDEMIAQYTSALLAGTITSGWTFGAGAALQIPFAMQMAYRFNGIGVTQNVLYENQKLIANQFNSAIGKIQDSLSSTASALGKLQDVVNQNAQALNTLVKQLSSNFGAISSVLNDILSRLDKVEAEVQIDRLITGRLQSLQTYVTQQLIRAAEIRASANLAATKMSECVLGQSKRVDFCGKGYHLMSFPQSAPHGVVFLHVTYVPAQEKNFTTAPAICHDGKAHFPREGVFVSNGTHWFVTQRNFYEPQIITTDNTFVSGNCDVVIGIVNNTVYDPLQPELESFKEELDKYFKNHTSPDVDLGDISGINASVVNIQKEIDRLNEVAKNLNESLIDLQELGKYEQYIKWPWYIWLGFIAGLIAIVMVTIMLCCMTSCCSCLKGCCSCGSCCKFDEDDSEPVLKGVKLHYT

SEQ ID NO: 1384 - protein, 592 aa, Artificial Sequence; identical to SEQ ID NO: 30
  SARS-CoV-2/2019-nCoV/USA-CruiseA-18/2020__MT159716.1 spike protein (682-1273)

SEQ ID NO: 1385 - protein, 592 aa, Artificial Sequence; identical to SEQ ID NO: 30
  SARS-CoV-2/SARS-CoV-2/Yunnan-01/human/2020/CHN__MT049951.1 spike protein (682-1273)

SEQ ID NO: 1386 - protein, 592 aa, Artificial Sequence; identical to SEQ ID NO: 30
  SARS-CoV-2/USA/WA-UW292/2020__EPI_ISL_418077 spike protein (682-1273)

SEQ ID NO: 1387 - protein, 592 aa, Artificial Sequence; identical to SEQ ID NO: 30
  SARS-CoV-2/Iceland/192/2020__EPI_ISL_417819 spike protein (682-1273)

SEQ ID NO: 1388 - protein, 592 aa, Artificial Sequence
  SARS-CoV-2/Belgium/ULG-6939/2020__EPI_ISL_417020 spike protein (682-1273)
RRARSVASQSIIAYTMSLGAENSVVYSNNSIAIPTNFTISVTTEILPVSMTKTSVDCTMYICGDSTECSNLLLQYGSFCTQLNRALTGIAVEQDKNTQEVFAQVKQIYKTPPIKDFGGFNFSQILPDPSKPSKRSFIEDLLFNKVTLADAGFIKQYGDCLGDIAARDLICAQKFNGLTVLPPLLTDEMIAQYTSALLAGTITSGWTFGAGAALQIPFAMQMAYRFNGIGVTQNVLYENQKLIANQFNSAIGKIQDSLSSTASALGKLQDVVNQNAQALNTLVKQLSSNFGAISSVLNDILSRLDKVEAEVQIDRLITGRLQSLQTYVTQQLIRAAEIRASANLAATKMSECVLGQSKRVDFCGKGYHLMSFPQSAPHGVVFLHVTYVPAQEKNFTTAPAICHDGKAHFPREGVFVSNGTHWFVTQRNFYEPQIITTDNTFVSGNCDVVIGIVNNTVYDPLQPELDSFKEELDKYFKNHTSPDVDLGDISGINASVVNIQKEIDRLNEVAKNLNESLIDLQELGKYEQYIKWPWYIWLGFIAGLIAIVMVTIMLCCMTSCCSCLKGCCSCGSCCKFDEDDSEPVLKGVKLHYT

SEQ ID NO: 1389 - protein, 592 aa, Artificial Sequence
  SARS-CoV-2/France/HF2496/2020__EPI_ISL_418231 spike protein (682-1273)
RRARSVASQSIIAYTMSLGAENSVAYSNNSIAIPTNFTISVTTEILPVSMTKTSVDCTMYICGDSTECSNLLLQYGSFCTQLNRALTGIAVEQDKNTQEVFAQVKQIYKTPPIKDFGGFNFSQILPDPSKPSKRSFIEDLLFNKVTLADAGFIKQYGDCLGDIVARDLICAQKFNGLTVLPPLLTDEMIAQYTSALLAGTITSGWTFGAGAALQIPFAMQMAYRFNGIGVTQNVLYENQKLIANQFNSAIGKIQDSLSSTASALGKLQDVVNQNAQALNTLVKQLSSNFGAISSVLNDILSRLDKVEAEVQIDRLITGRLQSLQTYVTQQLIRAAEIRASANLAATKMSECVLGQSKRVDFCGKGYHLMSFPQSAPHGVVFLHVTYVPAQEKNFTTAPAICHDGKAHFPREGVFVSNGTHWFVTQRNFYEPQIITTDNTFVSGNCDVVIGIVNNTVYDPLQPELDSFKEELDKYFKNHTSPDVDLGDISGINASVVNIQKEIDRLNEVAKNLNESLIDLQELGKYEQYIKWPWYIWLGFIAGLIAIVMVTIMLCCMTSCCSCLKGCCSCGSCCKFDEDDSEPVLKGVKLHYT

SEQ ID NO: 1390 - protein, 592 aa, Artificial Sequence
  SARS-CoV-2/USA/WA-UW291/2020__EPI_ISL_418076 spike protein (682-1273)
RRARSVASQSIIAYTMSLGAENSVAYSNNSIAIPTNFTISVTTEILPVSMTKTSVDCTMYICGDSTECSNLLLQYGSFCTQLNRALTGIAVEQDKNTQEVFAQVKQIYKTPPIKDFGGFNFSQILPDPSKPSKRSFIEDLLFNKVTLADAGFIKQYGDCLGDIAARDLICAQKFNGLTVLPPLLTDEMIAQYTSALLAGTITSGWTFGAGAALQIPFAMQMAYRFNGIGVTQNVLYENQKLIANQFNSAIGKIQYSLSSTASALGKLQDVVNQNAQALNTLVKQLSSNFGAISSVLNDILSRLDKVEAEVQIDRLITGRLQSLQTYVTQQLIRAAEIRASANLAATKMSECVLGQSKRVDFCGKGYHLMSFPQSAPHGVVFLHVTYVPAQEKNFTTAPAICHDGKAHFPREGVFVSNGTHWFVTQRNFYEPQIITTDNTFVSGNCDVVIGIVNNTVYDPLQPELDSFKEELDKYFKNHTSPDVDLGDISGINASVVNIQKEIDRLNEVAKNLNESLIDLQELGKYEQYIKWPWYIWLGFIAGLIAIVMVTIMLCCMTSCCSCLKGCCSCGSCCKFDEDDSEPVLKGVKLHYT

SEQ ID NO: 1391 - protein, 592 aa, Artificial Sequence
  SARS-CoV-2/Portugal/PT0034/2020__EPI_ISL_418019 spike protein (682-1273)
RRARSVASQSIIAYTMSLGAENSVAYSNNSIAIPTNFTISVTTEILPVSMTKTSVDCTMYICGDSTECSNLLLQYGSFCTQLNRALTGIAVEQDKNTQEVFAQVKQIYKTPPIKDFGGFNFSQILPDPSKPSKRSFIEDLLFNKVTLADAGFIKQYGDCLGDIAARDLICAQKFNGLTVLPPLLTDEMIAQYTSALLAGTITSGWTFGAGAALQIPFAMQMAYRFNGIGVTQNVLYENQKLIANQFNSAIGKIQDSLSSTASALGKLQDVVNQNAQALNTLVKQLSSNFGAISSVLNDILSRLDKVEAEVQIDRLITGRLQSLQTYVTQQLIRAAEIRASANLAATKMSECVLGQSKRVDFCGKGYHLMSFPQSAPHGVVFLHVTYVPAQEKNFTTAPAICHDGKAHFPREGVFVSNGTHWFVTQRNFYEPQIITTDNTFVSGNCDVVIGIVNNTVYDPLQPELDSFKEELDKYFKNHTSPDVDLGDISGINASVVNIQKEIDRLNEVAKNLNESLIDLQELGKYEQYIKWPWYIWLGFIAGLIAIVMVTIMLCCITSCCSCLKGCCSCGSCCKFDEDDSEPVLKGVKLHYT

SEQ ID NO: 1392 - protein, 592 aa, Artificial Sequence
  SARS-CoV-2/Iceland/202/2020__EPI_ISL_417750 spike protein (682-1273)
RRARSVASQSIIAYTMSLGAENSVAYSNNSIAIPTNFTISVTTEILPVSMTKTSVDCTMYICGDSTECSNLLLQYGSFCTQLNRALTGIAVEQDKNTQEVFAQVKQIYKTPPIKDFGGFNFSQILPDPSKPSKRSFIEDLLFNKVTLADAGFIKQYGDCLGDIAARDLICAQKFNGLTVLPPLLTDEMIAQYTSALLAGTITSGWTFGAGAALQIPFAMQMAYRFNGIGVTQNVLYENQKLIANQFNSAIGKIQDSLSSTASALGKLQDVVNQNAQALNTLVKQLSSNFGAISSVLNDILSRLDKVEAEVQIDRLITGRLQSLQTYVTQQLIRAAEIRASANLAATKMSECVLGQSKRVDFCGKGYHLMSFPQSAPHGVVFLHVTYVPAQEKNFTTAPAICHDGKAHFPREGVFVSNGTHWFVTQRNFYEPQIITTDNTFVSGNCDVVIGIVNNTVYDPLQPELDSFKEELDKYFKNHTSPDVDLGDIPGINASVVNIQKEIDRLNEVAKNLNESLIDLQELGKYEQYIKWPWYIWLGFIAGLIAIVMVTIMLCCMTSCCSCLKGCCSCGSCCKFDEDDSEPVLKGVKLHYT

SEQ ID NO: 1393 - protein, 592 aa, Artificial Sequence; identical to SEQ ID NO: 30
  SARS-CoV-2/USA/WA-UW261/2020__EPI_ISL_418046 spike protein (682-1273)

SEQ ID NO: 1394 - protein, 592 aa, Artificial Sequence
  SARS-CoV-2/Portugal/PT0035/2020__EPI_ISL_418020 spike protein (682-1273)
RRARSVASQSIIAYTMSLGAENSVAYSNNSIAIPTNFTISVTTEILPVSMTKTSVDCTMYICGDSTECSNLLLQYGSFCTQLNRALTGIAVEQDKNTQEVFAQVKQIYKTPPIKDFGGFNFSQILPDPSKPSKRSFIEDLLFNKVTLADAGFIKQYGDCLGDISARDLICAQKFNGLTVLPPLLTDEMIAQYTSALLAGTITSGWTFGAGAALQIPFAMQMAYRFNGIGVTQNVLYENQKLIANQFNSAIGKIQDSLSSTASALGKLQDVVNQNAQALNTLVKQLSSNFGAISSVLNDILSRLDKVEAEVQIDRLITGRLQSLQTYVTQQLIRAAEIRASANLAATKMSECVLGQSKRVDFCGKGYHLMSFPQSAPHGVVFLHVTYVPAQEKNFTTAPAICHDGKAHFPREGVFVSNGTHWFVTQRNFYEPQIITTDNTFVSGNCDVVIGIVNNTVYDPLQPELDSFKEELDKYFKNHTSPDVDLGDISGINASVVNIQKEIDRLNEVAKNLNESLIDLQELGKYEQYIKWPWYIWLGFIAGLIAIVMVTIMLCCMTSCCSCLKGCCSCGSCCKFDEDDSEPVLKGVKLHYT

SEQ ID NO: 1395 - protein, 592 aa, Artificial Sequence; identical to SEQ ID NO: 30
  SARS-CoV-2/USA/NY-NYUMC7/2020__EPI_ISL_418192 spike protein (682-1273)

SEQ ID NO: 1396 - protein, 592 aa, Artificial Sequence
  SARS-CoV-2/Iceland/189/2020__EPI_ISL_417709 spike protein (682-1273)
RRARSVASQSIIAYTMSLGAENSVAYSNNSIAIPTNFTISVTTEILPVSMTKTSVDCTMYICGDSTECSNLLLQYGSFCTQLNRALTGIAVEQDKNTQEVFAQVKQIYKTPPIKDFGGFNFSQILPDPSKPSKRSFIEDLLFNKVTLADAGFTKQYGDCLGDIAARDLICAQKFNGLTVLPPLLTDEMIAQYTSALLAGTITSGWTFGAGAALQIPFAMQMAYRFNGIGVTQNVLYENQKLIANQFNSAIGKIQDSLSSTASALGKLQDVVNQNAQALNTLVKQLSSNFGAISSVLNDILSRLDKVEAEVQIDRLITGRLQSLQTYVTQQLIRAAEIRASANLAATKMSECVLGQSKRVDFCGKGYHLMSFPQSAPHGVVFLHVTYVPAQEKNFTTAPAICHDGKAHFPREGVFVSNGTHWFVTQRNFYEPQIITTDNTFVSGNCDVVIGIVNNTVYDPLQPELDSFKEELDKYFKNHTSPDVDLGDISGINASVVNIQKEIDRLNEVAKNLNESLIDLQELGKYEQYIKWPWYIWLGFIAGLIAIVMVTIMLCCMTSCCSCLKGCCSCGSCCKFDEDDSEPVLKGVKLHYT

SEQ ID NO: 1397 - protein, 592 aa, Artificial Sequence
  SARS-CoV-2/Australia/NSW56/2020__EPI_ISL_417408 spike protein (682-1273)
RRARSVASQSIIAYTMSLGAENSVAYSNNSIAIPTNFTISVTTEILPVSMTKTSVDCTMYICGDSTECSNLLLQYGSFCTQLNRALTGIAVEQDKNTQEVFAQVKQIYKTPPIKDFGGFNFSQILPDSSKPSKRSFIEDLLFNKVTLADAGFIKQYGDCLGDIAARDLICAQKFNGLTVLPPLLTDEMIAQYTSALLAGTITSGWTFGAGAALQIPFAMQMAYRFNGIGVTQNVLYENQKLIANQFNSAIGKIQDSLSSTASALGKLQDVVNQNAQALNTLVKQLSSNFGAISSVLNDILSRLDKVEAEVQIDRLITGRLQSLQTYVTQQLIRAAEIRASANLAATKMSECVLGQSKRVDFCGKGYHLMSFPQSAPHGVVFLHVTYVPAQEKNFTTAPAICHDGKAHFPREGVFVSNGTHWFVTQRNFYEPQIITTDNTFVSGNCDVVIGIVNNTVYDPLQPELDSFKEELDKYFKNHTSPDVDLGDISGINASVVNIQKEIDRLNEVAKNLNESLIDLQELGKYEQYIKWPWYIWLGFIAGLIAIVMVTIMLCCMTSCCSCLKGCCSCGSCCKFDEDDSEPVLKGVKLHYT

SEQ ID NO: 1398 - protein, 592 aa, Artificial Sequence; identical to SEQ ID NO: 30
  SARS-CoV-2/Iceland/280/2020__EPI_ISL_417608 spike protein (682-1273)

SEQ ID NO: 1399 - protein, 592 aa, Artificial Sequence
  SARS-CoV-2/Iceland/247/2020__EPI_ISL_417575 spike protein (682-1273)
RRARSVASQSIIAYTMSLGAENSVAYSNNSIAIPTNFTISVTTEILPVSMTKTSVDCTMYICGDSTECSNLLLQYGSFCTQLNRALTGIAVEQDKNTQEVFAQVKQIYKTPPIKDFGGFNFSQILPDPSKPSKRSFIEDLLFNKVTLADAGFIKQYGDCLGDIAARDLICAQKFNGLTVLPPLLTDEMIAQYTSALLAGTITSGWTFGAGAALQIPFAMQMAYRFNGIGVTQNVLYENQKLIANQFNSAIGKIQDSLSSTASALGKLQDVVNQNAQALNTLVKQLSSNFGAISSVLNDILSRLDKVEAEVQIDRLITGRLQSLQTYVTQQLIRAAEIRASANLAATKMSECVLGQSKRVDFCGKGYHLMSFPQSAPHGVVFLHVTYVPAQEKNFTTAPAICHDGKAHFPREGVFVSNGTHWFVTQRNFYEPQIITTDNTFVSGNCDVVIGIVNNTVYDPLQPELDSFKEELDKYFKNHTSPDVDLGDISGINASVVNIQKEIDRLNEVAKNLNESLIDLQELGKYEQYIKWPWYIWLGFIAGLIAIVIVTIMLCCMTSCCSCLKGCCSCGSCCKFDEDDSEPVLKGVKLHYT

SEQ ID NO: 1400 - protein, 592 aa, Artificial Sequence
  SARS-CoV-2/Iceland/238/2020__EPI_ISL_417566 spike protein (682-1273)
RRARSVASQSIIAYTMSLGAENSVAYSNNSIAIPTNFTISVTTEILPVSMTKTSVDCTMYICGDSTECSNLLLQYGSFCTQLNRALTGIAVEQDKNTQEVFAQVKQIYKTPPIKDFGGFNFSQILPDPSKPSKRSFIEDLLFNKVTLADVGFIKQYGDCLGDIAARDLICAQKFNGLTVLPPLLTDEMIAQYTSALLAGTITSGWTFGAGAALQIPFAMQMAYRFNGIGVTQNVLYENQKLIANQFNSAIGKIQDSLSSTASALGKLQDVVNQNAQALNTLVKQLSSNFGAISSVLNDILSRLDKVEAEVQIDRLITGRLQSLQTYVTQQLIRAAEIRASANLAATKMSECVLGQSKRVDFCGKGYHLMSFPQSAPHGVVFLHVTYVPAQEKNFTTAPAICHDGKAHFPREGVFVSNGTHWFVTQRNFYEPQIITTDNTFVSGNCDVVIGIVNNTVYDPLQPELDSFKEELDKYFKNHTSPDVDLGDISGINASVVNIQKEIDRLNEVAKNLNESLIDLQELGKYEQYIKWPWYIWLGFIAGLIAIVMVTIMLCCMTSCCSCLKGCCSCGSCCKFDEDDSEPVLKGVKLHYT

SEQ ID NO: 1401 - protein, 592 aa, Artificial Sequence; identical to SEQ ID NO: 30
  SARS-CoV-2/Greece/16/2020__EPI_ISL_418265 spike protein (682-1273)

SEQ ID NO: 1402 - protein, 592 aa, Artificial Sequence; identical to SEQ ID NO: 30
  SARS-CoV-2/Iceland/319/2020__EPI_ISL_417648 spike protein (682-1273)

SEQ ID NO: 1403 - protein, 592 aa, Artificial Sequence
  SARS-CoV-2/Congo/94/2020__EPI_ISL_417947 spike protein (682-1273)
RRARSVASQSIIAYTMSLGAENSVAYSNNSIAIPTNFTISVTTEILPVSMTKTSVDCTMYICGDSTECSNLLLQYGSFCTQLNRALTGIAVEQDKNTQEVFAQVKQIYKTPPIKDFGGFNFSQILPDPSKPSKRSFIEDILFNKVTLADAGFIKQYGDCLGDIAARDLICAQKFNGLTVLPPLLTDEMIAQYTSALLAGTITSGWTFGAGAALQIPFAMQMAYRFNGIGVTQNVLYENQKLIANQFNSAIGKIQDSLSSTASALGKLQDVVNQNAQALNTLVKQLSSNFGAISSVLNDILSRLDKVEAEVQIDRLITGRLQSLQTYVTQQLIRAAEIRASANLAATKMSECVLGQSKRVDFCGKGYHLMSFPQSAPHGVVFLHVTYVPAQEKNFTTAPAICHDGKAHFPREGVFVSNGTHWFVTQRNFYEPQIITTDNTFVSGNCDVVIGIVNNTVYDPLQPELDSFKEELDKYFKNHTSPDVDLGDISGINASVVNIQKEIDRLNEVAKNLNESLIDLQELGKYEQYIKWPWYIWLGFIAGLIAIVMVTIMLCCMTSCCSCLKGCCSCGSCCKFDEDDSEPVLKGVKLHYT

SEQ ID NO: 1404 - protein, 592 aa, Artificial Sequence
  SARS-CoV-2/Congo/158/2020__EPI_ISL_417950 spike protein (682-1273)
RRARSVASQSIIAYTMSLGAENSVAYSNNSIAIPTNFTISVTTEILPVSMTKTSVDCTMYICGDSTECSNLLLQYGSFCTQLNRALTGIAVEQDKNTQEVFAQVKQIYKTPPIKDFGGFNFSQILPDPSKPSKRSFIEDLLFNKVTLADAGFIKQYGDCLGDIAARDLICAQKFNGLTVLPPLLTDEMIAQYTSALLAGTITSGWTFGAGAALQIPFAMQMAYRFNGIGVTQNVLYENQKLIANQFNSAIGKIQDSLSSTASALGKLQDVVNQNAQALNTLVKQLSSNFGAISSVLNDILSRLDKVEAEVQIDRLITGRLQSLQTYVTQQLIRAAEIRASANLAATKMSECVLGQSKRVDFCGKGYHLMSFPQSAPHGVVFLHVTYVPAQEKNFTTAPAICHDGKAHFPREGVFVSNGTHWFVTQRNFYEPQIITTDNTFLSGNCDVVIGIVNNTVYDPLQPELDSFKEELDKYFKNHTSPDVDLGDISGINASVVNIQKEIDRLNEVAKNLNESLIDLQELGKYEQYIKWPWYIWLGFIAGLIAIVMVTIMLCCMTSCCSCLKGCCSCGSCCKFDEDDSEPVLKGVKLHYT

SEQ ID NO: 1405 - protein, 592 aa, Artificial Sequence; identical to SEQ ID NO: 30
  SARS-CoV-2/USA/UT-00034/2020__EPI_ISL_417977 spike protein (682-1273)

SEQ ID NO: 1406 - protein, 592 aa, Artificial Sequence; identical to SEQ ID NO: 30
  SARS-CoV-2/USA/UT-00033/2020__EPI_ISL_417976 spike protein (682-1273)

SEQ ID NO: 1407 - protein, 592 aa, Artificial Sequence; identical to SEQ ID NO: 30
  SARS-CoV-2/USA/WI-13/2020__EPI_ISL_417516 spike protein (682-1273)

SEQ ID NO: 1408 - protein, 592 aa, Artificial Sequence; identical to SEQ ID NO: 30
  SARS-CoV-2/India/1-27/2020__EPI_ISL_413522 spike protein (682-1272)

SEQ ID NO: 1409 - protein, 590 aa, Artificial Sequence
  SARS-CoV-2/pangolin/Guangxi/P4L/2017__EPI_ISL_410538 spike protein (682-1267)
LRSVNQRSIIAYTMSLGAENSVAYSNNSIAIPTNFTISVTTEILPVSMTKTSVDCTMYICGDSIECSNLLLQYGSFCTQLNRALTGIAVEQDKNTQEVFAQVKQIYKTPPIKDFGGFNFSQILPDPSKPSKRSFIEDLLFNKVTLADAGFIKQYGDCLGDIAARDLICAQKFNGLTVLPPLLTDEMIAQYTSALLAGTITSGWTFGAGAALQIPFAMQMAYRFNGIGVTQNVLYENQKLIANQFNSAIGKIQDSLSSTASALGKLQDVVNQNAQALNTLVKQLSSNFGAISSVLNDILSRLDKVEAEVQIDRLITGRLQSLQTYVTQQLIRAAEIRASANLAATKMSECVLGQSKRVDFCGKGYHLMSFPQSAPHGVVFLHVTYVPAQEKNFTTAPAICHEGKAHFPREGVFVSNGTHWFITQRNFYEPQIITTDNTFVSGSCDVVIGIVNNTVYDPLQPELDSFKEELDKYFKNHTSPDVDLGDISGINASVVNIQKEIDRLNEVAKNLNESPIDLQELGKYEQYIKWPWYIWLGFIAGLIAIIMVTIMLCCMTSCCSCLKGCCSCGSCCKFDEDDSEPVLKGVKLHYT

SEQ ID NO: 1410 - protein, 590 aa, Artificial Sequence
  SARS-CoV-2/pangolin/Guangxi/P5L/2017__EPI_ISL_410540 spike protein (682-1267)
FRSVNQRSIIAYTMSLGAENSVAYSNNSIAIPTNFTISVTTEILPVSMTKTSVDCTMYICGDSIECSNLLLQYGSFCTQLNRALTGIAVEQDKNTQEVFAQVKQIYKTPPIKDFGGFNFSQILPDPSKPSKRSFIEDLLFNKVTLADAGFIKQYGDCLGDIAARDLICAQKFNGLTVLPPLLTDEMIAQYTSALLAGTITSGWTFGAGAALQIPFAMQMAYRFNGIGVTQNVLYENQKLIANQFNSAIGKIQDSLSSTASALGKLQDVVNQNAQALNTLVKQLSSNFGAISSVLNDILSRLDKVEAEVQIDRLITGRLQSLQTYVTQQLIRAAEIRASANLAATKMSECVLGQSKRVDFCGKGYHLMSFPQSAPHGVVFLHVTYVPAQEKNFTTAPAICHEGKAHFPREGVFVSNGTHWFITQRNFYEPQIITTDNTFVSGSCDVVIGIVNNTVYDPLQPELDSFKEELDKYFKNHTSPDVDLGDISGINASVVNIQKEIDRLNEVAKNLNESLIDLQELGKYEQYIKWPWYIWLGFIAGLIAIIMVTIMLCCMTSCCSCLKGCCSCGSCCKFDEDDSEPVLKGVKLHYT

SEQ ID NO: 1411 - protein, 590 aa, Artificial Sequence; identical to SEQ ID NO: 1410
  SARS-CoV-2/pangolin/Guangxi/P5E/2017__EPI_ISL_410541 spike protein (682-1267)

SEQ ID NO: 1412 - protein, 590 aa, Artificial Sequence
  SARS-CoV-2/pangolin/Guangxi/P1E/2017__EPI_ISL_410539 spike protein (675-1265)
LRSVNQRSIIAYTMSLGAENSVAYSNNSIAIPTNFTISVTTEILPVSMTKTSVDCTMYICGDSIECSNLLLQYGSFCTQLNRALTGIAVEQDKNTQEVFAQVKQIYKTPPIKDFGGFNFSQILPDPSKPSKRSFIEDLLFNKVTLADAGFIKQYGDCLGDIAARDLICAQKFNGLTVLPPLLTDEMIAQYTSALLAGTITSGWTFGAGAALQIPFAMQMAYRFNGIGVTQNVLYENQKLIANQFNSAIGKIQDSLSSTASALGKLQDVVNQNAQALNTLVKQLSSNFGAISSVLNDILSRLDKVEAEVQIDRLITGRLQSLQTYVTQQLIRAAEIRASANLAATKMSECVLGQSKRVDFCGKGYHLMSFPQSAPHGVVFLHVTYVPAQEKNFTTAPAICHEGKAHFPREGVFVSNGTHWFITQRNFYEPQIITTDNTFVSGSCDVVIGIVNNTVYDPLQPELDSFKEELDKYFKNHTSPDVDLGDISGINASVVNIQKEIDRLNEVAKNLNESLIDLQELGKYEQYIKWPWYIWLGFIAGLIAIIMVTIMLCCMTSCCSCLKGCCSCGSCCKFDEDDSEPVLKGVKLHYT

SEQ ID NO: 1413 - protein, 15 aa, Artificial Sequence
  SARS-CoV-2/Wuhan/WIV05/2019__EPI_ISL_402128 spike protein (1-15)
MFVFLVLLPLVSSQC

SEQ ID NO: 1414 - protein, 15 aa, Artificial Sequence
  SARS-CoV-2/bat/Yunnan/RaTG13/2013__EPI_ISL_402131 spike protein (1-15)
MFVFLVLLPLVSSQC

SEQ ID NO: 1415 - protein, 15 aa, Artificial Sequence
  SARS-CoV-2/Wuhan/HBCDC-HB-01/2019__EPI_ISL_402132 spike protein (1-15)
MFVFLVLLPLVSSQC

SEQ ID NO: 1416 - protein, 15 aa, Artificial Sequence
  SARS-CoV-2/Guangdong/20SF028/2020__EPI_ISL_403936 spike protein (1-15)
MFVFLVLLPLVSSQC

SEQ ID NO: 1417 - protein, 15 aa, Artificial Sequence
  SARS-CoV-2/Shenzhen/SZTH-001/2020__EPI_ISL_406592 spike protein (1-15)
MFVFLVLLPLVSSQC

SEQ ID NO: 1418 - protein, 15 aa, Artificial Sequence
  SARS-CoV-2/Shenzhen/SZTH-004/2020__EPI_ISL_406595 spike protein (1-15)
MFVFLVLLPLVSSQC

SEQ ID NO: 1419 - protein, 15 aa, Artificial Sequence
  SARS-CoV-2/France/IDF0372/2020__EPI_ISL_406596 spike protein (1-15)
MFVFLVLLPLVSSQC

SEQ ID NO: 1420 - protein, 15 aa, Artificial Sequence
  SARS-CoV-2/Australia/VIC01/2020__EPI_ISL_406844 spike protein (1-15)
MFVFLVLLPLVSSQC

SEQ ID NO: 1421 - protein, 15 aa, Artificial Sequence
  SARS-CoV-2/Germany/BavPat1/2020__EPI_ISL_406862 spike protein (1-15)
MFVFLVLLPLVSSQC

SEQ ID NO: 1422 - protein, 15 aa, Artificial Sequence
  SARS-CoV-2/Wuhan/HBCDC-HB-02/2020__EPI_ISL_412978 spike protein (1-15)
MFVFLVLLPLVSSQC

SEQ ID NO: 1423 - protein, 15 aa, Artificial Sequence
  SARS-CoV-2/Australia/QLD02/2020__EPI_ISL_407896 spike protein (1-15)
MFVFLVLLPLVSSQC

SEQ ID NO: 1424 - protein, 15 aa, Artificial Sequence
  SARS-CoV-2/India/1-31/2020__EPI_ISL_413523 spike protein (1-15)
MFVFLVLLPLVSSQC

SEQ ID NO: 1425 - protein, 15 aa, Artificial Sequence
  SARS-CoV-2/Guangdong/GD2020087-P0008/2020__EPI_ISL_413863 spike protein (1-15)
MFVFLVLLPLVSSQC

SEQ ID NO: 1426 - protein, 15 aa, Artificial Sequence
  SARS-CoV-2/Sweden/01/2020__EPI_ISL_411951 spike protein (1-15)
MFVFLVLLPLVSSQC

SEQ ID NO: 1427 - protein, 15 aa, Artificial Sequence
  SARS-CoV-2/Tianmen/HBCDC-HB-07/2020__EPI_ISL_412983 spike protein (1-15)
MFVFLVLLPLVSSQC

SEQ ID NO: 1428 - protein, 15 aa, Artificial Sequence
  SARS-CoV-2/Hong Kong/case42_VM20002493/2020__EPI_ISL_414527 spike protein (1-15)
MFVFLVLLPLVSSQC

SEQ ID NO: 1429 - protein, 15 aa, Artificial Sequence
  SARS-CoV-2/USA/CruiseA-23/2020__EPI_ISL_414482 spike protein (1-15)
MFVFLVLLPLVSSQC

SEQ ID NO: 1430 - protein, 15 aa, Artificial Sequence
  SARS-CoV-2/Hong Kong/case85_VM20002868/2020__EPI_ISL_414519 spike protein (1-15)
MFVFLVLVPLVSSQC

SEQ ID NO: 1431 - protein, 15 aa, Artificial Sequence
  SARS-CoV-2/England/200990660/2020__EPI_ISL_414523 spike protein (1-15)
MFVFLVLLPLVSSQC

SEQ ID NO: 1432 - protein, 15 aa, Artificial Sequence
  SARS-CoV-2/Australia/NSW09/2020__EPI_ISL_413595 spike protein (1-15)
MFVFLVLLPLVSSQC

SEQ ID NO: 1433 - protein, 15 aa, Artificial Sequence
  SARS-CoV-2/Australia/NSW10/2020__EPI_ISL_413596 spike protein (1-15)
MFVFLVLLPLVSSQC

SEQ ID NO: 1434 - protein, 15 aa, Artificial Sequence
  SARS-CoV-2/Switzerland/1000477797/2020__EPI_ISL_413023 spike protein (1-15)
MFVFLVLLPLVSSQC

SEQ ID NO: 1435 - protein, 15 aa, Artificial Sequence
  SARS-CoV-2/Belgium/BA-02291/2020__EPI_ISL_415159 spike protein (1-15)
MFVFLVLLPLVSSQC

SEQ ID NO: 1436 - protein, 15 aa, Artificial Sequence
  SARS-CoV-2/USA/WA8-UW5/2020__EPI_ISL_413486 spike protein (1-15)
MFVFLVLLPLVSSQC

SEQ ID NO: 1437 - protein, 15 aa, Artificial Sequence
  SARS-CoV-2/England/20102000506/2020__EPI_ISL_415147 spike protein (1-15)
MFVFLVLLPLVSSQC

SEQ ID NO: 1438 - protein, 15 aa, Artificial Sequence
  SARS-CoV-2/Belgium/VAG-03013/2020__EPI_ISL_415155 spike protein (1-15)
MFVFLVLLPLVSSQC

SEQ ID NO: 1439 - protein, 15 aa, Artificial Sequence
  SARS-CoV-2/Belgium/BC-03016/2020__EPI_ISL_415157 spike protein (1-15)
MFVFLVLLPLVSSQC

SEQ ID NO: 1440 - protein, 15 aa, Artificial Sequence
  SARS-CoV-2/Germany/BavPat3/2020__EPI_ISL_414521 spike protein (1-15)
MFVFLVLLPLVSSQC

SEQ ID NO: 1441 - protein, 15 aa, Artificial Sequence
  SARS-CoV-2/France/HF1805/2020__EPI_ISL_414628 spike protein (1-15)
MFVFLVLLPLVSSQC

SEQ ID NO: 1442 - protein, 15 aa, Artificial Sequence
  SARS-CoV-2/Netherlands/ZuidHolland_9/2020__EPI_ISL_414445 spike protein (1-15)
MFVFLVLLPLVSSQC

SEQ ID NO: 1443 - protein, 15 aa, Artificial Sequence
  SARS-CoV-2/Finland/FIN03032020A/2020__EPI_ISL_413602 spike protein (1-15)
MFVFLVLLPLVSSQC

SEQ ID NO: 1444 - protein, 15 aa, Artificial Sequence
  SARS-CoV-2/France/GE1977/2020__EPI_ISL_414632 spike protein (1-15)
MFVFLVLLPLVSSQC

SEQ ID NO: 1445 - protein, 15 aa, Artificial Sequence
  SARS-CoV-2/Finland/FIN-313/2020__EPI_ISL_414641 spike protein (1-15)
MFVFLVLLPLVSSQC

SEQ ID NO: 1446 - protein, 15 aa, Artificial Sequence
  SARS-CoV-2/Netherlands/ZuidHolland_2/2020__EPI_ISL_414556 spike protein (1-15)
MFVFLVLLPLVSSQC

SEQ ID NO: 1447 - protein, 15 aa, Artificial Sequence
  SARS-CoV-2/USA/WA-UW31/2020__EPI_ISL_414618 spike protein (1-15)
MFVFLVLLPLVSSQC

SEQ ID NO: 1448 - protein, 15 aa, Artificial Sequence
  SARS-CoV-2/South Korea/SNU01/2020__EPI_ISL_411929 spike protein (1-15)
MFVFLVLLPLVSSQC

SEQ ID NO: 1449 - protein, 15 aa, Artificial Sequence
  SARS-CoV-2/China/WF0004/2020__EPI_ISL_413694 spike protein (1-15)
MFVFLVLLPLVSSQC

SEQ ID NO: 1450 - protein, 15 aa, Artificial Sequence
  SARS-CoV-2/China/WF0028/2020__EPI_ISL_413791 spike protein (1-15)
MFVFLVLLPLVSSQC

SEQ ID NO: 1451 - protein, 15 aa, Artificial Sequence
  SARS-CoV-2/2019-nCoV/USA-CruiseA-18/2020__MT159716.1 spike protein (1-15)
MFVFLVLLPLVSSQC

SEQ ID NO: 1452 - protein, 15 aa, Artificial Sequence
  SARS-CoV-2/SARS-CoV-2/Yunnan-01/human/2020/CHN__MT049951.1 spike protein (1-15)
MFVFLVLLPLVSSQC

SEQ ID NO: 1453 - protein, 15 aa, Artificial Sequence
  SARS-CoV-2/USA/WA-UW292/2020__EPI_ISL_418077 spike protein (1-15)
MFVFLVLLPLVSSQC

SEQ ID NO: 1454 - protein, 15 aa, Artificial Sequence
  SARS-CoV-2/Iceland/192/2020__EPI_ISL_417819 spike protein (1-15)
MFVFFVLLPLVSSQC

SEQ ID NO: 1455 - protein, 15 aa, Artificial Sequence
  SARS-CoV-2/Belgium/ULG-6939/2020__EPI_ISL_417020 spike protein (1-15)
MFVFLVLLPLVSSQC

SEQ ID NO: 1456 - protein, 15 aa, Artificial Sequence
  SARS-CoV-2/France/HF2496/2020__EPI_ISL_418231 spike protein (1-15)
MFVFLVLLPLVSSQC

SEQ ID NO: 1457 - protein, 15 aa, Artificial Sequence
  SARS-CoV-2/USA/WA-UW291/2020__EPI_ISL_418076 spike protein (1-15)
MFVFLVLLPLVSSQC

SEQ ID NO: 1458 - protein, 15 aa, Artificial Sequence
  SARS-CoV-2/Portugal/PT0034/2020__EPI_ISL_418019 spike protein (1-15)
MFVFLVLLPLVSSQC

SEQ ID NO: 1459 - protein, 15 aa, Artificial Sequence
  SARS-CoV-2/Iceland/202/2020__EPI_ISL_417750 spike protein (1-15)
MFVFLVLLPLVSSQC

SEQ ID NO: 1460 - protein, 15 aa, Artificial Sequence
  SARS-CoV-2/USA/WA-UW261/2020__EPI_ISL_418046 spike protein (1-15)
MFVFLVLLPLVSSQC

SEQ ID NO: 1461 - protein, 15 aa, Artificial Sequence
  SARS-CoV-2/Portugal/PT0035/2020__EPI_ISL_418020 spike protein (1-15)
MFVFLVLLPLVSSQC

SEQ ID NO: 1462 - protein, 15 aa, Artificial Sequence
  SARS-CoV-2/USA/NY-NYUMC7/2020__EPI_ISL_418192 spike protein (1-15)
MFVFLVLLPLVSSQC

SEQ ID NO: 1463 - protein, 15 aa, Artificial Sequence
  SARS-CoV-2/Iceland/189/2020__EPI_ISL_417709 spike protein (1-15)
MFVFLVLLPLVSSQC

SEQ ID NO: 1464 - protein, 15 aa, Artificial Sequence
  SARS-CoV-2/Australia/NSW56/2020__EPI_ISL_417408 spike protein (1-15)
MFVFLVLLPLVSSQC

SEQ ID NO: 1465 - protein, 15 aa, Artificial Sequence
  SARS-CoV-2/Iceland/280/2020__EPI_ISL_417608 spike protein (1-15)
MFVFLVLLPLVSSQC

SEQ ID NO: 1466 - protein, 15 aa, Artificial Sequence
  SARS-CoV-2/Iceland/247/2020__EPI_ISL_417575 spike protein (1-15)
MFVFLVLLPLVSSQC

SEQ ID NO: 1467 - protein, 15 aa, Artificial Sequence
  SARS-CoV-2/Iceland/238/2020__EPI_ISL_417566 spike protein (1-15)
MFVFLVLLPLVSSQC

SEQ ID NO: 1468 - protein, 15 aa, Artificial Sequence
  SARS-CoV-2/Greece/16/2020__EPI_ISL_418265 spike protein (1-15)
MFVFLVLLPLVSSQC

SEQ ID NO: 1469 - protein, 15 aa, Artificial Sequence
  SARS-CoV-2/Iceland/319/2020__EPI_ISL_417648 spike protein (1-15)
MFVFLVLLPLVSSQC

SEQ ID NO: 1470 - protein, 15 aa, Artificial Sequence
  SARS-CoV-2/Congo/94/2020__EPI_ISL_417947 spike protein (1-15)
MFVFLVLLPLVSSQC

SEQ ID NO: 1471 - protein, 15 aa, Artificial Sequence
  SARS-CoV-2/Congo/158/2020__EPI_ISL_417950 spike protein (1-15)
MFVFLVLLPLVSSQC

SEQ ID NO: 1472 - protein, 15 aa, Artificial Sequence
  SARS-CoV-2/USA/UT-00034/2020__EPI_ISL_417977 spike protein (1-15)
MFVFLVLLPLVSSQC

SEQ ID NO: 1473 - protein, 15 aa, Artificial Sequence
  SARS-CoV-2/USA/UT-00033/2020__EPI_ISL_417976 spike protein (1-15)
MFVFLVLLPLVSSQC

SEQ ID NO: 1474 - protein, 15 aa, Artificial Sequence
  SARS-CoV-2/USA/WI-13/2020__EPI_ISL_417516 spike protein (1-15)
MFVFLVLLPLVSSQC

SEQ ID NO: 1475 - protein, 15 aa, Artificial Sequence
  SARS-CoV-2/India/1-27/2020__EPI_ISL_413522 spike protein (1-15)
MFVFLVLLPLVSSQC

SEQ ID NO: 1476 - protein, 15 aa, Artificial Sequence
  SARS-CoV-2/pangolin/Guangxi/P4L/2017__EPI_ISL_410538 spike protein (1-15)
MFVFLFVLPLVSSQC

SEQ ID NO: 1477 - protein, 15 aa, Artificial Sequence
  SARS-CoV-2/pangolin/Guangxi/P5L/2017__EPI_ISL_410540 spike protein (1-15)
MFVFLFVLPLVSSQC

SEQ ID NO: 1478 - protein, 15 aa, Artificial Sequence
  SARS-CoV-2/pangolin/Guangxi/P5E/2017__EPI_ISL_410541 spike protein (1-15)
MFVFLFVLPLVSSQC

SEQ ID NO: 1479 - protein, 15 aa, Artificial Sequence
  SARS-CoV-2/pangolin/Guangxi/P1E/2017__EPI_ISL_410539 spike protein (1-15)
MFVFLFVLPLVSSQC

SEQ ID NO: 1480 - protein, 666 aa, Artificial Sequence; identical to SEQ ID NO: 29
  SARS-CoV-2/Wuhan/WIV05/2019__EPI_ISL_402128 spike protein (16-681)

SEQ ID NO: 1481 - protein, 665 aa, Artificial Sequence
  SARS-CoV-2/bat/Yunnan/RaTG13/2013__EPI_ISL_402131 spike protein (16-680)
VNLTTRTQLPPAYTNSSTRGVYYPDKVFRSSVLHLTQDLFLPFFSNVTWFHAIHVSGTNGIKRFDNPVLPFNDGVYFASTEKSNIIRGWIFGTTLDSKTQSLLIVNNATNVVIKVCEFQFCNDPFLGVYYHKNNKSWMESEFRVYSSANNCTFEYVSQPFLMDLEGKQGNFKNLREFVFKNIDGYFKIYSKHTPINLVRDLPPGFSALEPLVDLPIGINITRFQTLLALHRSYLTPGDSSSGWTAGAAAYYVGYLQPRTFLLKYNENGTITDAVDCALDPLSETKCTLKSFTVEKGIYQTSNFRVQPTDSIVRFPNITNLCPFGEVFNATTFASVYAWNRKRISNCVADYSVLYNSTSFSTFKCYGVSPTKLNDLCFTNVYADSFVITGDEVRQIAPGQTGKIADYNYKLPDDFTGCVIAWNSKHIDAKEGGNFNYLYRLFRKANLKPFERDISTEIYQAGSKPCNGQTGLNCYYPLYRYGFYPTDGVGHQPYRVVVLSFELLNAPATVCGPKKSTNLVKNKCVNFNFNGLTGTGVLTESNKKFLPFQQFGRDIADTTDAVRDPQTLEILDITPCSFGGVSVITPGTNASNQVAVLYQDVNCTEVPVAIHADQLTPTWRVYSTGSNVFQTRAGCLIGAEHVNNSYECDIPIGAGICASYQTQTNS

SEQ ID NO: 1482 - protein, 666 aa, Artificial Sequence
  SARS-CoV-2/Wuhan/HBCDC-HB-01/2019__EPI_ISL_402132 spike protein (16-681)
VNLTTRTQLPPAYTNSITRGVYYPDKVFRSSVLHSTQDLFLPFFSNVTWFHAIHVSGTNGTKRFDNPVLPFNDGVYFASTEKSNIIRGWIFGTTLDSKTQSLLIVNNATNVVIKVCEFQFCNDPFLGVYYHKNNKSWMESEFRVYSSANNCTFEYVSQPFLMDLEGKQGNFKNLREFVFKNIDGYFKIYSKHTPINLVRDLPQGFSALEPLVDLPIGINITRFQTLLALHRSYLTPGDSSSGWTAGAAAYYVGYLQPRTFLLKYNENGTITDAVDCALDPLSETKCTLKSFTVEKGIYQTSNFRVQPTESIVRFPNITNLCPFGEVFNATRFASVYAWNRKRISNCVADYSVLYNSASFSTFKCYGVSPTKLNDLCFTNVYADSFVIRGDEVRQIAPGQTGKIADYNYKLPDDFTGCVIAWNSNNLDSKVGGNYNYLYRLFRKSNLKPFERDISTEIYQAGSTPCNGVEGFNCYFPLQSYGFQPTNGVGYQPYRVVVLSFELLHAPATVCGPKKSTNLVKNKCVNFNFNGLTGTGVLTESNKKFLPFQQFGRDIADTTDAVRDPQTLEILDITPCSFGGVSVITPGTNTSNQVAVLYQDVNCTEVPVAIHADQLTPTWRVYSTGSNVFQTRAGCLIGAEHVNNSYECDIPIGAGICASYQTQTNSP

SEQ ID NO: 1483 - protein, 666 aa, Artificial Sequence
  SARS-CoV-2/Guangdong/20SF028/2020__EPI_ISL_403936 spike protein (16-681)
VNLTTRTQLPPAYTNSFTRGVYYPDKVFRSSVLYSTQDLFLPFFSNVTWFHAIHVSGTNGTKRFDNPVLPFNDGVYFASTEKSNIIRGWIFGTTLDSKTQSLLIVNNATNVVIKVCEFQFCNDPFLGVYYHKNNKSWMESEFRVYSSANNCTFEYVSQPFLMDLEGKQGNFKNLREFVFKNIDGYFKIYSKHTPINLVRDLPQGFSALEPLVDLPIGINITRFQTLLALHRSYLTPGDSSSGWTAGAAAYYVGYLQPRTFLLKYNENGTITDAVDCALDPLSETKCTLKSFTVEKGIYQTSNFRVQPTESIVRFPNITNLCPFGEVFNATRFASVYAWNRKRISNCVADYSVLYNSASFSTFKCYGVSPTKLNDLCFTNVYADSFVIRGDEVRQIAPGQTGKIADYNYKLPDDFTGCVIAWNSNNLDSKVGGNYNYLYRLFRKSNLKPFERDISTEIYQAGSTPCNGVEGFNCYFPLQSYGFQPTNGVGYQPYRVVVLSFELLHAPATVCGPKKSTNLVKNKCVNFNFNGLTGTGVLTESNKKFLPFQQFGRDIADTTDAVRDPQTLEILDITPCSFGGVSVITPGTNTSNQVAVLYQDVNCTEVPVAIHADQLTPTWRVYSTGSNVFQTRAGCLIGAEHVNNSYECDIPIGAGICASYQTQTNSP

SEQ ID NO: 1484 - protein, 666 aa, Artificial Sequence; identical to SEQ ID NO: 29
  SARS-CoV-2/Shenzhen/SZTH-001/2020__EPI_ISL_406592 spike protein (16-681)

SEQ ID NO: 1485 - protein, 666 aa, Artificial Sequence
  SARS-CoV-2/Shenzhen/SZTH-004/2020__EPI_ISL_406595 spike protein (16-681)
VNLTTRTQLPPAYTNSFTRGVYYPDKVFRSSVLHSTQDLFLPFFSNVTWFHAIHVSGTNGTKRFDNPVLPFNDGVYFASTEKSNIIRGWIFGTTLDSKTQSLLIVNNATNVVIKVCEFQFCNDPFLGVYYHKNNKSWMESEFRVYSSANNCTFEYVSQPFLMDLEGKQGNFKNLREFVFKNIDGYFKIYSKHTPINLVRDLPQGFSALEPLVDLPIGINITRFQTLLALHRSYLTPGDSSSGWTAGAAAYYVGYLQPRTFLLKYNENGTITDAVDCALDPLSETKCTLKSFTVEKGIYQTSNFRVQPTESIVRFPNITNLCPFGEVFNATRFASVYAWDRKRISNCVAYYSVLYNSASFSTFKCYGVSPTKLNDLCFTNVYADSFVIRGDEVRQIAPGQTGKIADYNYKLPDDFTGCVIAWNSNNLDSKVGGNYNYLYRLFRKSNLKPFERDISTEIYQAGSTPCNGVEGFNCYFPLQSYGFQPTNGVGYQPYRVVVLSFELLHAPATVCGPKKSTNLVKNKCVNFNFNGLTGTGVLTESNKKFLPFQQFGRDIADTTDAVRDPQTLEILDITPCSFGGVSVITPGTNTSNQVAVLYQDVNCTEVPVAIHADQLTPTWRVYSTGSNVFQTRAGCLIGAEHVNNSYECDIPIGAGICASYQTQTNSP

SEQ ID NO: 1486 - protein, 666 aa, Artificial Sequence
  SARS-CoV-2/France/IDF0372/2020__EPI_ISL_406596 spike protein (16-681)
VNLTTRTQLPPAYTNSFTRGVYYPDKVFRSSVLHSTQDLFLPFFSNVTWFHAIHVSGTNGTKRFDNPVLPFNDGVYFASTEKSNIIRGWIFGTTLDSKTQSLLIVNNATNVVIKVCEFQFCNDPFLGVYYHKNNKSWMESEFRVYSSANNCTFEYVSQPFLMDLEGKQGNFKNLREFVFKNIDGYFKIYSKHTPINLVRDLPQGFSALEPLVDLPIGINITRFQTLLALHRSYLTPGDSSSGWTAGAAAYYVGYLQPRTFLLKYNENGTITDAVDCALDPLSETKCTLKSFTVEKGIYQTSNFRVQPTESIVRFPNITNLCPFGEVFNATRFASVYAWNRKRISNCVADYSFLYNSASFSTFKCYGVSPTKLNDLCFTNVYADSFVIRGDEVRQIAPGQTGKIADYNYKLPDDFTGCVIAWNSNNLDSKVGGNYNYLYRLFRKSNLKPFERDISTEIYQAGSTPCNGVEGFNCYFPLQSYGFQPTNGVGYQPYRVVVLSFELLHAPATVCGPKKSTNLVKNKCVNFNFNGLTGTGVLTESNKKFLPFQQFGRDIADTTDAVRDPQTLEILDITPCSFGGVSVITPGTNTSNQVAVLYQDVNCTEVPVAIHADQLTPTWRVYSTGSNVFQTRAGCLIGAEHVNNSYECDIPIGAGICASYQTQTNSP

SEQ ID NO: 1487 - protein, 666 aa, Artificial Sequence
  SARS-CoV-2/Australia/VIC01/2020__EPI_ISL_406844 spike protein (16-681)
VNLTTRTQLPPAYTNSFTRGVYYPDKVFRSSVLHSTQDLFLPFFSNVTWFHAIHVSGTNGTKRFDNPVLPFNDGVYFASTEKSNIIRGWIFGTTLDSKTQSLLIVNNATNVVIKVCEFQFCNDPFLGVYYHKNNKSWMESEFRVYSSANNCTFEYVSQPFLMDLEGKQGNFKNLREFVFKNIDGYFKIYSKHTPINLVRDLPQGFSALEPLVDLPIGINITRFQTLLALHRRYLTPGDSSSGWTAGAAAYYVGYLQPRTFLLKYNENGTITDAVDCALDPLSETKCTLKSFTVEKGIYQTSNFRVQPTESIVRFPNITNLCPFGEVFNATRFASVYAWNRKRISNCVADYSVLYNSASFSTFKCYGVSPTKLNDLCFTNVYADSFVIRGDEVRQIAPGQTGKIADYNYKLPDDFTGCVIAWNSNNLDSKVGGNYNYLYRLFRKSNLKPFERDISTEIYQAGSTPCNGVEGFNCYFPLQSYGFQPTNGVGYQPYRVVVLSFELLHAPATVCGPKKSTNLVKNKCVNFNFNGLTGTGVLTESNKKFLPFQQFGRDIADTTDAVRDPQTLEILDITPCSFGGVSVITPGTNTSNQVAVLYQDVNCTEVPVAIHADQLTPTWRVYSTGSNVFQTRAGCLIGAEHVNNSYECDIPIGAGICASYQTQTNSP

SEQ ID NO: 1488 - protein, 666 aa, Artificial Sequence
  SARS-CoV-2/Germany/BavPat1/2020__EPI_ISL_406862 spike protein (16-681)
VNLTTRTQLPPAYTNSFTRGVYYPDKVFRSSVLHSTQDLFLPFFSNVTWFHAIHVSGTNGTKRFDNPVLPFNDGVYFASTEKSNIIRGWIFGTTLDSKTQSLLIVNNATNVVIKVCEFQFCNDPFLGVYYHKNNKSWMESEFRVYSSANNCTFEYVSQPFLMDLEGKQGNFKNLREFVFKNIDGYFKIYSKHTPINLVRDLPQGFSALEPLVDLPIGINITRFQTLLALHRSYLTPGDSSSGWTAGAAAYYVGYLQPRTFLLKYNENGTITDAVDCALDPLSETKCTLKSFTVEKGIYQTSNFRVQPTESIVRFPNITNLCPFGEVFNATRFASVYAWNRKRISNCVADYSVLYNSASFSTFKCYGVSPTKLNDLCFTNVYADSFVIRGDEVRQIAPGQTGKIADYNYKLPDDFTGCVIAWNSNNLDSKVGGNYNYLYRLFRKSNLKPFERDISTEIYQAGSTPCNGVEGFNCYFPLQSYGFQPTNGVGYQPYRVVVLSFELLHAPATVCGPKKSTNLVKNKCVNFNFNGLTGTGVLTESNKKFLPFQQFGRDIADTTDAVRDPQTLEILDITPCSFGGVSVITPGTNTSNQVAVLYQGVNCTEVPVAIHADQLTPTWRVYSTGSNVFQTRAGCLIGAEHVNNSYECDIPIGAGICASYQTQTNSP

SEQ ID NO: 1489 - protein, 666 aa, Artificial Sequence; identical to SEQ ID NO: 29
  SARS-CoV-2/Wuhan/HBCDC-HB-02/2020__EPI_ISL_412978 spike protein (16-681)

SEQ ID NO: 1490 - protein, 666 aa, Artificial Sequence; identical to SEQ ID NO: 29
  SARS-CoV-2/Australia/QLD02/2020__EPI_ISL_407896 spike protein (16-681)

SEQ ID NO: 1491 - protein, 666 aa, Artificial Sequence; identical to SEQ ID NO: 29
  SARS-CoV-2/India/1-31/2020__EPI_ISL_413523 spike protein (16-681)

SEQ ID NO: 1492 - protein, 666 aa, Artificial Sequence
  SARS-CoV-2/Guangdong/GD2020087-P0008/2020__EPI_ISL_413863 spike protein (16-681)
VNLTTRTQLPPAYTNSFTRGVYYPDKVFRSSVLHSTQDLFLPFFSNVTWFHAIHVSGTNGTKRFDNPVLPFNDGVYFASTEKSNIIRGWIFGTTLDSKTQSLLIVNNATNVVIKVCEFQFCNDPFLGVYYHKNNKSWMESEFRVYSSANNCTFEYVSQPFLMDLEGKQGNFKNLREFVFKNIDGYFKIYSKHTPINLVRDLPQGFSALEPLVDLPIGINITRFQTLLALHRSYLTPGDSSSGWTAGAAAYYVGYLQPRTFLLKYNENGTITDAVDCALDPLSETKCTLKSFTVEKGIYQTSNFRVQPTESIVRFPNITNLCPFGEVFNATRFASVYAWNRKRISNCVADYSVLYNSASFSTFKCYGVSPTKLNDLCFTNVYADSFVIRGDEVREIAPGQTGKIADYNYKLPDDFTGCVIAWNSNNLDSKVGGNYNYLYRLFRKSNLKPFERDISTEIYQAGSTPCNGVEGFNCYFPLQSYGFQPTNGVGYQPYRVVVLSFELLHAPATVCGPKKSTNLVKNKCVNFNFNGLTGTGVLTESNKKFLPFQQFGRDIADTTDAVRDPQTLEILDITPCSFGGVSVITPGTNTSNQVAVLYQDVNCTEVPVAIHADQLTPTWRVYSTGSNVFQTRAGCLIGAEHVNNSYECDIPIGAGICASYQTQTNSP

SEQ ID NO: 1493 - protein, 666 aa, Artificial Sequence; identical to SEQ ID NO: 29
  SARS-CoV-2/Sweden/01/2020__EPI_ISL_411951 spike protein (16-681)

SEQ ID NO: 1494 - protein, 666 aa, Artificial Sequence
  SARS-CoV-2/Tianmen/HBCDC-HB-07/2020__EPI_ISL_412983 spike protein (16-681)
VNLTTRTQLPPAYTNSFTRGVYYPDKVFRSSVLHSTQDLFLPFFSNVTWFHAIHVSGTNGTKRFDNPVLPFNDGVYFASTEKSNIIRGWIFGTTLDSKTQSLLIVNNATNVVIKVCEFQFCNDPFLGVYYHKNNKSWMESEFRVYSSANNCTFEYVSQPFLMDLEGKQGNFKNLREFVFKNIDGYFKIYSKHTPINLVRDLPQGFSALEPLVDLPIGINITRFQTLLALHRSYLTPGDSSSGWTAGAAAYYVGYLQPRTFLLKYNENGTITDAVDCALDPLSETKCTLKSFTVEKGIYQTSNFRVQPTESIVRFPNITNLCPFGEVFNATRFASVYAWNRKRISNCVADYSVLYNSASFSTFKCYGVSPTKLNDLCFTNVYADSFVIRGDEVRQIAPGQTGKIADYNYKLPDDFTGCVIAWNSNNLDSKVGGNYNYLYRLFRKSNLKPFERDISTEIYQAGSTPCNGVEGFNCYFPLQSYGFQPTNGVGYQPYRVVVLSFELLHAPATVCGPKKSTNLVKNKCVNFNFNGLTGTGVLTESNKKFLPFQQFGRDIADTTDAVRDPQTLEILDITPCSFGGVSVITPGTNTSNQVAVLYQDLNCTEVPVAIHADQLTPTWRVYSTGSNVFQTRAGCLIGAEHVNNSYECDIPIGAGICASYQTQTNSP

SEQ ID NO: 1495 - protein, 666 aa, Artificial Sequence; identical to SEQ ID NO: 29
  SARS-CoV-2/Hong Kong/case42_VM20002493/2020__EPI_ISL_414527 spike protein (16-681)

SEQ ID NO: 1496 - protein, 666 aa, Artificial Sequence
  SARS-CoV-2/USA/CruiseA-23/2020__EPI_ISL_414482 spike protein (16-681)
VNLTTRTQLPPAYTNSFTRGVYYPDKVFRSSVLHSTQDLFLPFFSNVTWFHAIHVSGTNGTKRFDNPVLPFNDGVYFASTEKSNIIRGWIFGTTLDSKTQSLLIVNNATNVVIKVCEFQFCNDPFLGVYYHKNNKSWMESEFRVYSSANNCTFEYVSQPFLMDLEVKQGNFKNLREFVFKNIDGYFKIYSKHTPINLVRDLPQGFSALEPLVDLPIGINITRFQTLLALHRSYLTPGDSSSGWTAGAAAYYVGYLQPRTFLLKYNENGTITDAVDCALDPLSETKCTLKSFTVEKGIYQTSNFRVQPTESIVRFPNITNLCPFGEVFNATRFASVYAWNRKRISNCVADYSVLYNSASFSTFKCYGVSPTKLNDLCFTNVYADSFVIRGDEVRQIAPGQTGKIADYNYKLPDDFTGCVIAWNSNNLDSKVGGNYNYLYRLFRKSNLKPFERDISTEIYQAGSTPCNGVEGFNCYFPLQSYGFQPTNGVGYQPYRVVVLSFELLHAPATVCGPKKSTNLVKNKCVNFNFNGLTGTGVLTESNKKFLPFQQFGRDIADTTDAVRDPQTLEILDITPCSFGGVSVITPGTNTSNQVAVLYQDVNCTEVPVAIHADQLTPTWRVYSTGSNVFQTRAGCLIGAEHVNNSYECDIPIGAGICASYQTQTNSP

SEQ ID NO: 1497 - protein, 666 aa, Artificial Sequence; identical to SEQ ID NO: 29
  SARS-CoV-2/Hong Kong/case85_VM20002868/2020__EPI_ISL_414519 spike protein (16-681)

SEQ ID NO: 1498 - protein, 666 aa, Artificial Sequence; identical to SEQ ID NO: 1488
  SARS-CoV-2/England/200990660/2020__EPI_ISL_414523 spike protein (16-681)

SEQ ID NO: 1499 - protein, 666 aa, Artificial Sequence; identical to SEQ ID NO: 29
  SARS-CoV-2/Australia/NSW09/2020__EPI_ISL_413595 spike protein (16-681)

SEQ ID NO: 1500 - protein, 666 aa, Artificial Sequence; identical to SEQ ID NO: 29
  SARS-CoV-2/Australia/NSW10/2020__EPI_ISL_413596 spike protein (16-681)

SEQ ID NO: 1501 - protein, 666 aa, Artificial Sequence
  SARS-CoV-2/Switzerland/1000477797/2020__EPI_ISL_413023 spike protein (16-681)
VNLTTRTQLPPAYTNSFTRGVYYPDKVFRSSVLHSTQDLFLPFFSNVTWFHAIHVSGTNGTKRFDNPVLPFNDGVYFASTEKSNIIRGWIFGTTLDSKTQSLLIVNNATNVVIKVCEFQFCNDPFLGVYYHKNNKSWMESEFRVYSSANNCTFEYVSQPFLMDLEGKQGNFKNLREFVFKNIDGYFNIYSKHTPINLVRDLPQGFSALEPLVDLPIGINITRFQTLLALHRSYLTPGDSSSGWTAGAAAYYVGYLQPRTFLLKYNENGTITDAVDCALDPLSETKCTLKSFTVEKGIYQTSNFRVQPTESIVRFPNITNLCPFGEVFNATRFASVYAWNRKRISNCVADYSVLYNSASFSTFKCYGVSPTKLNDLCFTNVYADSFVIRGDEVRQIAPGQTGKIADYNYKLPDDFTGCVIAWNSNNLDSKVGGNYNYLYRLFRKSNLKPFERDISTEIYQAGSTPCNGVEGFNCYFPLQSYGFQPTNGVGYQPYRVVVLSFELLHAPATVCGPKKSTNLVKNKCVNFNFNGLTGTGVLTESNKKFLPFQQFGRDIADTTDAVRDPQTLEILDITPCSFGGVSVITPGTNTSNQVAVLYQGVNCTEVPVAIHADQLTPTWRVYSTGSNVFQTRAGCLIGAEHVNNSYECDIPIGAGICASYQTQTNSP

SEQ ID NO: 1502 - protein, 666 aa, Artificial Sequence
  SARS-CoV-2/Belgium/BA-02291/2020__EPI_ISL_415159 spike protein (16-681)
VNLTTRTQLPPAYTNSFTRGVYYPDKVFRSSVLHSTQDLFLPFFSNVTWFHAIHVSGTNGTKRFDNPVLPFNDGVYFASTEKSNIIRGWIFGTTLDSKTQSLLIVNNATNVVIKVCEFQFCNDPFLGVYYHKNNKSWMESEFRVYSSANNCTFEYVSQPFLMDLEGKQGNFKNLREFVFKNIDGYFKIYSKHTPINLVRDLPQGFSALEPLVDLPIGINITRFQTLLALHRSYLTPGDSSSGWTAGAAAYYVGYLQPRTFLLKYNENGTITDAVDCALDPLSETKCTLKSFTVEKGIYQTSNFRVQPTESIVRFPNITNLCPFGEVFNATRFASVYAWNRKRISNCVADYSVLYNSASFSTFKCYGVSPTKLNDLCFTNVYADSFVIRGDEVRQIAPGQTGKIADYNYKLPDDFTGCVIAWNSNNLDSKVGGNYNYLYRLFRRSNLKPFERDISTEIYQAGSTPCNGVEGFNCYFPLQSYGFQPTNGVGYQPYRVVVLSFELLPAPATVCGPKKSTNLVKNKCVNFNFNGLTGTGVLTESNKKFLPFQQFGRDIADTTDAVRDPQTLEILDITPCSFGGVSVITPGTNTSNQVAVLYQGVNCTEVPVAIHADQLTPTWRVYSTGSNVFQTRAGCLIGAEHVNNSYECDIPIGAGICASYQTQTNSP

SEQ ID NO: 1503 - protein, 666 aa, Artificial Sequence
  SARS-CoV-2/USA/WA8-UW5/2020__EPI_ISL_413486 spike protein (16-681)
VNLTTRTQLPPAYTNSFTRGVYYPDKVFRSSVLHSTQDLFLPFFSNVTWFHAIHVSGTNGTKRFDNPVLPFNDGVYFASTEKSNIIRGWIFGTTLDSKTQSLLIVNNATNVVIKVCEFQFCNDPFLGVYYHKNNKSWMESEFRVYSSANNCTFEYVSQPFLMDLEGKQGNFKNLREFVFKNIDGYFKIYSKHTPINLVRDLPQGFSALEPLVDLPIGINITRFQTLLALHRSYLTPGDSSSGWTAGAAAYYVGYLQPRTFLLKYNENGTITDAVDCALDPLSETKCTLKSFTVEKGIYQTSNFRVQPTESIVRFPNITNLCPFGEVFNATRFASVYAWNRKRISNCVADYSVLYNSASFSTFKCYGVSPTKLNDLCFTNVYADSFVIRGDEVRQIAPGQTGKIADYNYKLPDDFTGCVIAWNSNNLDSKVGGNYNYLYRLFRKSNLKPFERDISTEIYQAGSTPCNGVEGFNCYFPLQSYGFQPTNGVGYQPYRVVVLSFELLHAPATVCGPKKSTNLVKNKCVNFNFNGLTGTGVLTESNKKFLPFQQFGRDIADTTDAVRDPQTLEILDITPCSFGGVSVITPGTNTSNQVAVLYQDVNCTEVPVAIHADQLTPTWRVYSTGSNVFQTRAGCLIGAEYVNNSYECDIPIGAGICASYQTQTNSP

SEQ ID NO: 1504 - protein, 666 aa, Artificial Sequence; identical to SEQ ID NO: 1488
  SARS-CoV-2/England/20102000506/2020__EPI_ISL_415147 spike protein (16-681)

SEQ ID NO: 1505 - protein, 666 aa, Artificial Sequence; identical to SEQ ID NO: 1488
  SARS-CoV-2/Belgium/VAG-03013/2020__EPI_ISL_415155 spike protein (16-681)

SEQ ID NO: 1506 - protein, 666 aa, Artificial Sequence; identical to SEQ ID NO: 1488
  SARS-CoV-2/Belgium/BC-03016/2020__EPI_ISL_415157 spike protein (16-681)

SEQ ID NO: 1507 - protein, 666 aa, Artificial Sequence; identical to SEQ ID NO: 29
  SARS-CoV-2/Germany/BavPat3/2020__EPI_ISL_414521 spike protein (16-681)

SEQ ID NO: 1508 - protein, 666 aa, Artificial Sequence; identical to SEQ ID NO: 1488
  SARS-CoV-2/France/HF1805/2020__EPI_ISL_414628 spike protein (16-681)

SEQ ID NO: 1509 - protein, 666 aa, Artificial Sequence; identical to SEQ ID NO: 1488
  SARS-CoV-2/Netherlands/ZuidHolland_9/2020__EPI_ISL_414445 spike protein (16-681)

SEQ ID NO: 1510 - protein, 666 aa, Artificial Sequence
  SARS-CoV-2/Finland/FIN03032020A/2020__EPI_ISL_413602 spike protein (16-681)
VNLTTRTQLPPAYTNSFTRGVYYPDKVFRSSVLHSTQDLFLPFFSNVTWFHAIHVSGTNGTKRFDNPVLPFNDGVYFASTEKSNIIRGWIFGTTLDSKTQSLLIVNNATNVVIKVCEFQFCNDPFLGVYYHKNNKSWMESEFRVYSSANNCTFEYVSQPFLMDLEGKQGNFKNLREFVFKNIDGYFKIYSKHTPINLVRDLPQGFSALEPLVDLPIGINITRFQTLLALHRSYLTPGDSSSGWTAGAAAYYVGYLQPRTFLLKYNENGTITDAVDCALDPLSETKCTLKSFTVEKGIYQTSNFRVQPTESIVRFPNITNLCPFGEVFNATRFASVYAWNRKRISNCVADYSVLYNSASFSTFKCYGVSPTKLNDLCFTNVYADSFVIRGDEVRQIAPGQTGKIADYNYKLPDDFTGCVISWNSNNLDSKVGGNYNYLYRLFRKSNLKPFERDISTEIYQAGSTPCNGVEGFNCYFPLQSYGFQPTNGVGYQPYRVVVLSFELLHAPATVCGPKKSTNLVKNKCVNFNFNGLTGTGVLTESNKKFLPFQQFGRDIADTTDAVRDPQTLEILDITPCSFGGVSVITPGTNTSNQVAVLYQGVNCTEVPVAIHADQLTPTWRVYSTGSNVFQTRAGCLIGAEHVNNSYECDIPIGAGICASYQTQTNSP

SEQ ID NO: 1511 - protein, 666 aa, Artificial Sequence; identical to SEQ ID NO: 1488
  SARS-CoV-2/France/GE1977/2020__EPI_ISL_414632 spike protein (16-681)

SEQ ID NO: 1512 - protein, 666 aa, Artificial Sequence
  SARS-CoV-2/Finland/FIN-313/2020__EPI_ISL_414641 spike protein (16-681)
VNLTTRTQLPPAYTNSFTRGVYYPDKVFRSSVLHSTQDLFLPFFSNVTWFHAIHVSGTNGTKRFDNPVLPFNDGVYFASTEKSNIIRGWIFGTTLDSKTQSLLIVNNATNVVIKVCEFQFCNDPFLGVYYHKNNKSWMESEFRVYSSANNCTFEYVSQPFLMDLEGKQGNFKNLREFVFKNIDGYFKIYSKHTPINLVRDLPQGFSALEPLVDLPIGINITRFKTLLALHRSYLTPGDSSSGWTAGAAAYYVGYLQPRTFLLKYNENGTITDAVDCALDPLSETKCTLKSFTVEKGIYQTSNFRVQPTESIVRFPNITNLCPFGEVFNATRFASVYAWNRKRISNCVADYSVLYNSASFSTFKCYGVSPTKLNDLCFTNVYADSFVIRGDEVRQIAPGQTGKIADYNYKLPDDFTGCVIAWNSNNLDSKVGGNYNYLYRLFRKSNLKPFERDISTEIYQAGSTPCNGVEGFNCYFPLQSYGFQPTNGVGYQPYRVVVLSFELLHAPATVCGPKKSTNLVKNKCVNFNFNGLTGTGVLTESNKKFLPFQQFGRDIADTTDAVRDPQTLEILDITPCSFGGVSVITPGTNTSNQVAVLYQGVNCTEVPVAIHADQLTPTWRVYSTGSNVFQTRAGCLIGAEHVNNSYECDIPIGAGICASYQTQTNSP

SEQ ID NO: 1513 - protein, 666 aa, Artificial Sequence; identical to SEQ ID NO: 1488
  SARS-CoV-2/Netherlands/ZuidHolland_2/2020__EPI_ISL_414556 spike protein (16-681)

SEQ ID NO: 1514 - protein, 666 aa, Artificial Sequence
  SARS-CoV-2/USA/WA-UW31/2020__EPI_ISL_414618 spike protein (16-681)
VNLTTRTQLPPAYTNSFTRGVYYPDKVFRSSVLHSTQDLFLPFFSNVTWFHAIHVSGTNGTKRFDNPVLPFNDGVYFASTEKSNIIRGWIFGTTLDSKTQSLLIVNNATNVVIKVCEFQFCNDPFLGVYYHKNNKSWMESEFRVYSSANNCTFEYVSQPFLMDLEGKQGNFKNLREFVFKNIDGYFKIYSKHTPINLVRDLPQGFSALEPLVDLPIGINITRFQTLLALHRSYLTPGDSSSGWTAGAAAYYVGYLQPRTFLLKYNENGTITDAVDCALDPLSETKCTLKSFTVEKGIYQTSNFRVQPTESIVRFPNITNLCPFGEVFNATRFASVYAWNRKRISNCVADYSVLYNSASFSTFKCYGVSPTKLNDLCFTNVYADSFVIRGDEVRQIAPGQTGKIADYNYKLPDDFTGCVIAWNSNNLDSKVGGNYNYLYRLFRKSNLKPFERDISTEIYQAGSTPCNGAEGFNCYFPLQSYGFQPTNGVGYQPYRVVVLSFELLHAPATVCGPKKSTNLVKNKCVNFNFNGLTGTGVLTESNKKFLPFQQFGRDIADTTDAVRDPQTLEILDITPCSFGGVSVITPGTNTSNQVAVLYQDVNCTEVPVAIHADQLTPTWRVYSTGSNVFQTRAGCLIGAEHVNNSYECDIPIGAGICASYQTQTNSP

SEQ ID NO: 1515 - protein, 666 aa, Artificial Sequence
  SARS-CoV-2/South Korea/SNU01/2020__EPI_ISL_411929 spike protein (16-681)
VNLTTRTQLPPAYTNSFTRGVYYPDKVFRSSVLHSTQDLFLPFFSNVTWFHAIHVSGTNGTKRFDNPVLPFNDGVYFASTEKSNIIRGWIFGTTLDSKTQSLLIVNNATNVVIKVCEFQFCNDPFLGVYYHKNNKSWMESEFRVYSSANNCTFEYVSQPFLMDLEGKQGNFKNLREFVFKNIDGYFKIYSKHTPINLVRDLPQGFWALEPLVDLPIGINITRFQTLLALHRSYLTPGDSSSGWTAGAAAYYVGYLQPRTFLLKYNENGTITDAVDCALDPLSETKCTLKSFTVEKGIYQTSNFRVQPTESIVRFPNITNLCPFGEVFNATRFASVYAWNRKRISNCVADYSVLYNSASFSTFKCYGVSPTKLNDLCFTNVYADSFVIRGDEVRQIAPGQTGKIADYNYKLPDDFTGCVIAWNSNNLDSKVGGNYNYLYRLFRKSNLKPFERDISTEIYQAGSTPCNGVEGFNCYFPLQSYGFQPTNGVGYQPYRVVVLSFELLHAPATVCGPKKSTNLVKNKCVNFNFNGLTGTGVLTESNKKFLPFQQFGRDIADTTDAVRDPQTLEILDITPCSFGGVSVITPGTNTSNQVAVLYQDVNCTEVPVAIHADQLTPTWRVYSTGSNVFQTRAGCLIGAEHVNNSYECDIPIGAGICASYQTQTNSP

SEQ ID NO: 1516 - protein, 666 aa, Artificial Sequence
  SARS-CoV-2/China/WF0004/2020__EPI_ISL_413694 spike protein (16-681)
VNLTTRTQLPPAYTNSFTRGVYYPDKVFRSSVLHSTQDLFLPFFSNVTWFHAIHVSGTNGTKRFDNPVLPFNDGVYFASTEKSNIIRGWIFGTTLDSKTQSLLIVNNATNVVIKVCEFQFCNDPFLGVYYHKNNKSWTESEFRVYSSANNCTFEYVSQPFLMDLEGKQGNFKNLREFVFKNIDGYFKIYSKHTPINLVRDLPQGFSALEPLVDLPIGINITRFQTLLALHRSYLTPGDSSSGWTAGAAAYYVGYLQPRTFLLKYNENGTITDAVDCALDPLSETKCTLKSFTVEKGIYQTSNFRVQPTESIVRFPNITNLCPFGEVFNATRFASVYAWNRKRISNCVADYSVLYNSASFSTFKCYGVSPTKLNDLCFTNVYADSFVIRGDEVRQIAPGQTGKIADYNYKLPDDFTGCVIAWNSNNLDSKVGGNYNYLYRLFRKSNLKPFERDISTEIYQAGSTPCNGVEGFNCYFPLQSYGFQPTNGVGYQPYRVVVLSFELLHAPATVCGPKKSTNLVKNKCVNFNFNGLTGTGVLTESNKKFLPFQQFGRDIADTTDAVRDPQTLEILDITPCSFGGVSVITPGTNTSNQVAVLYQDVNCTEVPVAIHADQLTPTWRVYSTGSNVFQTRAGCLIGAEHVNNSYECDIPIGAGICASYQTQTNSP

SEQ ID NO: 1517 - protein, 666 aa, Artificial Sequence; identical to SEQ ID NO: 29
  SARS-CoV-2/China/WF0028/2020__EPI_ISL_413791 spike protein (16-681)

SEQ ID NO: 1518 - protein, 666 aa, Artificial Sequence
  SARS-CoV-2/2019-nCoV/USA-CruiseA-18/2020__MT159716.1 spike protein (16-681)
VNLTTRTQLPPAYTNSFTRGVYYPDKVFRSSVLHSTQDLFLPFFSNVTWFHAIHVSGTNGTKRFDNPVLPFNDGVYFASTEKSNIIRGWIFGTTLDSKTQSLLIVNNATNVVIKVCEFQFCNDPFLGVYYHKNNKSWMESELRVYSSANNCTFEYVSQPFLMDLEGKQGNFKNLREFVFKNIDGYFKIYSKHTPINLVRDLPQGFSALEPLVDLPIGINITRFQTLLALHRSYLTPGDSSSGWTAGAAAYYVGYLQPRTFLLKYNENGTITDAVDCALDPLSETKCTLKSFTVEKGIYQTSNFRVQPTESIVRFPNITNLCPFGEVFNATRFASVYAWNRKRISNCVADYSVLYNSASFSTFKCYGVSPTKLNDLCFTNVYADSFVIRGDEVRQIAPGQTGKIADYNYKLPDDFTGCVIAWNSNNLDSKVGGNYNYLYRLFRKSNLKPFERDISTEIYQAGSTPCNGVEGFNCYFPLQSYGFQPTNGVGYQPYRVVVLSFELLHAPATVCGPKKSTNLVKNKCVNFNFNGLTGTGVLTESNKKFLPFQQFGRDIADTTDAVRDPQTLEILDITPCSFGGVSVITPGTNTSNQVAVLYQDVNCTEVPVAIHADQLTPTWRVYSTGSNVFQTRAGCLIGAEHVNNSYECDIPIGAGICASYQTQTNSP

SEQ ID NO: 1519 - protein, 666 aa, Artificial Sequence
  SARS-CoV-2/SARS-CoV-2/Yunnan-01/human/2020/CHN__MT049951.1 spike protein (16-681)
VNLTTRTQLPPANTNSFTRGVYYPDKVFRSSVLHSTQDLFLPFFSNVTWFHAIHVSGTNGTKRFDNPVLPFNDGVYFASTEKSNIIRGWIFGTTLDSKTQSLLIVNNATNVVIKVCEFQFCNDPFLGVYYHKNNKSWMESEFRVYSSANNCTFEYVSQPFLMDLEGKQGNFKNLREFVFKNIDGYFKIYSKHTPINLVRDLPQGFSALEPLVDLPIGINITRFQTLLALHRSYLTPGDSSSGWTAGAAAYYVGYLQPRTFLLKYNENGTITDAVDCALDPLSETKCTLKSFTVEKGIYQTSNFRVQPTESIVRFPNITNLCPFGEVFNATRFASVYAWNRKRISNCVADYSVLYNSASFSTFKCYGVSPTKLNDLCFTNVYADSFVIRGDEVRQIAPGQTGKIADYNYKLPDDFTGCVIAWNSNNLDSKVGGNYNYLYRLFRKSNLKPFERDISTEIYQAGSTPCNGVEGFNCYFPLQSYGFQPTNGVGYQPYRVVVLSFELLHAPATVCGPKKSTNLVKNKCVNFNFNGLTGTGVLTESNKKFLPFQQFGRDIADTTDAVRDPQTLEILDITPCSFGGVSVITPGTNTSNQVAVLYQDVNCTEVPVAIHADQLTPTWRVYSTGSNVFQTRAGCLIGAEHVNNSYECDIPIGAGICASYQTQTNSP

SEQ ID NO: 1520 - protein, 666 aa, Artificial Sequence
  SARS-CoV-2/USA/WA-UW292/2020__EPI_ISL_418077 spike protein (16-681)
VNLTTRTQLPPAYTNSFTRGVYYPDKVFRSSVLHSTQDLFLPFFSNVTWFHAIHVSGTNGTKRFDNPVLPFNDGVYFASTEKSNIIRGWIFGTTLDSKTQSLLIVNNATNVVIKVCEFQFCNDPFLGVYYHKNNKSWMESEFRVYSSANNCTFEYVSQPFLMDLEGKQGNFKNLREFVFKNIDGYFKIYSKHTPINLVRDLPQGFSALEPLVDLPIGINITRFQTLLALHRSYLTPGDSSSGWTAGAAAYYVGYLQPRTFLLKYNENGTITDAVDCALDPLSETKCTLKSFTVEKGIYQTSNFRVQPTESIVRFPNITNLCPFGEVFNATRFASVYAWNRKRISNCVADYSVLYNSASFSTFKCYGVSPTKLNDLCFTNVYADSFVIRGDEVRQIAPGQTGKIADYNYKLPDDFTGCVIAWNSNNLDSKVGGNYNYLYRLFRKSNLKPFERDISTEIYQASSTPCNGVEGFNCYFPLQSYGFQPTNGVGYQPYRVVVLSFELLHAPATVCGPKKSTNLVKNKCVNFNFNGLTGTGVLTESNKKFLPFQQFGRDIADTTDAVRDPQTLEILDITPCSFGGVSVITPGTNTSNQVAVLYQDVNCTEVPVAIHADQLTPTWRVYSTGSNVFQTRAGCLIGAEHVNNSYECDIPIGAGICASYQTQTNSP

SEQ ID NO: 1521 - protein, 666 aa, Artificial Sequence; identical to SEQ ID NO: 1488
  SARS-CoV-2/Iceland/192/2020__EPI_ISL_417819 spike protein (16-681)

SEQ ID NO: 1522 - protein, 666 aa, Artificial Sequence; identical to SEQ ID NO: 1488
  SARS-CoV-2/Belgium/ULG-6939/2020__EPI_ISL_417020 spike protein (16-681)

SEQ ID NO: 1523 - protein, 666 aa, Artificial Sequence; identical to SEQ ID NO: 1488
  SARS-CoV-2/France/HF2496/2020__EPI_ISL_418231 spike protein (16-681)

SEQ ID NO: 1524 - protein, 666 aa, Artificial Sequence; identical to SEQ ID NO: 1488
  SARS-CoV-2/USA/WA-UW291/2020__EPI_ISL_418076 spike protein (16-681)

SEQ ID NO: 1525 - protein, 666 aa, Artificial Sequence; identical to SEQ ID NO: 1488
  SARS-CoV-2/Portugal/PT0034/2020__EPI_ISL_418019 spike protein (16-681)

SEQ ID NO: 1526 - protein, 666 aa, Artificial Sequence; identical to SEQ ID NO: 29
  SARS-CoV-2/Iceland/202/2020__EPI_ISL_417750 spike protein (16-681)

(The sequence listing continues in the following parts.)
